United States Patent Application Publication US 2017/0114356 A1 - sequence listing, part 35

SEQ ID NO: 46479 - DNA, 362 bp, Zea Mays
gccagagccaacccatgttagtcttagcaattaagcatgtgtcgagttcagctctatcaaaatccactaagtatagctgaccctctaacacacccttaaatgctattgaatcatcacttcttctaaagacagtgacacctgtatcagtaaaaagacagttgtagcccatttgacataattgtgaaacagaaagcaaattgtaatctaatgaatcaacaagaaaaacattggaaatagaatggtcaggagatatagcaattttacccaatcctttgaccaaaccttgatttccatccccgaatgtgatagctcgttggggatctttgtttttctcatatgaggagaacatccttttctccccg

SEQ ID NO: 46480 - DNA, 1002 bp, Zea Mays
gcctcgggcgagtcatggcggtctcccgcccgaggttggcctcgagcaagtcgtgattgtgtctcccgcccgaggttggtctcgggcgaggcgtgactgtgtctcccgcccgaggttggcctcgggcgagccgtggctgcgtctcccgcccgaggttggcctctggcgagccgtgactacgtctcccgcccgtggttggcctcgggcgtgactgcgtctcccgcccgaggttggccttaggcgagtcgtaactgcatctcccgcccagggttggcctaggtcgagtcgtgaccgcgtctcccgcccagggttggcctcgagagagtcgtgattgtgtttcccacccggggttagactagggcgagtcgtgattgcttcttccgtccggggttggcctcgggtgagtcatacccataacctccactaaatccaccaaataaattgcacccagatttaacacactatcaaaccaacggttcaaatcgcttgataacccttcctcccttactcaaatctaatggacaataatatttggatcattccttgtatctcatctcttctcctctccctccccacgaccccaccgcccccagcctccccctccccactaggggtgaaaacgggcggatacggaaggatagtagctcatcctgtatcctaccctaatgtatttaaaacggattcgggatcggatacggatagttagaaacgggacggatacggatacagggaccggatatttattcgggcggataagtgacggatacggatattatttgatcgggtatcggatacttgtcggataatgcattaattggttaatatattcttgttcgaccacgaaattgcaagtaaattaatactaataaacatttaatagaagataatctcaagttcccacgtaaaaatggtaaagtgaagtattgattatgttgaaacctggatacttagagtgatttcatgtgtaactcacgcaataagtggaaataaaatagaagaaac

SEQ ID NO: 46481 - DNA, 536 bp, Zea Mays
aatttcggcagcatcccccttgcaaaactgcataaatgaggggggcaacagtgtataaacatatatcatgacaaaaacatactaagtattattaatcggctagcaaagagaagttaaacatacgacatgaagtgaattaactagtgcgcacgactagttaaaaaaacaaacttcatttgacaataagtttctaattaaattatggctgcgcctgggcagcgttattgtgagagtgaaagtgggcgtgctgctactcccctcattcccaacatgtatcaagtacctgcattgagtaatgcaagagtgagatgacacatctcagcaagtaaaataatatcaaactgtttaaccacataagaacattgttttaccaccacttgattccacaaccttcttattacgaaggtgcagcacgtatacaacgtacaacacacctagtcaccacacctcgcaggtagaaaccacaatagtaacatagtaatgtcacacttcatatatacctcatgagtgcaaatgtctgcaaatgcaaggatgac

SEQ ID NO: 46482 - DNA, 450 bp, Zea Mays
cataagtactcgttggaaaggtatgacaaagctctacatgattctcccactgatccctgctaattggccacgaaaaattcccagaaatcactagaactactgctgttcgtccacccactaaatttctggacagcacctctaccaaatcgcataggtaaacatgtaaccaattggattgcagcacaaatacaacaaaatgatcacgaaaatcaccttgggttcctccttcttttcttccttcttcctccctccaaactcccatggaagactcgcacccacacgacggacaccaagcggggaggctccaccttggagaggaagaggtgggggaggctagggttgaggggtggcgctgcaatcacttggggaagaaggagagggattggggcggctgcaagagtggaagagagaggggaggggcggccaaaggggtgggggagtgagagggag

SEQ ID NO: 46483 - DNA, 1238 bp, Zea Mays
cggacagtgaatagtgcatgtccggtgcacaccggacagtccggtgcctcctctcagaaaactctgttggatgtcctgtgcgccaactgtgtgccaccggtgagccaactgtgtgccaccggtgcgccaactgtgcgccaccggtgagccaactgtgtgccaccggtgcgccaactgtgtgccaccggtgagccaactgtgtgccaccggtgcgccagctgacagcccatcttctaggtcttcgctgatttcttcgggcttcttttgttcttgagtattggactcttatgcatctttttatgtcttcttttgaggtgttgcatcctcattgccttggtccaattctcttcgcatcctatgaactataattataaacactagcaaacatattagtccacaagttgtgttaatcatcaaacaccaaaactcaattagccaaatggcccggggtccattttccttacaatctccccctttttggtgattgatgacaacacaaccaaagcaagcaaataatacaagtatttgaattaaaatgtgcaatctacttgctaagatgcatgattgtccccacaatgtgatattatggacttaagcctcccctaactccataattcacttacttcctatttttggaccaaataaccaaaaccacttgaaaagccatttgtagatataaaattttaaattggtggtgtttggtgtttgataaagttttcattgctttggtccctaaacttctccccctttggcatcaaccaccgaaaaggaagacattaaaagcatgtagaaagtaaataagagcttgccctcaacaagaattgtatcaaatgatatcactagaaggatattaaaataaaccatatgaatgataccagttgaaaggaactccccctaaatgagtgttctctttagaaagaagtttctcccccttttttagagatgaagaaatactccccctgacagagatcctctacttaggaaaaagcatgtgaaaattagaggtgcaagacatgatttgaaaagactaacttcccttatgcataggtaacagaatatgagttaaccacttatgcatttttagcaacatggaagtatatgatatgaaatatagtctaatcaaatattggagaagacatgtaaatgatactagatgcagtctcaaaagataccgattgaaattcaatggcgagcttgagagacatgagagttcttggagattttgcagtggaagattg

SEQ ID NO: 46484 - DNA, 618 bp, Zea Mays
gtcaaatgtgtgaaggattaggggttattattattgactttgtatgtctggtactttgagtgcatcgtatgatagaatgaaatgtaagtttctgaactacagtagatgaagacttatattatgtgtaggttatcattactagttggatatttttcttagttgagatgttgaatgaagtatagtgacatgggttaagcaagtattgtgttgttgttgggctatcagtgctctatgtagagtttttggcatttcttcgatgaactatgccgcacaagatgttattggcttcttttggctttattgctccattagttctatagattttctcccttttggtggggtgcaaggaatgttagattacatgattatcttttcatgatggcaagaataaggtttaggaagattaggagttttgttccaatggaactacttgtttcatagtgctttaaggtgaggtgtttgatcttcttatacattcatcgggtgtagatgtttcaccatttaattaaaattaatggttgaagttggtaagggttgtgcttggtgcatattaccccttcataaaagagtgttgtcttaagacattgatgttgatgtatagctgcatccaaatttgat

SEQ ID NO: 46485 - DNA, 1433 bp, Zea Mays
cttcctcctctctgaggtgagatcctgtctcctccctcctctctccttgcttgcctacaacacccccaccacggcgccatcgtaccgctttgcagctccaatcttcgcacgctccagtgagaggagcccactggactgccagctcagtaccctcctaaggcgacgttgtcgcacacgccgtcattaggtgacactcgtccttgtgccaccacccacaggccatagccttcggcttctgatctggagttaaggattcccacggcagccgaacccaacacagaccgtcccaacgtagccgaacccacgacaaccataataatgcaaatgcatcgagttaggttgtcaagcggcatgtcggccgctcaccatgacttgggtgggtgcgtgggaagaacaggctaattcttttctttttccagcaaacaaacactttcaattggctgatggatgaactcttgtttgcttgtcctctccctctaacttacatctgcctagctagctttaagttagggagtaaacaactcggggatggaaattgtgctacaccagagtccagttagctctttcgggcctgtctatttaaacgcaggctctacgccttagaggagttgtggataaaatcttacatgaatcacttgttccacataaaaatcagacgtccaccccttgcaacttgcatatttacatgataatctttcaaagcagcccgttcttacatgataatattgttagataacttgtattgttagattaacctatattgttagataacctgcattactagataacctgtatcgttcaccaagattgatgcttgttagataacctgtattggcatagatgtggattaattaggaccaacacaaaatctgtatttgcagctacaacaaagaatcaagctccggactgttccagcaaataacttgattctacatgtttagtctgtattggcagataacttgattccacaacaaatttgtactcatgtatctgttacggtttgagcttccatagttaaatgaaatatgtgtgtttgatggtacacacgtacgagctagtgtccccaagtctcgcgaagcagcttttcgagatagaaagagtttcagaacctaaaatgtgatggttgcagtagactttgaccttcgcttcacatatgtgttggttggttaggagggttcggcacatgatgccgtcattctagttgatgccttacaaaggtagaatggtcttgtagtccctgaaggtaattaacaataccacttaaaatttacaaccaccataagataaatcattccctaacgatgttatcatgccatcatggtattgctgcttgactatggttatggtgcaaagctggtggttcttaccaccttttcgcggtatccgataccacttaaaagagtggggtaacgataacaggctagaaaaacgag

SEQ ID NO: 46486 - DNA, 185 bp, Zea Mays
cccctgcccatctcctcctctctcaattcttgcagccaccaaaccctagcccccccccctctcaatcccctcctcccaaggtgccaatccttgccgctcggatcatcgtcgtcgtggtgcgagtcttcaatcgttttggtggagagaagaagggaggaaggaaagggggagaatccaaggtgatt

SEQ ID NO: 46487 - DNA, 251 bp, Zea Mays
caaaaataaacttataaataatggattcatcccatactagaatattcaaattgcatatttgatctgagtacaaatttgccacaaaaaattgaatttgaaattggaattcaaaaagaaaaaaagaaaaacaaaacagaaaatgtaaaagaaaaagaaaaggagcctattgggctcgaatcagcgtttcttggcccactaatccccttcccaccgcgcagcccaccgctgggattaacgcgtcgacatgtggg

SEQ ID NO: 46488 - DNA, 931 bp, Zea Mays
cctcaagcaagcaaggatattatgttatgatgatggtgatgacgaccacgatgttaatagtgatgatggtggaagcgaacccgttggtctttccagaaacagaaacaataatggtctgtatacaagtgtatttactggatataatcaaatgtgctcaaagtgaacactgtctgcactgaaaggaagacaccaaactgaagagagactgtagggcagaataatgtaactggaacaacaccattatcatctccccctccgatttcctcagccattaaactcacggcttacgcctgcagccgtcggcaacgggctgtgactgtgacaaacacacaccttgaacctgcatcacagagtacacgggccatgcagaatgcaactcagttcattgttcataataccatgggtcgatcagagtagcagagaaaatcagtcacaggtttgtcctcctggaccctggtgcggcgcaaatgacagcaggacatttcaatatcaagatgcttacagggaggaacatgggttcgatcgaacagtggggaaccatagcttaggacacagcttataagaagctttaaattgccatggaccacactgagccatgccaccagaagcaagcgtaaactcaaccatccacagcaagaaaccaaataatccttgctattataagaccgtgtgatttaccactgaaaaaaatgactactaaccaagactgtaaactatttttttcctttcatcacaaattaaattgtaacaatcattataatgaccatttttccatataattcctaaacgtatttttatgttctgttcataatcaaccatgacatcaacacgaacagaaagggaataaaaagacggaggaaatcaagaactatccaaagttatacacgtatagatagaaactttgttttgccctgctatcatcttgcgagcg

SEQ ID NO: 46489 - DNA, 2433 bp, Zea Mays
aaatgtcgacagcatctcctttgaaaatttgcataaacgtggaagcaacaaagtataaacagatatcatgataagaaaacatactagacattaataatctgctagcaatgggaagataaccataacgtcatgaactgaattaactagtgtgcacgactagttaaaaacaaacatcctttgacaagaagtttctaattaaatcatggttgtgcctgggcagcgttattatgagagtgaaggtggacgtgctgctactccccttattcccaacatgaatcaagtacctgcattgagtaatgcaagagtgagatgaaacatctcggcaagtgaattgtttcgacgagatatttaaaccaaaaaaattgaattaatcaacattttaaagggatcacaattgagaacagaaatacttgtagatatagaactcaatagtcccaaaataaccaatgccatctcatttcctcgaacaaccacaataggttgtataacactttcctgcgtcaacaatacctgcaaatatcatttcgatgtatgcatagtaatgcaatgtgtaagtcctctgccttcatacctcttagagtataaaaccacaccatctacaaataccacttcaatgaatgcatatgaatgcaatgcatatgtcctctgccttcatacctctaagggtatgaagccgcatcgtacccctcctcgggcaacgtacgatgctaagttgtaccggtacggtcggaccataggtcacgacaaaccttcagatgcaagtgaatcatgcaatgtatatggcatgttgcatttatcaatatacttcacttccttcacatacaatacaacctcaaataatacttcatttaccttcagatacaataccaacctcaaataatactttatttaccttcagatacaataccaacctcaaataatacttcatttaccttcaggggtgtgaattaatctcacgagtcatactcgaatcatcatcatcatcaatatatgattgagcatcagcataatgcaagcaagtaaagcatcaccatagagtccaattatgaaagaatccaatacttctgaatattagagtgtaggcaatagaaataacaggtcagaacggaagcaaccactgctacattcacttgccttcatcgaagaagaagaaatgtactaggcatgatctggagtgtagccacctgctagcgggcataaaacttagtacaaatatttctcaaacatttgccaacaatcaacaaatcgctcctacacttgaaaccaagacctggtggaaagactcccaccctgaaccacatgacatacagcagcagcgctgtttgttaattttgtatctttaaaattataacagttgtgatatcaaacaaataatctaggagtatctacacaaaatactctacaacttcggtattcaatggataattaaaatctgccatctacaagttctaaaatctctaacaagataactgactgaatctgtttcaaacagcagcgtaattaacttcaaaattcgatatctcacaaactactcaaccaaaaatcctggaattctactggcagtaagaacttttatccctctgtagaagtctccatagttggaagagccaattcggccatttacctgatgaaacctaccagcgaacagacccgctcatttttgtcaggcaaacaggaacagccacagtaaaacaaacataactggagtttcacaaatcatatgaatgcactctttaacaatctggaaagtttatgaaattatctacaactacttttaccaacccatagtttaattctgttgataaaattgcctaactcttaagagaacagattctgcacagaattatgagactgaaaaactgctataatcaaactgcaataactttctgatctgatgtccgattgaggtgttcttcgcggccacggaaagatctacaaattatctacgactcatatataaactttttatttttttgaggccactaagatcacagaaaactggtatgaacagaaactgtcgaatctgccattctgcagaaattaaattcgagatcaaaacctaaccccacatctaatccaacctctaatccttcaatccacatgatccacaacctccaaaagcacataattatatggaggaacaaggatcccatccttacctagggtttccccaagaaaatctgcaatagatgggggggtagaacatctccttgatcctctcttcctcttcatcaatccttcttgctcctcctcttctcgatccttgctgcgtgggggagggggagatctagggaggaggaagaaatggtgggcggctgccatgggaggagagggggtggccaaccaagggaaaaaaggggggagggtggcggccaagagaggggggtggagggaaaaggggtggccacctagggttttgtgggagaaaagaac

SEQ ID NO: 46490 - DNA, 1109 bp, Zea Mays
accaacctcaaataatacttcatttaccttcagatacaataccaacctcaaataatacttcatttaccttcaggggtgtgaattaatctcatgagtcatactcgaatcataatcatcatcaatatatgattgagcatcaatataatgcaagcaagtaaagcatcaccatagagtccaattatgaaagaatccaatacttctgaatattagagtgtaggcaatagaaataacaggtcagaacggaagcaaccaccgctacattcacttgccttcatcgaagaagaaaaatgtactaggcatgatctggagtgtagccacctgctagcgggcataaaacttagtacaaatatttcacaaacatttgccaacaatcaacaaatcgatcctacacctgaaaccaagacctggtggaaaacctcccactctgaaccacatgccatacaacagcaatgttgtttgttaattttgtatctttagaattataacagtggtgatatcaaacaaatactccatgagtatctacaaaaaatattctacaacttcggtattcgatggataataaaattatgccatctataagttctaaaacatctaacaagataactgactgaatctgttttagacagcagcatagttaactttcaaaattcgatatctcacaaactactcaaccaaaaatcatgaaattctgctgaaagtaagaatttttatccctctacaaaagtctccatagctgggagagccaattcggccatttacttgatgaaacctaccagtgaacagacccgctcatttctgtcaggctaacagaaacagccacagtaaaacaaacataactgaagtttcataattcatatgaatgcactctttaacaatctggaaagcttataaaattatctacatcttttcttacaaacccaaggtttaattctgttgataaaattacctaaatcttaagagaacagattctgcacagaattaagagactgaaaaactgctataatcaaactgcaataactctctgatctgatgtccgattgaggtgttcttcgcggccacggaaagatctacaaattatctacgacttatatatagactttttatttttt

SEQ ID NO: 46491 - DNA, 1446 bp, Zea Mays
aaaaaatattctacaacttcggtattcgatggataataaaattatgccatctataagttctaaaacatctaacaagataactgactgaatctgttttagacagcagcatagttaactttcaaaattcgatatctcacaaactactcaaccaaaaatcatgaaattctgctgaaagtaagaatttttatccctctataaaagtctccatagctgggagagccaattcggccatttacttgatgaaacctaccagtgaacagacccgctcatttctgtcaggctaacagaaacagccagagtaaaacaaacataactgaagtttcataattcatatgaatgcactctttaacaatctggaaagcttatgaaattatctacatcttttcttacaaacccaaggtttaattctgttgataaaattacctaaatcttaagagaacagattctgcacagaattaagagactgaaaaactgctataatcaaactgcaataactctctgatctgatgtccgattgaggtgttcttcgcggccacggaaagatctacaaattatctacgacttatatatagactttttatttttttgaggcccctaagaccacggaaaactgggattaacagaaactgtcgaatctgccattctgcagaaaactaaattcgagatcaaaacataaccccacatctaatccaacctctaatcctttaattcccatgatccacaacctccaaaagcacataattacagggaggaacaaggatctcatccatacctagggtttccccaagaaattttgcaagagagatggggaagaacatctccttgatcctctcttccccttcaactcaatatttgtgctcctcctcttctcgatccttgctgcgcggggggagatctagagggaggaggaagtcgtggagaggggctgccatgggaggagaggacagccagcccaagggaaaagaagagaggggcggccaagtgtgggagggggggaaaggggtggcggccaagtaggggcaaaagggggaaaagaccaccactagggttttctttgcgggagaaaagaagcgacgccacagatgactccgacttagcatccaacggcccacaacccttttcctacatccacgcaccgaagatcaacctttggcaacatttttttgggatattacactctaccaggggggcagctgcaatccattggggagaaggggagggggcggctagggttggggaggagagggggggctcccatccaccggatcgagatcaatggcccaaactcgctctttcctttgagctcccgaccccagcgaaaaaatgccaaaagatctactgttttctgaggaatgcctcctgaaactccaaaccccaatgccacagaacatgaaagaaaagagaaaaagaagtttaacttcttttcacaaaattggggtatcacag

SEQ ID NO: 46492 - DNA, 287 bp, Zea Mays
ccacgacgcccggcggccccgccgtagatccgcgattctggtgagcaatcgccggccacgagagctttcttttcccccgagaaagtggctgacggctccccgtagacacgacgaagcgattcaggggtcgtaccggcgtttggggagatagcagaggtcaacgacggcgcacgcaggggcgggcatagcggtgacccattgctccaccggccagatgactccgcggcaaaacgacgacgctgatgattttgtggtatggtggctctctctctggtcggcaatggcgg

SEQ ID NO: 46493 - DNA, 458 bp, Zea Mays
gaaagccttatctcaaaatccctcaacaaggatcagatggaggcaattatggagctggcaaatcaagggaaggggaagaaaggaagcaggtctagggggcgcaaggtgttgccactcaaagcccccaccatcaaggctgttcccggaatatgagctgcgcgtcctgttgggctatcagtggttctagttttattttatgtatcccaagttagttctaccttgctcgtgtcagggggcagagcaagatgtcctgaaggttcttttgccagactgttggtcgttgcatggtatttggtggtctggaggtggttttcgaatcaatggatccttgttcctctgtatcttactaatttcagtttggaacttttgtgtgtgtcgtgggccatgtgtatcttactgttggtgaacaaggttgccagtctgcatcaaatgttaactatgttatattctttatgtgg

SEQ ID NO: 46494 - DNA, 268 bp, Zea Mays
tttggaatgatttttgattgctcattattgattttagatattgaatagcattttctcttaaatgaaaattcacataactaatataataattattagtctaaaaataaatattttatttataaataattttggtttaattattatagattttagggttatttaaatatgtatttcgaaattagaaaaggaaatagaaaaaaaagaaaaagaaaaaaaacctaaccctaaccgcctcggcccattaggcccattatccctaaccctaaac

SEQ ID NO: 46495 - DNA, 302 bp, Zea Mays
ctagagggaggataggggtttgcgccaaggaggtagcagggatgggaagcggataaatggtgagagagacaaaaagagtacagagagggcgatgacttgtagtgggcggacctctggtcacgggaaaacggtttatctttgagcttgcggcttgggaggcggagggatcgcaacgacttcagctggcgacggaatcgcgcgatcatggaagatccggtcagcgagatccggttctcgcggggaagaagctctggcgtggatttgggggaggacacggaaggagcattgccagcgtgggtgtt

SEQ ID NO: 46496 - DNA, 278 bp, Zea Mays
aaagtttcatgcatcgtaaagaattacaaacaatttatatattacattcaaaactataaaatattacacactttgttcagcaaatattacatcaatattccaaatgtttttacaacaatagttattcttcttttaaaactgcttccgcagcttcgtttagtagttgagtcacagcttcgtccataatagcttcggccatcttagtaacttcatcttccttttttgcttcggggtcggccaatgactcgaagggctccgggggaggagacagttcagct

SEQ ID NO: 46497 - DNA, 1208 bp, Zea Mays
agtgatgatatcaaacaaatactctaggattatctacacaaaatactctacaacttcggcattcgatggataattaaattctgccatctataagttctaaaacatctgacaagataactaactgaatctgttttagacagcagcatagttaactttcaaaatttgatatctcacaaactactcaaccaaaaatcatgaaattctgctggaagtaagaacttgtatccctctacaaaagtctccatagctgggagaaccaattcggccatttacctgatgaaacctaccagtgaacagacccgctcatttctgtcaggccaacagaaacagccacagtaaaacaaacataactggagtttcataattcatatgaatgcactctttaataatctggaaagcttatgcaattatctacatcttttcttacaaactcaaggtttaattctgtagataaaattgcctaaatcttaagagaacatattctgcacagaattaagagactggaaaactgttataatcaaactgcaataactctctgatctgatgtccgattgaggtgttctttgcggccacggaaagatctacaaattatctacgactcatatatagactttttatttttttgaggccactaaaatcacagaaaactggcataaacagaaactgtcgaatctgccattctgcagaaaactaaattcgagatcaaaacctaaccccacatctaatccaacctctaatcctttaattcccatgatccacaacctccaaaagcacataattatagggaggaacaaggatctcatccatacctagggtttccccaagaaattctgcaagaagagatgggaaagaacatctccttgatcctctcttccccttcaattcaacgtgctcctcctcttctcgatccttgctgcgtgggggagatctagagggaggaggaagccgtggagaggggctgccatgggaggagaggatggccagcccaaggggaaaggagggaggggcggccaagtgtgggagggggggaaaggggtggcggccaagtaggggcaaaagggggaaaaggccaccactagggttttctttgcgggagaaaagaagcgacgccacagatgactccgacttagcatccaacggcccacaacccttttcccacatccacgcaccgaatatcaacctttggcaacatttttttgggatattac

SEQ ID NO: 46498 - DNA, 389 bp, Zea Mays
cggcttggcgtgcaacagagaggcagggaggaggagagagggaagaggtggcggctgagactccaccaggggcgcgcggcggcttcaactgggaaggaaaaggggagggagaagagagaggcgcgggtggggcccacacgcgagtgagagagagtggtaagcaggggcggccggcttcttcatgggccaaattcgttagggtttcgtttttttctttttttatttttttatttgttttccttttgtaaattcgaattatatttttaagtaaccctaaatgtcagaataattataaatgaaatatatatttttttggattaataattattatgttatttatttactaggattttcatttaagaagaaatgttattcaataaccaaaaatc

SEQ ID NO: 46499 - DNA, 194 bp, Zea Mays
cttttctgcttaacggcccgccaaccctggaatcggttcagccggaggtagggtccagcggccggaagagcaccgcacatcgcgcggtgtccggtgcgcccccggcggcccttgaaaatcgggaggaccgaattccgtccacgcccggtcgtactcataaccgcatcaggtctccaaggtgaacagcctctggt

SEQ ID NO: 46500 - DNA, 979 bp, Zea Mays
aatcgcctcaacccaaaatcggtccggagtcttgtactcattaagcatggtccttgccatgtccagtagagttctatttttcctctccactacaccattttgttgaggtgtgtagggagaagagaactcatgcttgatgccctcttcctcaagaaagccttcaatttgagagttcttgaactccgtcccattatcgcttcttatcttcttgattctcaatctaaactcattttgagcctgtctcaagaatccttttaaggtctcttggatttgatttttcttgcaaaaagaatacccaagtgaagcgagaataatcatctacaattataagacaatacttactcccgcggtgcttatgtaagtgatcagatcgaataaatccatgtggagtagctcaagcggcctgtcggtcgtcatgatgttcttgtgtggatggtgagcgccaacttgctttcctgcttgacatgcactacaaaccctgtctttctcaaaatgaacatttgttagtcccaaaatgtgttctccctttagaagcttgtgaagattcttcatcccaacataggctagtcggcgatgccagagccaacccatattagtcttagaaattaagcaagtatcgagttcagctttgttaaaatcaactgagtatagctgaccctctaatactcccttaaatgctactgaatcatcacttcttataaagacagtaacacctacatctgtaaatagacagttgtagcccattttgcataattgagaaactgaaaacaagttgtaatataaagaatctacaagaaaaacattggaaatggaatggtcaggtgatatagcaattttaccaagtcctttgaccaaaccttgatttccatccccgaatgtgataactctttggggatcttcgtttttctcataggaggagaacattcttttctcccctgtcatgtggttcgtgcatccgctatcaataatccaactttag

SEQ ID NO: 46501 - DNA, 1443 bp, Zea Mays
gtcttaattaacataagaacttctacatcgactaattatctaaggaaactacagcacctaacatcaagcaagaaccaacatgtaatgaagctcaaaccaagtcatagatgcaatcaacactacgatttcacaacatcgaatttggatgcagccatacatcagtatcaatgtcttaaaacgacactcttttatgaaggggtaatacgcactaagcacaacctttatcaactttaacaattcattttaattcaatggtgaaacatccacaccaaatgaatgtataagaagatcaaacacctctcctcacagcaccacaaaacaagtagttctattgaaacaaaactcctaatcttcctaaaccttgttcttgccataatggaaagataatcatgtaatctgacatacattgcaccccaccaaaagggagaaaatctacagaactaatggggcaaataagccaacaagaagccaataacatcttgcgcggcacagttcatcgaagaaatgccaaaaactctacatagagcactgacagcccaacaacaacataatacttgcttaaccaatgtcactatacttcattcaacatctcaactaagaaaaatatccaactagtatggttaacctacacataatataagtctttatctactgtagtttcagaaacttacatttcattctatcatatgatgcactcaaagtaccagacctaaagggtcaatactaaccccgtaatccttcacacatttggcaaacatctcaagcttatgtaaaaaccacatcatttaggaataggtgactaaccacacactaccaactctaggctaggcaatgacttcattcaaaccaatagataagtggtccaacaatggctccacaaacatgcatcggggagagaaccatcagatcctcaacgtattaatacataatcaatggatcaagaaaatcaaagattttattctacaattagcatgactaacatgcaaccactttaaaccacatctaggctttgtgtgtactaaaacacacgatagaagagagacatgtaagccattctggctatgtaaagacttcccccaaaatccatataaaagtaccaatattcatttctttcagaactggtttctcgacataaacaatcattctttgcaaagatagatggagctatccaccaaccggccaacaacttcaattcaaattaatggttaccttgtaacccaaaacatgcaattcacactcctcttaaaaacatcctcaatcaagcatatataacaatattattgtaataaaactcaaccatgaaaaacatgttgaaaacaacataggcatacctgtatatcaccagcataatagcaacttcaatctcacaaaagaccagcgatatcaatcgcattaataaaacaatatcaaaatttagaaatgaattatatcaggcattaagtc

SEQ ID NO: 46502 - DNA, 744 bp, Zea Mays
agggggcggctgccaatggggaggagagcaagagagggagggggcggctgcaacccaattggggagaaggagaggggggcggctagggttggggaggagaggggggggctcccatccaccggatcgagatctatggcccaaactcgctctcccctttgagctcccaactccagcggaaaaaatgccaaaagatctactgttttctgaggaatgcctcctaaaactctaaaccccaatgccacagaacatcaaagaaaagagaaaaataagtttaacttcttttaagaaaattggggtatcacactctaccccccttaaaaagaattcgtcctcgaattcgaccactccacaaaacatccaaggtaccccatatagcagcaccatgcaaaacatgggtccattattggtcttaattaacataagaacttctacatcgactaattatctaaggaaactacagcacctaacatcaagcaagaaccaacatgtaatgaagctcaaaccaagtcatagatgcaatcaacactacgatttcacaacatcgaatttggatgcagccatacatcagtatcaatgtcttaaaacgacactcttttatgaaggggtaatacgcactaagcacaacctttatcaactttaacaattcattttaattcaatggtgaaacatccacaccaaatgaatgtataagaagatcaaacacctctcctcacagcaccacaaaacaagtagttctattgaaac

SEQ ID NO: 46503 - DNA, 572 bp, Zea Mays
atcttcttttaaagttatcattaagccttcttaggcaaagaggtgtggcatcgtggctctttgtgccaaaggtggcaaatgtcatgttatagcatgacatttgcaaaatatacaatgtgctaagaggaggatctatttgcagtttttatcattattattaatttataggcttcataaatcaagacaccacaaattatagacatagatggtataatagcaaggaggcaaaataatttcaaggagatagagaatgtcatgttacacctttatttatgatatggtattgctattttcatcccttttatctataatataccccctatgtcctaaaatagtgtttgttttagctcttagttttttgtatatatttaaatgggtgatgatgaatctatacatatatataacacatacatcaagtattgtatgaatccattaattacctaaaacagattttaatttgggacatatggagtatatgtttctttgtgtattcataggcggtgttttatgactttatatggcctagtgcaactgtgtcaactccacacaatgataagacccaccaaaatttc

SEQ ID NO: 46504 - DNA, 399 bp, Zea Mays
gtgcacgtgtaccgggtaacttaacaaggctatcgagttcaccaactggaactcatcatcccaaggatctcccacataacaggtatattacagtaatcacatttgatacacacacattggagatagagcggaagacttttacaaagtatactttacattccagaactcaagttttacatggtagaaagagatgtatttattacaagtcctgatagtactcgaagtgcataacttattacaacaattggaagggtgaagcctttccataaaatatatacataaacattctaagcttcaagtcatccacatgaagtagctaacccaaagataagggaataaaacttctcctacaaaaacaacaagggataaaaccctaagtacgcaattactcagcaagac

SEQ ID NO: 46505 - DNA, 282 bp, Zea Mays
cgcgctccagctcctcgcctctgcgcaggcaatcggactcacgctgcactccaacgcagtcgccgcactcatttctgtgcttggcgttgtgtggcgtgtcgtcgagacggagactttcctcaagttctgacaaacagctgggagagtgggaggtaggaaagtgagaagatactgctgaaggagatggatgctgatggagttaaatcaaacttgcgtgtgttcagtcccgatccttgcaatggaaaaatcatttgcagtgctcagagagatgcagggaagtgg

SEQ ID NO: 46506 - DNA, 50 bp, Zea Mays
ggcactgtacacacgctcctttaatcacgcattgggcatttgcttttgcg

SEQ ID NO: 46507 - DNA, 326 bp, Zea Mays
aaacggacgacggggtcacatgggctgctcggcgtcggtctgggtcgcggctcaactggggcgaggttggcggctccgcggtgaagcagagaggctgggaggagtagagagtcgggtggcggctgagcagagaggagccaggggcggcagcggctaggtcagggcgcgtgctaatgggccctagtgggcttttagggttaggttaggttagtttttctttttctttttatttttcttttctattttctttttattttctattttcttttctaaattcaaaatatatatttaaataaccctaaaattcagaataattataccaaaat

SEQ ID NO: 46508 - DNA, 589 bp, Zea Mays
atagttttcctatattttttctgatcttgcaccaactaatttacatctggtatattttcctctatatatatcctcacagaaaatacggctcggtaaagcccacacaaattttcaacgatctcagaacgtcctcgtttcgatttggcagatggacttcaaccgaaacatgggcctagctgaggctcgttctgtgctgtccgggcctccggcttgaactcgttgcattttcttccctcggccgtccggttccttcacgaatgcgcaacagggggcccacatacgccgcgctaacggcactcaccatgcccatgatgatgatgcaacgacccatcaatgatcgatcttcccttcccagcagagcagtgccacgcgccgtgatcgtcccatgctttctattgagaactatgttaccacggatcaccagatccgctcccttcccttccgtcagcagtagaggcgcaagaagctgtagaatacccgtctcccttcccataagcacgacagagtaaacacacgagacacaggatattgggttgggcctctggcctctttctcttctctcttccatatgaggggtacatgttctata

SEQ ID NO: 46509 - DNA, 909 bp, Zea Mays
ctcatacgtagctggacatcagcaagccgaaataattccttccacaggttactgagaaacaccttgtcacgatcggaaactatagaatgaggcaatccatgatgtttatacacttgatcgtggaaaaggcgagcaaccgtcagagctgtaaatgggtgtttcagtggtaaaaaattggcatattttgaaaacagatcgacaaccaccaggatgcatgtatacgaatgtgaactaggcaaagcctcaatgaaatccatagaaatgatctgccataaagaagaaggaaccggaaggggttggagcagaccaggtagcctagcacgatcagctttggcttgctgacatatcaaacagtgagtgacatatgtgtgcacttcagttttcagaccttgccaagcaaacagttgcttcaaccgggcatatgttaccggaaatcccgagtgaccgcccactgcagatgtatgaaaagcagctatcaacttctgatgcagatgagctgaaggtcctacccaaatgcgcttcttataacggagcaacccatcttgccaggaaaaatgtggaacggcggacgaatccacagcgagcttagcaatgatatccgaagaatgggtatctgccaaatatgtatcagcaacttcggtgacccactgtggctgacaggacgacaccgccaggcaactcgctgacactataggatgtcgcgataaagcatcagcaaccccgttctctactcctttcttatacacgatgcgatattgcagtcccaacaaccgagtaaacattttcttttgccatggtgtgtgcaaccgctgttcatccaactgagcaagactgcgatgatccgtatatatgatgaattccttaagttgcaagtaatggcgccaatggtcgacagcaatcaaaatggcc

SEQ ID NO: 46510 - DNA, 464 bp, Zea Mays
aagaagttgaaggttcacttgaagtagtttgaaccaaaattctcgagcaaaaacacatccaatgatatggtccaaggtttcttgatcctgatcacataatggacatctctctggatggtgcatgcctctttcatgcagcctatctgttgtccaaaccttcctgtgtgcgaccaaccacataaaaaacttggtttttggaggagcccaagttttccatattctatgaaaaggctcaaactcagaagatccaataaagaaacccctatatgcttcctttgagaagaactttccgtttgcagctaggcgaaaaaaatgcttgtcttcaacttgaggtcttagaacaattgggtcgattaaatcccacaagatgagaaactcattgataattccaacagaaagagctccatgaatgtcagaaatccagctgattagagatagcatccaccactgttctcttgttaacc

SEQ ID NO: 46511 - DNA, 254 bp, Zea Mays
gcaagagtgagctcacatacgttcatcgctcaacaagttgtggggaataatgtgaatgaactcgccaaaggtgggagctcatgtgaagtgtaaggcttaccaaagaggatggttgaagctgagcattgcttttaaagttggtcaaaattttattagcaattactaagtataagtaaataccaacccaattgaatagtagaacaaaagtaacaacctcacctgcgatgcaatgcatatgacaaattgagtttaag

SEQ ID NO: 46512 - DNA, 278 bp, Zea Mays
cttttaaaagttatcatataagcctatctcaaattcatgggatgagagatggaaattgattctatagatttacatgctatttttccaatgcacaacttatagcacactcttctacttgcttctctataacataaatatagtatataacaatctctctcatatgatttaggataatatacaaatatattacatatttaaatacatgaacttaattagttttgtctaaattataattattataatggaattcaattccaacgaaacaaacgggcccttag

SEQ ID NO: 46513 - DNA, 1968 bp, Zea Mays
attggtctatatatattcttattttataaacatggataaacatcaataatatttatattacaattgtactttcatcttgacagaaggtgaaaaaagcaggaatgacgcgagagtgattacaagtcagcgtgaatagtatggtgttactgttcatctatttataggcacaagacgcggcctggacaaaattacactcatgtccctgacatttactgttgaccataaggcaaactgtcgaggactaaggagtcttttctcctttaggtcagtttcgtctctcatcatcatcctggtgttaagccgaagctccttcagccacaacttcggagccggtttatccttcctttagaccgcaccttcataccatgcacaccttcatctcaaagccgaagcctcctgtaacagtctgttatactgaaaaatatgttggttaagtttttgaggaccttcggaagaggaaggcccccaacagggcacaacttgccttatacttgagatcccatgtaccaaagttagtcttcagattctcgtgacctcaccgctattcgtagcaatacatacaaatagtcaagaagtacataaaaataacagtacacctaacaagagaacaaacagtgtaagaatattctatgcgatgctacgagagcgtagattcgagaaccactaaaatcggagtttcggttaaagagttatgatttttggaagattttcatgattaaataagtaaactatattctatgttgattaatgtaaatcatatgagaaaacctatcaaagaattaaataattcaactttgatctaagttataacttgattctagatcatattttagttagactacactcataagccgactaaccttgattagaaagatctaatctactaaacattggggtaacaaatagctaaccataaaagtatgtgatatgatataataatgtttgcaacaacgtagtaaatatttatacgaatatagcgcaactagaacgaattaaatcggtgtttaaacgaaggagatatggatttcctaggtttctagaattatctgtataccaaaaatcaatttcattatctgattttatgaatatcatagcactaaggactgcggttacaattctttagaaatccagggtcgattttataaggttttggacctggttgtgaagttcttcgaacaagagtggagcacggatttatattctaaacaacacaggggctcttatgagaacgaccacgaccgaaggggtatcggcaatcgtgagccgtcagatctatatcagaccgcccagattaaatcatccattatgtgaaccggtatgcacccttggccaccagatccacgaaggacggacacgacttaaaacagggcgaatcattctctacgtctgatctgaattggatggtctaacacgcacacaccgaagcggtacgcacaaccagatctcggccgcccaacacatagtctacggccacgatcaaactgagcttgaaaggtgccatcttctaatatccaccgccgatgcccgatctaacggttctggtcgttctccccaacattccccttccaccaccggccatccgtgcggcggagtatagagcccccgcggcgtgagctcaccggaatcatgcggaccgacgatgcaaggcaccattccatcatctaacggttgctacgcgatgcgaagtggttataggaacttctgaggatgttcttacccgcagtgaggttatggagaagctagcccacgacatgaagcggatcctcggcggagttggattccgacgaggaatccccgtgctccagctgcaccatagcgctcaatccaaccatgaaatcatgcggtgtagtgggtcaaccttctttgactaatttctggtcaccttacaacgacgagagggagaagcgacggcggcgaccctactgtgatccacggcagggcacagggtttctaggtcccatggtggcc

SEQ ID NO: 46514 - DNA, 64 bp, Zea Mays
tttgtgaatgctgagattcgaactcgcacctatctctcacacataccctcctataccactacac

SEQ ID NO: 46515 - DNA, 161 bp, Zea Mays
cttgccttcaccggaagtttgggaaaatccctaagtatgatccggaagtccaccaccttgggttcttcccttcctccttccttcttcctccctccaaactccaattgagatcgcagccacacgacggagaacacgcgggagggctgcaccttggagggggg

SEQ ID NO: 46516 - DNA, 2096 bp, Zea Mays
aaggtaccaagctagtaggtgacaagcagaggagaagccttacatgtcaataagggcctacctctgatagccaaggatgacttgcctatgtcctttgtttacaaaggacctgaatgtgtggaccattgagaggttcataggcagtctccttggctagcctgagtggcccctattgctcatgctaggcttaatcgagactctttgacttggtgcacgcaattagacacaggagtctcctcgacttgtgcatgggcgtgcatgcaattagacacgaccttgtcatatgtagctgtgtttcagtgtccatgcatgctccattcctagcattttcttgaaaggccaatatagcttggcagtttctctggaaagaatcagcatcaaacaatgttcttgaccagatgttttgatattgcttacgccgcacaatataatacggatcgatagtatgaccagcattctgaaagagcatccagcagggttcgagcctgagtgggtgcgtggccacagcctccttgacagtaaacctctctggactctcagctttgctatttcagtcacatgaactttcttatctttcagcttcagcagattgatctctaaacctggaaacttctgcaagaacatatacctcatgattggttgcgttgaccagccctcaacttctgattggatatctgcaggctttgttgcatgtatggagattggagaagcagggaagccgcgtttgcggcaggtcaggccgagccatgcgccggttgctgaggcaaccaatcatcgctaaattgcacatgatacaactgcagctttagctggtttacctgcatcatgtctgggttcatcagcgtccagttttaattaacttgtggtcttttgccatgtgcggtaatgaaaaacgaaagggcctaaagtagagtagattaacatttcggtgtcgcctcaatttgcagaaagaagcttcaggcagagagtctctcactgctcctcgtgtctactgattgtcatgttgctcgccagctcctatgctctcctccaaagtccaaacccgggcccaaaggtgttcaacaaagagaagtaacatttacgagctcacacaagtcacatgagatgagattcaagagaaagagatatatgttacgtggcattccttaagtttagggacttagagatgcattttcaatgttcgtggatataagtgacatctcttgacaagttcagtttcattcatgtattgaattgatattaaaattagatgacctaatctcatgccaccataggggcgggcccactatgtagacatgggtattcaagatgaatacccaagattttattaaataaataaataaatataatttaaaatacatgtagatataaaaaatataaaaaattgtctatttagcaatccgcaagagcccatctctcttgcagtggctcgctcttacgcccgctagcttcaggtttcatgcgcttgtgttctccttaatgtgttggtacttgagactcagaaagaaggctattgcatggaaaaatgtgttctccttaatggatggcttgaaatgaaagaaattcttagatattaatccaagaaaagatgataaacaataagagttgtcgatggcgtcaaatttgatatggaggtatagtttaagaaatatcttttatgtactctccataaagaagaattcattttaagtccagtcattatattaagagttgtaataagttacatgcatgtttgatttgaccaatgttggattaagcatgtgagttatagagtttcaaatttatttctgaattttatgatgaatatgagtcaatcttatcatttatgtcacatcaagagaattacgcgcatggcaggaaaaaaatgagatattacccacaaggcggaaaaaatctgagatgcatactcgcacggtggggtaaagttggcatagagcttgtcctctatagtagagaaagttatgatgactcatgtggttttagtgtatcccacactaggagaaaagtatgaaatagcttttatgctatcctagtattgattgtgcacttcgatattgtaccatagtcactaagcactcaatgagttcaaggaagat

SEQ ID NO: 46517 - DNA, 460 bp, Zea Mays
atttttccttccaaatttaaaactgataacagcatccatcaaacatgcttccaagagagtttatcacgattacatcatttgtcccaaaaagactcaactctatctagcctagtaccccaagggtgcaaaagctaagctagctgcgaggagtcctaccatcaccaacgtctaactctatcccggacatctagtgagcgaacaaggcaacactcgactcgggggaaggtggtctccccgagccagcagtgtccacgctggaggcaggctcctctcctccctcaatgtcgacgtcctcgttggcctccatgtcctggatctcctggtgatgcatatccaggtgcccattagcctcagcaagctgctgctgggtgttaatgagctgatcttcgagaacctcgatggtgttctccctggtgcccactagttcctccaactcttggatatcagtggatagctgctc

SEQ ID NO: 46518 - DNA, 868 bp, Zea Mays
ttggaagaccccgcttgtcagtaaatgttgctattctagcaaagggaagatgttttttcggaccttcggcttaaggccttcgtccatgtcgcaatctaaatttatcatcctaacaaattaatattgcgaggggctactgttgggggccttcggcttccgaaggtcctcaaaaacataatttaacaatgtttctggagtataatgaatgaacaggtatcttcagattcgaatcggtaccacagtgggagaagcccaaagaatacgaaggttgacacagcgccgaagctgtgagcaggaaagcttcggcgtgatagcagaaaaggaaaccgacttaaagatgaaaaggctattcagacctcggtggattactatagaattactaccaaatgtaaagggcatgggtgtaattttacatgggctgtgtcccgtgcctataaatagatgaacagtgctcctgtactattcgggctgacttggcatttgcttttgagtcacgcttgtacttttaccttcttttaagccgaaggtacatttgtaatttgatatctattcctattcttccataataataatataaaaatgagttgataataatatataattgtttacgtcatcctttatatttcatatgttttcttcttcattattatgtgttgtgtttatgaaggtacgtccttcataaccttcgtccgaaaatcattatatcctcaagggaaataatgctttgaaggacgaaggactttaacgtttaacattttttgtgttgccttgttcttaactcatagcatttgagaacaagtccccaacaggaccccgaagcgatggatgatgttggtgaagaatgccaccgcctgttcggacctgatgc

SEQ ID NO: 46519 - DNA, 252 bp, Zea Mays
ctttgaccaggtcgtcccagttggagatctgcgtaggaggcagatgctccagccaggctcgggcggcgtcggagaggaacagaggaaggttgcggatgatgaggttgtcatcatccgtcccacccagctggcaggccagccggtagtctgcgagccacagttccgactttgactcccccgagtacttggtgatggtagtcggggttcggaaccgggtcgggaacgacgcccgtcgcatggcctggctgaaag

SEQ ID NO: 46520 - DNA, 563 bp, Zea Mays
tgagattaggagtcttggggatacccctaattatggtccccgacaaaaaccttctcatcaaaatctagcaaggatgagtacacttatagtgggtactcagcaagtagggggaaacatgcatagctagcaagtatagattgggtgtttatgcaattagctttagttggtcaaacttttattaagaacatctattcactaagtgtaaatatttaccaaaccccattaatcataaggtaacatcatcttgaacccacttaagtgaaccacttgagtccaaaaagtgcacaatttattcttcatctttaagttcatttatcatgtgagggtccaaactgctcttaactatgagcacggctgatatatcagttttacactctacagaggtgttacaaatttacccacaagtcgtgtatcccttctatcctaggtttgcaagacccgtattcactaccgaggtgaatggctatggatccatcgcagggtcttcacaaaacatacttagtacaaagccacccgctaaggttcccacgtcagtattggtgaccctcagagtgaggtacctt

SEQ ID NO: 46521 - DNA, 220 bp, Zea Mays
aaattatcaaaacaaaaaccaacttgtttggatctaaacattggtagcaccgcaggggcatctttaattgaaattcctgaaattattaagaaagatgcttctacttcttgctttgatttaatttatgattctaacccctgcaaccaagttcttgttgagaatattgttgtagaaatatattcggatgaggttgcaaaggaaaatgagcaattaaggcaag

SEQ ID NO: 46522 - DNA, 220 bp, Zea Mays
ctcatctacaataaggggagtcgatgacactttgtctaaaaagcacaaagtacgccaactcgtcctcaatatctgaagatgcctcctgatgaggacaccactcccatacaaacaatgcatggaccgacaacatgagcatgtgcatgacaactaaatctctaggttcgttcttaccaagtcaattgtgttttagagctgacgcttggtgccatggatgttt

SEQ ID NO: 46523 - DNA, 405 bp, Zea Mays
tagaaatttcctaaagattatttagtaagaactttaattattataatattattattagatttattatacttttggaatatttaaaacatatttattaacgaataagctatttaaaaaaataaaaaaatgaattttgaaattaagcaaaagaaaacaactcaactcaacacattcgcgtacacatctattaaaaaagaaaaaaaatataaaactaaatgcttggacgtccgcgggggccaacagcctctagcccatctgcccatgcgtgacgctgacacacctcttcctctcttttccaatgtatgacatacgggccccactctagcactgttcttctttttgattcctctcgcacgaacggtcgcgcttcgccgtctctctccctgctgcaagcgcgagcagccg

SEQ ID NO: 46524 - DNA, 313 bp, Zea Mays
gtggttttgaatattaaatatcatttcttcttaaaagaaaagttcacatgaataatataataaatattagcccaagaataaatattatgtttataaataatttttggattaattattatgatttttaaggttatttaaaaatgaatttcgaatttagaaaaaaaaagaaaaaaaaaacacaaaacctaatcgtacccgttttggcccattaggcccatcatcccagccgctccctgacctaaaacctagcgcgcgcacccctgtagccgtcgccgcccctgctcctctccctccgccgccacctttctctctc

SEQ ID NO: 46525 - DNA, 291 bp, Zea Mays
aaaaataaaagtataaaaaacaatacattgatgtacaaactagaatttaaaacctaatttggaatcaaagctttagagtaagaaaagaaaaatactatataaaaccgagaaataaatatataattatataaacctcaccatactgggttgctcaagttatgcatttaaagggagcgaaattccacaactaaatttgaattcaaattcgaaatctaaaatttgaaaagaaaaggaaggaaaataaaaagaaaaaataaaaataaaaaataagaagaataggcgccgtacggg

SEQ ID NO: 46526 - DNA, 90 bp, Zea Mays
cattatttgatggcattgaagaaggtgggggtgagaccttcagcttattcttatcgtgaaattcatgagcatgagaattatcaagctctg

SEQ ID NO: 46527 - DNA, 107 bp, Zea Mays
cccttcttccctccaccaaaatgattgaagactcgcaccacgtgacgatgatccgagcggcaaggattggcaccttgggaggaggagattgggggggctagggtttg

SEQ ID NO: 46528 - DNA, 267 bp, Zea Mays
gagatctctgcctctccgagcaattcactagtgacccaacgactctccgcggaagaaaatgcttcacacacgttctcccggtcacagcggtcctccctgaccacaccctgggttcctaacgacgtcacaaaatggtcgtcgacggtggctcgagctcagctctgatgcgctaacttaccctcccacaatttctctctgtttcacggtgtttctgttaccagcttacggcgaggcgagggagatgtggtggctggtcatataggggtg

SEQ ID NO: 46529 - DNA, 348 bp, Zea Mays
gttgcaagcatcattagcttcatagaagctcaattcagcatgcacagtgcagaaccacgtggtcacatgttttcaggtgctttttttaaaggaaggggcaaaagacttgccgctccgatatatattagattagagaagatagaaagggagaatacaaaacctaagcaactggagggaagaagaaaagaaagaaaaaataaaaagagttaaaaagaatttaaaaagaaaacaaaaaaccactagtccagaccaacaagacctcagctactagcaatatccttgactgcaagagccacttgatctacgcttctatgctgactttggaaaattccattatttctttccagc

SEQ ID NO: 46530 - DNA, 375 bp, Zea Mays
caacgacctcaactgaaccaccgacatagccgacttggccgagacctgttgggacccactgtggccatcctgggtcggactcccctgctccctatataggccgcccgaatcgctgtcaggtccttcaaccatcttggtcaatcttgccatcgccgagcgcgctgagggagaagggggccgtcacagtcggaattgaatttggctgcagcgtaggccttcgatcgggacgggtagcttcaccaagcttcacagatcacgaatgttgcttttcctgggggattacgctccgggccatcgggaattgatcgctggagcaaacaatcggccgcagatccgctgctcgccgtgaaccatccccatcgcgacgccatcacc

SEQ ID NO: 46531 - DNA, 461 bp, Zea Mays
ctcagccttgcttgttgcataatttttgtaggtacctccttgattttggttgatggtgtgacttggcctccatccctgccaccgggatagatggtcgagagggattattgcttccgcaagagaggaccaggaggaatagtgtggccaggcttcgccatgttactcggttttctccgttagttatttccgctgcattaaaacttatgattattatttctgaaactccgataatgtaatcactaatgatactttcttaatttatggtattatgctttattgtatttctctgtgcctcaccttcgagtgagctagtggtattcgatcctggataagtggccttgtcagactagatccgagggactgacgggttattccggtttaagtgtgttgctgcccttgcggatgtgacttgggcacttaagctggaataattcgagcggttccgccacacgcaatccctc

SEQ ID NO: 46532 - DNA, 338 bp, Zea Mays
gtcagtttgggccgcgcgcagggaaatcccctggtgggccgaatagccaccagtgagcccagataagcttctttctctttttttttctgatttctttttctctttttttttcaatttctagaattcaaatttacattcaaatcttgtgacaaactttatcttcaagttatattgtgaccttaaggtactaattttgtaaatacacataaactttctttatattttatatatatatattttttttcgaactctcaaattaggtattaaatccttgcttttgccaccaatttatttctattagtggcataactctttcattagatgcacaaacaataaac

SEQ ID NO: 46533 - DNA, 1381 bp, Zea Mays
ctcacgtatatagcgattacataaatgactcatcatagcacaatgcttcgaatattaataaagactaagtaataatactacagactatagtcatttacatgatataaatcaaagtgcacataatagaaacgtaaccaacgtaaataaacccgccacatacagctgactgggggaggtcgtcaaactcattgaagtcctggaactcctagaagtccgccttatcaccttcttcttcttctttacctgagcatacattgcaccaaaggcaacatggtgttttgtgaaagcaagggtgagtacacatcaacgtactctgcaaatgtcccgtttggctgaggtggactagcttttatgtgtgtttaggattaaagcagatgcttttagtttgttaggtatttattattagtacaagccaagttttagcaataaccaacccgtgaatcatttcctcaccaaggaacatcattatcatcatcgaacaaaaaaccattaatagaaccattgtatctcagatcatctgcatctctaatcaaaggagctcccaaggccactcataaccgtcagcactactgatatatcagtttcgatcctttgcagaggtcgcgcactttacccatgagccgtgattcccattctgtccaaggagcacttatcctcattgaccactacctaggtgatatggtagggtatcactacgtagcctttacaaagattccccgtgtgtgtagtcgtccgttagtttttgccagtcgtacatacacagtactcctccctaaggtgggtaactaacaaaactgaaacgaatgaacctcggcaccaacccttagcaaagcaagcactataccccggcccccattgatagcacaacggtgaagccaactacacccctaagttcctccaattaatcagctaagggcgtcccattctaccctcatggttgtactgttttcccagatggtcatccagcgaacaagtccttacagagaggtacttgggaaacagcctgagtcccctaaaatcacacaagttcatcatcataatcaagatatcatcatgtatcatagatattcttatcatgttcattgattaaagtagagcgctagcataaagctaaccacaataacccaaaaattaatcaaggatgaggtaaatagaaagctagtcaatccttatgttttaattgtataatgcggggaaatgaatgtgaataggatataagtaggtcagaggacacttgccttcaccaaacagaagcttagggtcttcaacattatggaactcgaggagcttgttcgcttggtcgtgaaacttgactgtcgattccttaaagcttaggaatagatcgcaatctattcgcgacgcgcaacgaatacaaactggc

SEQ ID NO: 46534 - DNA, 440 bp, Zea Mays
caaatctcacacatatgatgaatcatggcacaggatcgaatgtcacatctttactacataataggagttctatacaaaataaataaaataataattacatcataatgatacgatgatccagcaacacaaagttgactgggagactacgacctagacctctcatgcacacattgcaacatccaccatgcgcctcatcttgtggtacctatccttgacctgtgggggtgtgagacagcaagagtgagctcacatacattcattgttcaacacgttgtggggaataatgtgcatgaaatcgccaaaggtgggagctcatgtgaagtgtaaggcttaccaaagagaatggttaaagctgagcattgcttttaaagttggtcaaaattttattagcaattactagatgtaagtaaataccaaccataataataatagaacaaaat

SEQ ID NO: 46535 - DNA, 525 bp, Zea Mays
tcaacttcaacagacataaatcttaataagatacaaaaatacgaaatacaatgggcacagattaaaatagatcatgacatacacacgaagtcaattgttaaacctacacatgaaatatacattacatatatccaaaatatttctgcagcgattagctaacaaattatttatagtcatcagggggtagcatgaatgattttagggacctaattcagttcttttgaaccgagaaacaatctagcgcaatatagacaaaaaccaggggctgacggcgagcggggttccagtcggcggtggacgagacgagcaggggaggtggacattggtgctctgatcgacggtgaggacgatggacagaggcgttccggtggcgacggacgtcgaagacggcgagccaaggtcggccagtggcggcgtacgacggtaaggagggatgagaggcgtgggcaagctcggtggcaggggaagggtccatgggcgcggcatcgatctttcatagagggagaagagggagagcgacgggag

SEQ ID NO: 46536 - DNA, 121 bp, Zea Mays
ggaacacaaaacaatcctaaggatggaagtacttaaatcgagacttgggctaggaacaggtgatgctccaccgaggttaattaaggattggatgcgtatgtaggcctgtatgatcaaggac

SEQ ID NO: 46537 - DNA, 814 bp, Zea Mays
ggtgggagtagcgtgtaccctcctggctagaggctggacggaggagtattgtgctcccgggtagcgcggaccggttcacgttgtggaggatctgtgggaacggttgacatatgcaagggttaagtgctacatatgtcgtgtggttagagatcctcaactgagtaaatcgattcggatcgccattatatccccaaagagtggagacttgatctccgacctacaacctaagtcaagatgtaaacattatgagtaaaaatgatgttgtattgatgagatggtgaaattagactaggtgcaaccagagtctattaatatttaatctggcgttaaaatattgacagtaaggactcactttagtaagctatttctgcaaaagtatctaagttgattcttgctaagagcctctccttgattcctaaatccagcatatccttgagagtctttttccttagtcgggtaagacttgcaaaagtacacttcgtactcagggctttgtcccatgttgttttaggtgaagagccttcggagctttgctacttttgtgcaaaggtggttcccaagtaggaggaagaaccaaaaatagaagtgtgatgttgtggatggtgctaagtgcccgtgggctcggccttcttataagtctaagtacctcttctatacttcttattgaggatggtcacttgagctagcatatatttcaaaactataaataatttataacagttcaaagttatttctttgaatcaccttgtaatcactccgatcaggtacaatgtaaacttgatgtaacttgtaaaatttggtaataagatttccg

SEQ ID NO: 46538 - DNA, 346 bp, Zea Mays
cttcgatgaaggcaagtgaatgtagcggtggttgcttccgttctgacctgttatttctattgcctacactctaatattcagaagtattggattctttcataattggactctatggtgatgctttaattgcttgcattatactgatgctcaatcatatattgatgatgattatgattcgagtatgactcatgagattaattcacacccctgaaggtaaatgaagtattatttgaggttggtattgtatctgaaggtaaatgaagtattatttgaggttagtattgtatctgaaggtaaatgaagtattatttgaggttgtattgtatgtgaagaaagtgaagtatat

SEQ ID NO: 46539 - DNA, 989 bp, Zea Mays
gcccatttcaaggaacgaggggtaacggtattagggttttcccttgttagccgccatctatccttctctcctttttttattcttctttccttgtcagccgcacgttccctctccccttttttctctccttcatttccgctcggtggatggacgactgaggctgtggcggtggcgctagccagcctcgcatgcgttgttccgggccggtgatggcagtgcccgcacgcgcctgcttccagacgacgacggcagccaccccgcgcgcctgcttttggggccgcggcatggccagagcgcgtgctcgcctacccatggcggatgaacgcagcccgatccgcagcgtggcagatcccgtgctcgcctgcttgcgcgccggggtcggcacgtgcttgtccgcatctgctggaccagcgatcacatgcctgctcacggcggtggcggggacggcctgcgcgcctgctcgcatgctgggcggcaggggcgctcgcccgcgcgctcgcggccatggcggtgctcgcacgtgtgcttgtctgcgacagcacacgcctgcgcgcttggttgtggcgacgcccgcttgcgtttcgtgctcgttgtctgctcaaagcgcggcagcatagcccggtgctggcagcagcagggaccgacttcagtgtctgcgaagcgtaagcatgccttctcgtggcagtgggacgccggtgctcaagtagaaaatttgtgtgtttggcatctcagacagcttcaagctgcgataaatctgcagagatgtttttcttttattttctatgtgtacgtatgtttatactcgaaggtcgaaagaagctgaaaatatagaaattacttagtgcgagtgaactcaccttcttattgttttgtgaacttctagattgcaagagcaatcgtgctgataacgtgttaagaaccctttgctatgaatgtagtccaaatgcttctttacacataaatataggagacataaagatatatgggga

SEQ ID NO: 46540 - DNA, 674 bp, Zea Mays
gcattttataactctaaaatgaataatcgtctttatcaaagtaagggggttttccaagtggaatagacaacaaatgtgcatttgaattgtagggaatacaagagtaatcaaaagactagttttgattaactgttttctttttctacaaggagtcttcatcgtcgtcgtcccttggtgaagaagaggaggtgtcgctgtcgtagtagatgatcttcttgatgtgcctcttcttctttccatccttcctcttgttgtttgagcctgagtcagtgggcttgtcaccttttggctcatcagcatagagagtctccttctcgttgttgttgatcacaatccccttgctcttaggatccatctcttctggcggttagtcccttgatgaagagaacgactctgataccaattgagagcacctagagggggagaataggtgatcctgcaaaaatcaactctaaacaagacaaacttggtttataataaatgttagtggaatcaaaaccaagttgatatgaatagaggtagagagaagaagagaactcttcacttgattgaccctttaagatatgtattaaacttaggaacaataacgcaagtgattatgtgagaactctatggaagaaaataatcacaataaagagatgcacaagtgacacggtgattttatcccgtggttc

SEQ ID NO: 46541 - DNA, 215 bp, Zea Mays
caccttgggttcttcccttcctccttccttcttcctccctccaaactccaattgagatcgcagccacacgacggagaaccacgcgggagggctgcaccttggagagggggaagagaaatggggggcggctagggttttgggtggtgagggctgcaaaggtttgaggaggaagatgggagaggggggaaggggtggcgtccaagagaaaggggagg

SEQ ID NO: 46542 - DNA, 131 bp, Zea Mays
cgctagactgtctctgctctctccatgtcgcgcttcttctcccagcccagccagccgcttctccctgagctcggctcctgccttccctgctgcgcgcgctcctctccctctaccctctcactgccgcgcgc

SEQ ID NO: 46543 - DNA, 535 bp, Zea Mays
gtcgatcgtcgctggtttgagagaaatcaccggaaggtatggagaagaaagtgaagtcacacgacacctgtcagatgttcaacgacaagctcgagctaggatttatcagcattcgtacgagtattgagtcgcgtttgatgctggtgagccgatttataatttttgtaagtgtaatacccaacttgcaatttgtggaagatagcctaagaggagaaatgatattcctttgtatatatgtgtgttgtccatatttatcatctcatgagaacaacacaggagaacaaataaataaataataaaaagatataccattaaatcatgcatcatgctgggattatttttcttgtatgcacattgtgacaaataaagtaataaatgtgacaagaaatatattaaaatctaaagtggaatttaaaattcaaaaggaattgtagaatttagaaaagagaagaaaataagaattttgtggataaaaataagtaaaaaaaatacatatatattattactccactagaagcttgaattggtatacttg

SEQ ID NO: 46544 - DNA, 491 bp, Zea Mays
agtgtccgagctgctcatgaccgtgagcacggctgatataccagttttacactctatagaggttgcgcatcttgtggcagaaccacccgaattattctagcttaagtgcctaagtcacgcctcagggggccgtaacacacttaaatcggaataacccgtcagtccttcagatctagtctgatagagccacttaaccaggatcaaattccacaatctcactcgaaggtgagtcacagaagaaatgcaataaaacaggaaacctcaaattaagtgtggagttattacataaatcggagtttttgcatagcaaataaagttcacaaaataaagtgcagcggataattgatgtcgtcggtatcgaggaatcgggcaaggcctagcccactactccttgtgctcctctcctgccggagcaacatcccactcgaccgtccaacccggtggcagggtggtaggccaagtcacaccatcaaccatttcctgaatggtac

SEQ ID NO: 46545 - DNA, 373 bp, Zea Mays
aaacaacagggtgcttatttttcttagttattgttttgtgcaagagcaatcattttgaagtttggcctctttttgcttaagggaaggggtggtatgtattatttgaattaagtggcctttctcttaaatcattagcaattggtatgagtttgcttccttttcatgggttggcatttttctctggtagttatcccatcatggacttagcaaatttttggttgcccattatcacattaataggggttgttcatgatttatttggaaaatgccttattatcactttgtatttattttccttacttaaaaagttgggctggggtgctctgtatttttgtagtggggctctggtggttgtaagtccactagattttta

SEQ ID NO: 46546 - DNA, 378 bp, Zea Mays
cccacgcacaacctcgaatactgaacggtcctacatgaagtatagcatatggcaattctagtggcgtgttgtttacctgatggggtggtggcagattggctagccatggcgtacgacggccacaaggtaccgtatgacgacgatgaggaattccccctcacccggttacctccacgcccggtgaggcttatcacaagactccacgagtcacgacgaactactgcagccacacttcaagggtcgggcggcaatagaaggcaaccttgaccgtggcggcttggatcccccgcaataatggcggcgaggccccgggttcacggtgagggttccgataggggaagggaggtcgcaggtgtgcgttttttaacccggaggcgc

SEQ ID NO: 46547 - DNA, 278 bp, Zea Mays
atacatgctaggaatgaggggagtagcagcacgtccactttcactctcacaataacgctgcccaggcacagccatgatttaattagaaacttattgtcaaaggaagtttgttttttaactagtcgtgcgcactagttaatttagatcatttcgtatgttaaacttctctttgctagccgattaataatacttagtatgtttttgtcatgatatatgtttatacactgttgccccctcatttatgcaattttgcaaaggcgatgctgccgaaattttat

SEQ ID NO: 46548 - DNA, 180 bp, Zea Mays
tgatggcgcgcgacggcggtggcacgagtgagaagaggggcggcaggggcgtggggagggggaggctggttgtggcttggtcgcgggctcgcggcgaggcagagggatgagtgatgatctaaataatattgttcagtggattttagtgagtagcgggagcgcgttatccagcgatctgaa

SEQ ID NO: 46549 - DNA, 590 bp, Zea Mays
catccagcatagtcggaatctgaatatccaattaagtcaaaggtagacccctttggataccagatcccgaagcaaggcgtagcaactaaatatctaaggattcgcttcactgccactaagtgacactccttaggatcggattgaaatctagcacacatgcatacgctaagcataatatccggtctactagcacataagtaaagtagtgaccctatcattgaccggtatgctttttgatcaacggacttacctcctttgttgaggtcggtgtgtccgtcggttcccatcggagtctttgtgggcttggcatccttcatcccaaaccgcttcagcaagtcttgcgtgtacttcgtttgagagatgaaggtgccgtccttgagttgcttcacttggaacccaaggaagtagttcaactcgcccatcattgacatctcgaatttctgcgtcatcaccctgctaaactcatcacaagactttttattagtagaaccaaatattatgtcatcgacatagatttggcacacaaacaaatcaccatcacatgtcttagtgaaaagagttggatcggctttcccaaccttgaaagcatt

SEQ ID NO: 46550 - DNA, 939 bp, Zea Mays
cacgtggtcggggtaccgttcatcctcgaagccagggggttgctctacgtacacctcctcctttattggcccgttgaggaaagcgctctttacatccatttggaacaacctgaaagaatggtgagcggcatatgctagcaagatacgaatggactctagcctagccacaggagcaaaggtctcctcaaagtccaaacctgcgacttgggcataaccttttgccacaagtcgagccttgttccttgtcaccactccgtgctcgtcttgtttgttgtggaacacccacttggttcccacaacattttgcttgggacgaggcaccagtgtccaaacttcattgcgcttgaagttgtttagctcctcttgcatggccaacacccagtccgaatctagcaaggcctcttctaccctgaaaggctcaatagaagagacaaaggagtaatgctcacaaaaattaactaatcgagatcgagtagttactcccttgctaatatcacccaaaatttggtcgacgggatgatccctttgaatcattgctcgaacttgggttggaggtgccggttgcgcttcttcctccatcacatgatcatcttgtgctcccccttgatcacacgcctcctgttgatgaacctgttcatcgtcttgagttgggggatgtaccatagttgaggaagaaggttgatctcgttcatcttgttccagtggccgcacttctccaatcgccatggttcgtatagcggccgtcggaacatcttcttcatctacatcatcacaatcaacaacttgctctcttggagagccattagtctcatcaaatacaatgtcgctagagacttcaaccaaacctgatgatttgttgaagactctatacgtctttgtatttgagtcataacctaacaaaaacccttctacagctttgggagcaaacttagaatttct

SEQ ID NO: 46551 - DNA, 443 bp, Zea Mays
cttacttcctcctatgctcagataggcgacgggtccgaagaggtccatatgcagcagctccagaggtcttgaagtggtcatcacattcttgctgtgatgcgttcctcccgcttgtttacctgcttgacaagctgcacaaggtctatctttttcgaatttcacgttagtcaaacctatcacgtgttctccctttagaagcttgtgaaggttcttcatccctacatgtgctaagcggcgatgccacagccagcccatgctagtcttagcaattaagcatgcatctagaccggcctcttcttttgcaaaatcaactaaataaagtttgtcgtctaatacacccttgaaagctagtgaaccatcacttcttctaaagacagacacatctacatttgtaaatagacagttatatcccatattgcataattgactaaccgatagcaaat

SEQ ID NO: 46552 - DNA, 312 bp, Zea Mays
gcgccacccgagagcacaccaccccttttaggtggtcctttgccaggagggtacgtgccactctcgccatctctccactcccagtgcgcgattgtcttttcatgtatggaatagccgggttcaagcttaccctgtcccatatctagggcatgtggccagttaagatagtccttgatcatacaggcctacatacgcatccaatccttaattaacctaggtggagcatcacctgttcctagcccaagtctcgagttaagtacttccacccttaggattgttttctgttcctaaggatgaaaagagcattatagg

SEQ ID NO: 46553 - DNA, 120 bp, Zea Mays
ctgatgtggtgccaaccacaagatgcagttggtgggcgacctgaagaatggacttaaccagtggatgctcgtcaagcgagtgccaccccagcaaacacaatctaagtgttaaattaaagg

SEQ ID NO: 46554 - DNA, 610 bp, Zea Mays
gttagatcttatcccagcacccttttgagcctcgcactttctttcaataatctgcattgttgaatttgtgtgctttcgcgtcatttgttgctggttcattgtgttcttccatcattcaaaccatagcgccgccaccatctcccgtttgatcacgccacaaaccaagtcaacattgtttccttgtttttctccttcggttacgtcaaaaaaaaacagaaaaaaacaaaccgagtcaacggccgtttccttgattttctccttcggttacgaaaaaaaaaacagaaaaaaaaaacaaaccgagtcaacatcgtgtccttgtttttctccttcggttacgtcaaaaaaaaacagaaacaaaaaaaaacatcgaaggagaaaggatacgattgtttcatcccggtcgtttgaaaacataacttgagataccttccttaaaccgggcataacttttcgctcgggtgtccaaaaaatctgaaatttttacaggagctagttgacaccattctgagcccggccaaactcaccttcggtctgtttggtttcgacaaaattgtcaaaaaaattcaggaaaataaagaaaaaaatccgtcaaagttctcgcacgcttttc

SEQ ID NO: 46555 - DNA, 422 bp, Zea Mays
ttacataattggacatcatcacacaatgctcgaattaaataacggaaaggtactttaattacatcaagatgtcagagacatccacagagtctagtacatatccataatgttcaacataaatatcaaagtgtggaaatgcgaaacgtagaagctaagcctacacaggcagctgactgggggtttgccactaaaaaagaactagaactcatcattgtcctgaaactcctcgaagtcatccatgttgccagcatcacctcctgagcactgagtgtagtggggacaacctggggtggggtggtgtgtaaagcaagggtgagtacacatccctgtttggctacagtggactagttgtatatggagttgaggttaagcagttacttttagttggtccagttcttattatcattagtagagccaagttt

SEQ ID NO: 46556 - DNA, 191 bp, Zea Mays
gtccgtagcccggttggttcgttcgctaggtatgcgagcggccgtatatgggttcgatccccagcatcgagactacatgcctcattttggggtttttctcggtagggtttacacatgcgtgatctgtgtagtggtgtgagttcgtagtatccttgtacctttaaaaaacctataaaaaactaagaaacatt

SEQ ID NO: 46557 - DNA, 139 bp, Zea Mays
cttctatacattgcactcttactatctggtctttaaaataaactcttcataaatacttaggtaagaagggaagaaattttctagataagtctttagaaaattctttttgaagatgcctcataatatctgcagagatggg

SEQ ID NO: 46558 - DNA, 185 bp, Zea Mays
ccaatacttaagaagacgttgttgcttgcaacaagacgatagggtagaattaatcaatgatcaagagattaggcacattaagtcgcagctaattcatagagaaaatttttgctaggtctaggtgaaaagagatgttctccacctagatggatttctagaatgaagagaggggagatcaacaagag

SEQ ID NO: 46559 - DNA, 1129 bp, Zea Mays
ggacttaagcctccccctaactccataattcactgacttcctatttttggaccaaataaccaaaaccacttgaaaagccatttgtagatataaaattttaaattggtgtttggtgtttgatatagttttcattgctttggtccctaaacttctccccctttggcatcaaccaccgaaaaggaagacattaaaagcatgtaggaagtaaataaaagcttgccctcatcaagaattgtatcaaatgatatcactagaaggatattaaattgaactatgtgaatgataccacttgaaggagtcctcaaaagattactccccctaaatgagttgtctcctttagaaagagtttttctccccctttagagacgaagaaatactccccttgacagagatcctctacttaggaaaaagcatgtgaaaattagaggtgcaagacatgatttgaaaagactaacttcccttatacataggtaacagaatatgagttaaccacttatgcatttttagcaacatggaagtatatgatatgaaatatagtctaatcaaatattggagaagacatgtaaatgatactgaatgtagtctcaaaagataccaattgaaagtcaatggtgagcttgagagacatgagagttcttggagattttgcaatggaagattgttgtctttctccggggacttcattttccttacaatgagactatcacaagaaatagacttgaaaaggtgttagtctcaaagtgttagattatagagtaacctccccataaagatgtgcatacaagttttgaatacttgtaggagacatgcactttgatttgatatcaagaggggtaaattatctataatccaaactttggcacatataggttaaatgatacaatttgtagatatcaaaattttcaattgatgcatcatttactatggagtgatatagaagctatgtgccgtgcttaaataaacattttaagccatgtaggtttgcttaagtatatgaattaagaacaagcactcctaccatatgatttacctagtatgcatgattttaaacaaaagtacataacaaatgcaatactaggcaaggaaggtaaactagataaaagataaatagatacgcatatctaaaaat

SEQ ID NO: 46560 - DNA, 272 bp, Zea Mays
agatgtcagtgggtgtccagtgcgcacgcgtggaggattaggagttgggccgcgtgggtgaaaacgtgaattgggctggaaaggaggtagtcggcccatgtggctttctttttctgtttttttcttttttctttttctgattccctctttctctattttcaaatccaatttgaattcaagtttaaattcaaactttatggctcatcatttacactatatttgtgcagttaaaagtaataagtttaaggatatttatattatttatatttttg

SEQ ID NO: 46561 - DNA, 401 bp, Zea Mays
taggagtatctacacaaaatactctacaacttcagtattaaatagataattaaattctgccatctacaagttctaaaacatctgacaagataactgactgaatctgttttagacagcagtatggttaactttaaaattcgatatctccaaaactgctgaactaaaaattatgaaattctgctgaaagtaagaacttttatccctctacaaaagtctccatagttggaagagccaattcggccatttactagatgaaacccaccagtgaacagacccactcatttttgtcaggtaaacaggaacagccacagtaaaacaaacataactggagtttcacaaatcatatgaatgcactctttaacaatctggaaagcttataaaattatctacaacttctttta

SEQ ID NO: 46562 - DNA, 182 bp, Zea Mays
ctttacttggccgcccgtcccccttcccctttgcagccaccctccactgcttcctcctccctctagatctcccccacgcagcaaggatcgagaagaggaggagcaagatggtttgaagaggaagagaggatcaaggagatgttctacccccatctattgcagatttccttggggaaacccta

SEQ ID NO: 46563 - DNA, 499 bp, Zea Mays
agcatctcgtttgcaaaattgcataaatgagggggcaacagtgtataaacatatatcatgacaaaaaacatactaagtattattaatcggctagcaaagggaagttaaacatacaacatgaactgaattaaccagtgcgcacgactagttaaaaaaacaaacatcctttgacaacaagtttctaattaaatcatggctgcgcctgggtagcgttattatgagagtgaaagtggacgtgctgctactcccctcattcccaacatgtatcaagtacctgcattgagtaatgcaatagtgagatgacacatctcagcaagtaaaataataacaaactgtttaaccacataagaacattgttttaccaccagttaatttcacaaccttcttattacgaaggtgcagcacgaatacaacgtacagcacgcctagttaccacacctcgcaggtagaaaccacaatagtaacatagtaatgtcacacttcatatatacctcatgag

SEQ ID NO: 46564 - DNA, 765 bp, Zea Mays
aaaatccccagaaactgctaatactactgctgttcgcccacctgcaaatctgttttttttgacagcaacatacccggattcaaatagcgatatctcctaaaatataactccgaattgagcgcataagtactcgttgaaaaggtatgacaaagctctacatcattatcatactgattatcactaattacccacgaaaaatccccagaaactgctaatactactattgttcgcccacctgcaaatctgttttttttgacagcatcatacccggattcaaacaacgatatcttctaaaatataactccgaatcaagcgcataagtactcgttggaaaggtatgacaaagctttacatgattctcccactgattcccactaattacccacgaaaaattcccagaaactgctagaagtactgatgttcgcccagccacaaaatttctggacagcacctctaccaattcacatatgtaaacatctaatcgattgaattgtagaacaaataaacaagagttaatcacaaaatcaccttgaattctccccctttcctccctccttcttccttccaccaaattccaattggagatttgcacccacgcgacgtagatcaagcgggagggctgcacctaggagaagaggagatgggggcggctagggtttgtgggatggtggctgcaagagtttgagggaggaggagatgagagaggggggcggctgcacaaaggctagagagagggaggcggctgcacaagggggaggggataag

SEQ ID NO: 46565 - DNA, 1058 bp, Zea Mays
caagcccacacactaatctttgctcaaacgagcgggtaatacaaactttcttgtggtcttccacaagatttggagactcacaaaagacaccaagtcgtctaggagctagaaactccaagagtaatgaatccacaaagaactcgatgtagcaccaaagctcgaatcaagaagagcaagagggatttagagatgaagcaccaaaatcgcagctcttcaatctcactcaaagatttctctccaaagatttgaaatgggagaggcaagaggtgtgtgagagagagtgggaggtgtttctcaggttagaaatggagtccaagtcgtgctcttctatagaggagagaggtgggggtgagtatatataggtggggctccaaaactagccgtttttgacttttctgcccaaaaaccggtttttcaaaaagttgcgcacagttttttggctgacacagcagactggcagaaaaaagtgaacagtgcaaaaaccggttgaacctgttttaaaaccggttgaacctgtttccactagacaaaaaccggttgagtgtccggttgagtgtccggctaaaccagtattttccaaaaaggtgaatagtgcaaaaaccggttgaacctgttttaaaaccggttgaacctgtttttccaaaaagcaattttggccaagatagacttaaaaatgttgtactacatactttcactacggataacaagggtaaaatggaagttttagatcaaggattttgagctttagtaccaacaccaaccttctttatggatcccccttgatagtacgacaattcctatactcaagtcaaataaaatataattaagtaaactccttgagtcattggtgtctcaagtgtgatttctccatggtgttgcttcataaggatcacaaacatctttgtctcaccttttgaagcaaacacaaatcgagcttgtgacttatgccatttcaccatatatgagttcaattcatggcttcaagtcaccttactgatgcatcaacatgttgtaactctttatagctgattagttcatcgacttagtgcaagtactct

SEQ ID NO: 46566 - DNA, 2477 bp, Zea Mays
ataagattttgaatcctatgatatagtttcctccccctaaatatgtgcatttcagaaaataccaattttgtactcaaatgccaaaatgccaaaaccacatatttgggtcaaagagtgaagacaacttatttcatactattcatagggtgctttgtgtcataaataaacgtgatgctcatgacatattatgcactcatcaatttccttcatcttatgttttatgattcaacccccttttgtcaattatttctcccccttttcaaaagtcttcttacacttagttacataagacaaaatgtaagctttaatgcacaatttctccccctttgtcataaatctccaaaaaaagatataaagaatataaaggatagaaattatgattaagcaagatgtgaacacactatcatgaaaatgatccttagatggcacaaaggtaatggataagtgtcataagtgatgtacctttgcattttaccttttcaaggggtttccagacttgtgttggatttagaattcatttgcaagctcttgttggcataattgtgacataagtcccaagatatcaaatgaagatcgtcatactaaatcgaaggtgaatcttgatacccatcaaaatttgctagtggaagcgattgtctttgcttgaagattcctttctaatttgagactacacacatagtagacttgaaaatgaagttagtctcaaagattcaaattatagaccattctccccctaaatgtatgcatacaagtgatgaatacttgtttagcttatgcacttggacttgtgaggtcaggggattgagttttacaatttgaaccttggtacaaataatgtatgaaaatgtgaaatagtaccaattgaaggaattactcataatcaaaggtatactaatagacataatatgcaatattttaagccaagattcttgagaagttagcatatttgactcatacctcactaagatgacttaatactaacttatgacatcaccacaagaggtattaatcaaatatctagagattctttaatcatcaccacaagtgcaaccttatgatgtgacttaagatattgcatatacatgcacacactagcatgtaagagcctaaatacagaaatgtaaaacaatagttcatggagtgacacacctttgttctacgccacatgatctccattataatcatgaatttccatcttagcttttgataggcttggcatttcaaagagaaacttatcctcttcacacgatcaagagaaactcatttttatttctatggaaccattcatcctcatttgatgttatccaaggtgtgagactacacaacatgaacttgaaataaatcattagtctcacaagatataggttaaactctccctcaatttgtgcatgcaagagtacacaaagtacacttatgcacatcaacaatacgaggttaaaggagatgtttgcactatatcttggtttaacataacatgctttacatagatgatgaaaattaagccaattgaagtttaagaactgaaagtatatcaattgaaatcctaaagggcaaagcatgctaatatgagcctcaaacctcataatgaaggatatcacataaatatgtcactacgtcttcattatttggttgacaaaaaaaatataactcccttcttgaatcactgtgctttcttttccctttacgatttcatccaaccaagtgatcatgaactttttcatcttttcttgattcgatcatacttgatatgagatcaattgaaactcaatgattgaaacaactaagactcttatatccgtagattttcaatccatcttgaaagcacttggaaggaccttattgaaacacttagaaaagagagcattagaaacacaagggagggtttcacaaatgataatccttatatgtggatggaaaatgaatcatcattcttgaaacccaaaaggatagattaaattcctttaaattagtgcacacatatagttgatgtcaaagttatatgcactattgaacattttgtattgcgaggaatttaacctatactatggtacattccactaaggatagaatactaaagcaactgaatgagagtaagttttcataccttggcctcttatcaacttcatcttactttagttgaatagtatcctttaatcttgtgatttatccaatttaaaacaagcaccatctcttaacatagattttctatggataaactcaacacaagagatggcattagtagcacaagcactagtttcttatttagcaaccctttatatgtggaaggcaagcgtgttgctaaaatagagaaacctcataatatggactaaatttcccttgagccctttatgcacaatatattttgaatgacatggataatatgcatgattgttcaatgaggtctaaagggctgacttaatccatattatggtgagtgtctaatatagaagaatcaaatccaaattaactagatagag

SEQ ID NO: 46567 - DNA, 1547 bp, Zea Mays
caagcacccaacttgatccatagaaaggagtgatcctgcaaaacaagtttaagcttcatatcttggtacccaatttgaattgggtccttagagattagtagtaagagccttgagtacccacacaatccttattgtggcctttctctttgtgtaggcacccacatatacttgacaaccatcttacatggtttcaagtcaatatttaatcacacagataaaagcaagagttaagaataggagccttttctccttttattgatacatcgttgtgttgccttctcgatgatgaacctagcttgaccttgggtgcacctagcttatcaaggttagtcgcacaagcattcataacatgaagacaagttatgcatggaatttacaacttagtgatccaattcaatgtgaagcatatggataccgatttaagtagatttctaagatatgaaaatatgggtttccaaattttagagagtatggatcactaattgtaccttttacaatttaaaaatcatatccatgttagtgcatatgtatgttatgaatatcaacaaaaagattcttatgcacttttagatttaacgataagggaattttaaactgcatcaagagtagctatttagaaaacaaagattacaatccatatgaatgagatacaaatttaccattttggattgtcttagtatagcttactcaagggaaacttattctctacgacacaagatatatataatgtgctcccactagatatgtgcatcaagtatttgaatgacttatcaaatgcactttcatttcaatgaagattctcaagaggagtacattacatatattggtcaaggcatgaaaaatttgcaatgaattaacttatgcctaagaatacttaccaccatatagaatgtaccatttgttatatcaattgaaagatcttactatatgagatggtgtcatctaagtattcttcttttcttcaattgtggagacttccttctttagcttgttatctcttttccttttaaaactagtaaaaaaagcactttgaaaagaggtattagtaatacaatgaagtatttaatgaatgatgatatttatatatgaatgtcaaataaatcatcatttatgaggcataaatgcataaattaaattccttttaagttaatgcacatgtatgagtgaattaacaatatgcaccaatttacaaatttaatccaaaaggaatttaaccttcatattgacatttcttttcataaaatagattattactaattgaaagtatgccacttgaaaggaactactattgatcaactaccaattgaagcaattagttccatacctttgccttgagcattcctaatctttcttttaggtgaagattaacctttaaagcttgtgattttaccaattgaaagagcacaatctctacttatgaatttcatgaaatagcttaaaagagattgcattagtaacacaagcaatagtttcctatttagcaacctctagtatatgaatgacaagaaggttactaaaataaggaaacctcatgatatgaactaaat

SEQ ID NO: 46568 - DNA, 887 bp, Zea Mays
cgttaaggccacgcaagaaatagaactttttcttctgattagtattcacaaaatccaagacatactgggatagacgagtaaacctctcaaaatatcccatcacaccctcttcttcaccttgctttagatctaggaattcgttgaactttatttccataagggctttcggaatatgatgtgcacgaaatacctcacagaactccgcccaagaaacttgatgaccttctggctgcagtgcaaggtattcggtccaccaagctccagcgggaccctgaagttgttgggtagcacactgaactttttggatatcatcacaacggatgagtcccaatttctgttcaatcgttcgaagccaatcttctgcttccaatggatcttctaccttggagaacactggtggttgcgtactgaggaactccttgtagaggacagcaacatcagaatcataacgaccatgctgaactgatgttgcaggctgggctatttgctgaagaatagcattcacacttgcaagctgagccacaacatcatctaaagttgatgccggagatggattggatgcatcaacattcttttgggaaacaccaacaccatgatcctttgcagagcgggtcctcattctgccgacaaaaggagacttagcttccaatcttcatgaataggaaaggatagcatagaaaagcaaagataggtagcatgaacagggtgggtaaaacgcgcatggaaactgctacagagggggtttaacttaaaagtgtatgtcatgatgcatgctcgtcctattcgtcctcacgattcttgccgacacatagtggctatcacgttctatggcggtggcatacctactcactccgtcattgtacactagtcgcactttcctagtgttt

SEQ ID NO: 46569 - DNA, 7438 bp, Zea Mays
gtttatattaataagataggagtctcaatttggaaattggttacgttagttaatttgtatagctaattgcctaactcatttaatgttaatctactaaaagtggtcacgtttacattagtgcatgtagctaattcttttgttaagaccaattggaattagaacatgtgacgtctagttattcatcaacccatagtgcgtctcgggcataagctttaactctcgcgagaccttttctcatttctttctaaccatggtaagttcattatcgtatgtgatattctatgcatatttacttcatttgttctcttgtatggtgtactgtttgttccctaatttgaatggatggatgtatgtatgcttgcaatcgcatagagaacgatccggtcgaagagcccgaggaactcgcaggagaagcccctgagcagcagtcggttggtggaggcaagtgtcccttgacctatctctgtcctattcattctttaattcacctcccgctttacacatttatgcctaaggattgactagcttttgttgtccatgtccttgtttacctatttgggttggattattattgtttagctctatgctattgctcaaactctaatcaatgaacatgatgagattatctatgatacgctgttttccctcttcttattatgatgtggtacttgtggccttcaagggggctcgagcggtttctcgagtgcctctctgtaaggacctgttcgttggatgaccgcccgggaaaacagtgcaaccatgagggtggaatgggatgcccttagctgaataattagaggaaccggggtatagttcgcttagccgtcgtgccgttaatggggctcgatgtatgcggctcgctctgccaagtttggttcgccccttggggaggagtgcggtgcatttaggaaacctaacgggtggctacagcctcggggaatctttgtaaaggctacgtagtgagaccctgcctgttcacctcggtagtgtttaagggtttgatcggcccgaggcaagagggaatcacggcttatgggtaaagtgcacaacctctgcagagtgtttgaaaactgatatatcagccgtgctcacggttatgagcggccaagggagctccagtgattagtggtacttgatcagagacattatggtacaggtggctatgagatcgatggttttggttatgactatggtgctggtaagtggtattctttccgtttggaaagggtacatcgggctaataacttgggttaatgctaaaacttggctttctattagtaaataataatctgaccaactaacagcaactgcttgacttatcccccacataaagctagtccactacagccaaacaggatacttgctgagtatgttgatgtgtactcacccttgctctacacaccaaacccccccatccccaggttgtcagcattgcaaccactgctcaggcgaagatgaagctgtggaaggagacttccaggagttccaagactacgacgagttctaggcgtgggttagcggcaacccccagtcggctgcctgtgaaggccgcgtttatctacgtttcttttccgcactttgatttattgtaaggactatatggacgtctcagacgtatgatgtaatcgactattatttccccttttaatactatttgagcactgtgtgatgatgtccatgttatgtaaccgctgtgtacgtgaataactgatcctgacacgtacatggttcgcattcggtttgccttctaaaaccgggtgtgacataagtggtatcaaagctgtgctgactgtaggaccgctaacctagaatagaatggtcgttctaaggactatagacctctgtctctgccttgactttgatatcccttcaaaagttggtcataccgaccaaaccaatgttctactatatattataccttgctgaaaattatgttttattctaatccttcatttacttatggttcattatttgctggtcatattaattttgttctcacccatttgcttgcgatgtcttttgtagatggctcgacttagacacactgcacgaaagcccgtcatccccttcttaccctcccgccttgctgagcgtccgcttcgccgccccgtggccggacagtccagccacttggagagactgcaccaccgcctgcatgaggagcaggaacgtcgacgacaggagcagcagggctcttccttctcgctccaacaggagatagagtccgtgaggagctgctcccctgtgcttcccctggaggcgccccctgcaccaccactgggcgccccagcctctggagtagctgctggaggagacccagacgacggaggtggcgacgacagctcgagccacgacaccgacttctctgctgaccatgagccggaaggatgggttgctcgacccatcactcgcgacgctgctcgcgggtgtcacttccacgatgcgctcgacaccctgctacgtcgggcacttaaccggcgtacttggtccatcgagtatcgctgtgtggtctaccagcacagtcgcggggtctacccggaccgctgggaggcgacctgcttggtgcgccatccggagaacagtctccagggtgctgaggtctgctcagagcactattctatctctgagcgggactcagctgaggcagccatgcaagatgctgcacggcgtgcgctttcgcactactgctcggttctcggtggggtagctgacggtcttgacctaaagtattacccccgccgtccatctggcagcacaggaggcgtgattgtttcacctgtcggtgaggacaatcctaggttgagcagcacagtcaacctagccgccgtgctaaacacgtagctggaccatgcactagacgagctgagtagggctcgtgctgagatcgccctgctgcgggctgagcgcgcggaacgtcgtcacctggatgatggttcccccgctcccatcgggactcagcacccgtaccgctcacctcggcgtggacgccagccttatggcaatcccgactgcaagaccaagataaatctagaaccatagatcgttagagttggatcttgtaattaatataaaatatatatacgtagaagcttcagtcttagcgttagtctcgctcttagttagtcttagttagacagggtagtttgctatatcctgtgcatttatgtttgtcatgatgaactatgtttggtttggatctttgtaatgactgtcaccagagtgtgggtatcccctacattttggtttacctgttatattaatggagttagttatctagttggggaaccttttattccactttcctcttgatctgagaagctgtgtggtctgtgttggagatcagtgaagatgctcatttgttcagtgttgttggaggattctatactcttttcttatgctgcaagatttgccagttcagttctgatgtgtggttgcattcggcagatgtcagagaacaagcgcagaggaggaacgcgtgctcagcaggagcgagccgctcagcaggaggaggtgccccagcaacagcagctgccacccccgcccccaatgtcgatcgagcagatgtttctgatgcagactcaggcagtccaagccatcggtcagactctggccgccattcagcagcagcagcagcaagtaccactccagcctcagatgcctcagatgcccagggacaagcgtgctgaattcatgagaggtcatccaccaacgtttgctcattcttctgaccccatggatgctgaagactggctgcgcactgtggagcgggagttgcacaccgctcagtgcgatgatagagagaaagtcctgtatggtccccgtctgttgagaggagcagctcagtcatggtgggagtcttatctcgccacccacgccaaccccgacaccatcacttgggaagagttcagaggaagctttcgtcagtaccatgttcctgcaggtctgatgacagtaaagtaggaggagttcctggccctcaagcaagggccgttgtctgtcagtgagtaccgggacaggtttctgcagttgtctcgctatgctcctgaagatgtcaacaccgacgccaagcgacagtaccgttttctgagaggcttggttgaccctctgcagtaccaactgatgaatcataccttcccgacattacaacacctgattgacagagcaatcatgacagagaggaagcgtaaggagatggaggatcgtaagcgcaagatcagtggaccccagcctggaagcagcaatcgtcctcgtttctcaggcaatcaacctcagcagttcaggcagaaccagcgtccacctcagcagcatcagcagttccaaaggcagtatcctcagcatcagtaccagaaccgtcagagcaatcagtcaggaggtcagtttcagaggcagaatcagcaggcacctcgtcttcctgccccagcaaaccagcagaacaatcaggcagcaccagctcaggttggaaacagggcatgtttccactgtggagagcaaggccactgggtgatgcaatgtccgaagaaggcaacccagcagcagtcaggccccaataccccagcaaagcagaatgtgcctcagcctggagcaggcaaccactctcagccacgatacaatcatgggagactgaaccacttggaggctgaagcagttcaggagacccccggcatgatagtaggtatgttcccagtcgactcccatattgcagaagtgttatttgatactggagcaacacattctttcattactgcatcatgggtagaagcacatagtcttccaattactaccatgtcaacccccattcaaattgactcagccggtggtagaatccgagccgatagcatttatttgaatataagtgtggaaataagggggatagcgtttcccgctaaccttatagtaatgggtactcagggaatagatgtcatcctagggatgaattggctagataagtatcagacagttatcagttgtgataaaaggacaatcaagttggtgtccccactaggagaggaagtggtgaccgagttagtcccgcctgagccaaagaaaggaagttgttatcagatagctgttgatagcagtgaagtagacccaattgagagtatcaaggttgtgtccgaattcccatatgtgtttccaaaggacttaccgggtatgccaccagagcggaaagttgagtttgctatagagcttcttcctggaaccgcccccatctttaagagagcttacagaatatccggaccagagttggttgaacttaagaagcagattaatgagctgtcagagaaaggttacatccggccaagcacctcgccttgggccgctcctgtcttgtttgtggaaaagaaagatggcaccaaaaggatgtgtgttgatgcaagagggaagagttgtggcttactcgtcccgacagttgaaggttcatgagaagaactacccaatccatgatctagagttggcagcagtggttcacgcactgaagacatggaggcactacttgtatggacagaaatgcgatgtttacacagaccacaagagtctgaagtacatattcacccagtcagagttgaatatgaggcagcgaagatggttagagttgatcaaagactatgagttggagatccattaccatccaggcaaagcgaacgtagtggcagatgctttgagcaggaagagtcaagtcaatctgatggtcgctcgtacgatgccttacgagttggccaaggagtttgacaggttgagtctcggatttctgaacaattcgcgaggagtcacagttgaattggaacctaccttggagcgcgaaatcaaagaagcgcagaagaatgatgagaagatcagtgagatccggcgactgattctagaaggcaaaggcaaagattttcgagaagatacaggaggtgtgatatggttcaaagaccgtttgtgtgttcctaatgtccagtctattcgggagttgattcttaaggaagctcatgagacagcctattcgattcaccctggcagtgagaagatgtatcaggatctaaagaagaaattctggtggtacggaatgaagagggaaatcgcagagcatgtggctatgtgcgatagttgtcgaagaattaaggcagagcaccagagacctgctggattgttgcaaccgttgcaaatccctcagtggaaatgggatgaaatcggtatggatttcatagtcggattgcctcgcactcgagctggctacgattccatttgggtagtagtggaccgtttaaccaagtcagcccacttcatacctgtcaagaccaactacagcagtgcagtattggcagagctgtacatgtctcggatcgtttgtcttcatggtgtgccaaagaagatagtgtcagacagaggaacgcagttcacctctcatttctggcagcagttgcatgaagccttgggcacgcatctgaatttcagttcagcctatcatccgcagacagatggtcagaccgaaagaacaaatcaaattcttgaagacatgttgagagcctgtgcgttgcaagatcagtccggatgggacaagagattgccttatgcagagttttcctataacaacagttatcaggccagtttgaagatgtcaccatttcaggcactctatggaaggagttgtagaactccgttgcaatgggatcagcctggagaaaagcaagtgtttgggccagacattttgctcgaagccgaagagaacatcaggatggttcgagagaatctgaagatagcgcaatcgaggcagcgaagctatgcagacacaagaagaagagagctgagtttcaaagtcggagactttgtctatctgaaagtgtcaccgatcagaggagtcagaaggttcggagtcaaaggcaagctagcaccccgctacattggtccgtaccaaattctctcaaggcgtagagaagtggcctatcagctcagtctgccagagaatttgtccgctgtgcatgatgtctttcatgtgtctcagttgaagaagtgcttgcgtgtgccagaagagcagttgccagtggaaggtcttgaagtccaggaggacttgacctacgttgagaagtcagtgcagatccttgaggttgcagacagagtcactcgaaggaagaccatcagaacgtgcaaagtcaaatggaatcaccactctgaggaagaagcaacctgggagcgtgaagatgatctgttggctaaatacccagagctctttgctagccaaccctgaatctcgagggcgagattcttttaagggggataggtttgtaacgccctgaatttgggggtagaattttttcttcttttccctcaccaaattcaggcgttaccctttccttttctcttttcaccttgctaaaccttgatcttttctgaagtatagcgggattcggcgtgaggtcccatgtaaagcaaaaccctaaaatattttattttgtgt

SEQ ID NO: 46570 - DNA, 1087 bp, Zea Mays
cttgactgagtaagtagttttcacgggcaagaagtgtgccaacttggtgagtcgatcaacaattacccatatagaatcatatcctttggaggttttgggtaacccgacaatgaaatccatactgatactttcccacttccaacctgggatagacaagggttgcaatggtccggcagacttcaaatgtacggcctttactcgttgacaaatatcacatctagcaacatatcgagcaatctctatcttcattttagtccaccaaaaccgttgctttaagtcttgatacattttattactcccaggatggacagagtaccgggataggtgagcttcatcaagtatttgctgccgtaactcaggaacctttggaactactaaacgatctttgaaccaaagaactcctttatcatctacccggaattgtgtggttggatcaatcatcatcctttccttcatatgagctatcccgacattaatcttttggacttcgataatttgatcaatcaaaactgatcctaactggagattggctattgatgcttgtggtactatttccatgtttaacttctccatttcctggcacaaggtcacagttaaaggcttggctgaaagacagttacattgggacttacggctcaaagcatctgccacgacattagccttgccaggatgataatgaacctcaagatcatagtccttgatcaattctaaccaccttcgttgcctcatgtttagttcagattgagtgaaaatatacttcaaacttttgtggtcggtataaatatgacatgtattacccaacaaataatggcgccaaatcttgagcgcatggacaactgcagctaactctagatcatgagttgggtaatgctcctcatggcgtcgaagttgtcgtgaagcatatgcaatcacttggtcttcctgcattaacacgcatccaatgcccgtgcctgaagcatcacaataaacatcgaatgacttctcaatgtcaggttgagccaacacgggtgcagttgtcaacagcttctttaacttctcaaaggcctcgttgcattctggagaccaattaaacttcacattattcttt

SEQ ID NO: 46571 - DNA, 418 bp, Zea Mays
gcgctaatcacatgtttatattaataagataggagtctcaatttggaaattggttacgttagttaatttgtatagctaattgcctaactcatttaatgttaatctactaaaagtggtcacgtttacattagtgcatgtagctaattcttttgttaagaccaattggaattagaacatgtgacgtctagttattcatcaacccatagtgcgtctcgggcataagctttaactctcgcgagaccttttctcatttctttctaaccatggtaagttcattatcgtatgtgatattctatgcatatttacttcatttgttctcttgtatggtgtactgtttgttccctaatttgaatggatggatgtatgtatgcttgcaatcgcatagagaacgatccggtcgaagagcccgaggaactcg

SEQ ID NO: 46572 - DNA, 1146 bp, Zea Mays
ctttatttgcttacaagcacttgagagtaagaatcaaagagaaaaagaaatcgaagccaagcaaacaagagcaacaagaaacacacgagatcttctcacaagtcctaatgcgctagagttgatttggggacttggagcggatcaaacactttgattgtgtctttggagtgaagtgtattgctcttgtattgaatgaagagtgttgaatgcttggatggttggagtggtggtggttgaggggtatttatagccctcacccaccaaaacaaccgttggggtaggttggtgtcgatgggcacatcggaccgtccggtgctccaggccagggcacccttcggttctttgctcctttctttttgaaccctttctttaatcttttattggtttgtgttgaacctttatgcacctgtagaatatataatctagagcaaactagttagtccaattatttgtattgggcaatcaaccaccaaaattatttataggaaaaggttaaccctatttccctttcatcatcaccatcctggtcgatagggaccggagagtcttcaagagcttcctcctgggatgcgaacattccaggagctagggccggacagtgtaacaccccgagggtccacaaacaccccggaatgctactaaacaacacttctgccatctatatataaaatttcggcagcatcccctttgcaaaattgcataaacgagggggcaacagtgtataaacatatatcatgacaaaaacatactaagtactattaatcggctagcaaagagaagttaaacatacgacatgaactgaattaactagtgcgcacgactagttaaaaaaaacaaacttcctttgacaataaatttctaattaaatcatggctgcacctcggcagcgctattgtgagagtgaaagtggacgtgctgctactcccctcattcccaacatgtatcaagtacctgcattgagtaatgcaagagtgagatgacacatctcagcaagtaaaataatatcaaactgtttaaccacataagaacattgttttaccaccacttgattccacaaccttcttattacgaaggtgcagcacgtatacaacgtacaacacacctagtcaccacacctcgcaggtagaaaccacaatagtaacatag

SEQ ID NO: 46573 - DNA, 198 bp, Zea Mays
cccctttcctcccttcttccctccacaaaaatccaattggagacatgcaccaacgtgacgtagatccgagcgggaaaggaatggcaccttggagagaagggcttgaggagggggcggctagggtttgatgggggaggtggggtggcggctgcaaatgggtggaggagtgagaggggcgtcctccaagcctagagagag

SEQ ID NO: 46574 - DNA, 356 bp, Zea Mays
ggcggcggctgtagggagaaggcaatgggcggcagccggttaggtcagagggcgcgcctaatgggcctaatgggccatatggcctgctagggttaggttttctttttttttcttctttttttttctatttccttttcgaatttcgaaatacacatttaaataatcataaaattcataagaatcaaaccaaattatttataaataaaatgttaattcttggctaatatttattatatatttttttgtgaatttttctttaagaagaaatgatattctatattgaaaatcaatcatgagcattcaaaatcatcccaaaggcaaataaataacgaacacttaagagaaaattaattacc

SEQ ID NO: 46575 - DNA, 284 bp, Zea Mays
gagcgcgtgagagcgaccaggggcggcggcggctgtagggagaaggcaatgggcggcagccggttaggtcagagggcgcgcctaatgggcctaatgggccatatggccggctagggttaggttttcttttttttttcttcttctttttttttctatttccttttcgaatttcgaaatacacatttaaataatcataaaattcataataatcaaaccaaattatttataaataaaatgttaattcttggctaatatttattatatattttttttgtgaatttttc

SEQ ID NO: 46576 - DNA, 139 bp, Zea Mays
atgacatggctcactttaatagcctcaagtgtgactaaagattgttaatggatgtacaatggttggactaagaatgggcatcattatgatgagtgggtagccaagaccgaagaggttttggaccgtgtgttctcctttt

SEQ ID NO: 46577 - DNA, 331 bp, Zea Mays
gtcatgcacatgtaatggcacaaaaaaggtgtcgtgagaatgatgagctaatggtgcaccctttagatggggatgcttagaaggctctcgatgtgtttaaccaaactttacgaccgatggcatcacatcttttggtcaaatggcatcatcatactcatgttggtccatctttgctagaaactcaatgtcatgttagaacccttgattgaagagttgaaggagctttggaaagaagtaaaatcatatgatgttttcaaaacttagaaattcaaccttcgagtcacgtatttgtggtcgggccttgactttttagtgttcaatatttttccgg

SEQ ID NO: 46578 - DNA, 3226 bp, Zea Mays
gcttcttgttggctttattgctccattagttctatagattttctcccttttgtggggtgcaaagaatgttagattacatgattatcttttcattatggcaagaacaaggtttaggaagattaggagttttgtttcaatagaactacttgtttcgtggtgttgtgaggtgaggtgtttgatcttcttatacattcatctggtgtggatgtttcaccattaaattaaaatgaattgttgaagttggtaaaggttgtgcttagtgcatattaccccttcataaaagagtgtcgttttaagacattgatgcggatgtatggctgcatccaaattcgatgttgtgaaatcgtagtgttgattgcatctatgacttggtttgagcttcattacatgttggttcatgcttgatgtcaggtggtgtagtttccatagacatttagtccgaggtagaagttattgtgttaattaagaccaataatgacccatgttttgggatggtggtgctatatggggtaccttggatgttttgtttggagtggacgaattcgaggacgaattctttttaaggggggtagagtgtaatatcccaaaaaaagttgccaaaggttgatcttcggtgcgtggatgtgggaaaagagttgtgggccgttggatgctaagtcggagtcatctgtggtgtcgcttcttttctcccgaaaaagaaaaccctagtggtggccttttcccccttttgcccctacttggccgccaccccttccccccctcccacacttggccgcccctccctcctttccccttgggctggccatcctctcctcccatggcagcccccctccacggcttcctcctccctctagatctccccccgcgcagcaaggatcgagaagaggaggagcacgttgaattgaaggggaagagaggatcaaggagatgttcttccccatctcttcttgcagaatttcttggggaaaccctaggtatggatgagatccttgttccaccctataattatgtgcttttggaggttgtggatcatgggaattaaaggattagaggttggattagatgtggggttaggttttgatctcgaatttagttttctgcagaatggcagattcgacagtttctgttcatgctagctttccgtggtcttagtggcctcaaaaaaataaaaagtctatatatgagtcgtagataatttgtagatctttccgtggccgtgaagaacacctcaatcggacatcagaacagaaagttatggcagtttgattatagcagtttttcagtctcataattctgtgcagaatctgttctcttaagagttaggcaattttatcaacagaattaaactgtgagttggtaaaagaagttgtagataatttcataagctttccagattgttaaagaatgcattcatatgatttgtgaaactccagttatgtttgttttactgtggctgttcctgtttacctgacaaaaatgagtgggtctgttcactggtgggtttcatctagtaaatggccgacttggctcttccaactatggagacttttgtagagggataaaagttcttacttccagtagaatttcataatttttggttcagtagtttgggagatatcgaattttaaagttaaccatacggctgtctaaaacagattcagttagttatcttgtcagatgttttagaacttgtagatggcagaatttaattatctattgaatactgaagttgtagagtattttgtgtagatactcctagagtatttgtttgatatcaccgctgttttaattttaaagatacaaaattaacaaatagcgttgctgctgtatggcatgtggttcagggtgggagtctttccactgggtcttggtttcaagtgtaggagtgttttgttgattgatggcaaatgtttgtgaaatatttgtactaagttttatgcccgctagcaggtggctacactccagatcatgtctagtacatttcttcttcttcgatgaaggcaagtgaatgtagcggtggttgctttcgttctgacctgttatttctattgcctacactctaatattcagaagtattggattctttcataattggactctatggtgatgctttacttgcttgcattatactgatgctcaatcatatattgatgatgattatgattcgagtatgattcatgagattaattcacacccctgaaggtaaatgaagtattatttgaggttggtattgtatctgaaggtaaataaagtattattttgaggtttgtattgtatctgaaggaagtgaagtttattgataaatgcagcatgccatatacattgcatgactcatttgcatctgaagttttgtcgtgacctatggtccgaccgtaccggtataatttagcatcgtacgttgcccgaggaggggtacgatgcagcttcatacccttagaggtatgaaggcagaggacatatgcattgcattcatatgcattcattgaagtgatatttgcagatgatgtggttttataccctcagaggtatgaagatagagtacctacacattgcattcctatgcatacattgaagtgatatttgcaggtattgttgacgcagggaagtgttatagaacctattgtggttgttcgaggaaatgagatggtattggttatagtgggactactgagttctatatctacaagtatttctgattttaattgtgactcttttaaaatgttgatgaattcaatttgtggtttaaatatctcgtcaaaataattcgcttgctgagatgttttatctcactcttgcattactcaatgcaggtgcttgttgctcatcaagggaagtgggaagtagcagcacatccaccttcattcttataataacgctgcttaggcgcagtcatgatttaattagaagcttcttgtcaaaggatgtttgtttctaactagttgtgcgcactagttaatttagctcatgtcgttatggttgtcttcccattgctagcagactattaatgtctattatgttttcttatcatgatatctgtttatactttgttgcttccccgtttatgcaattttcaaaggatatgttgtcgaaattttatatacgaatgttagatgtgtagtttagtagcattctggggtgtttgtggatcccggggtgttacattgcttgttgggcctgtgcgttgtaagcagccatgtactctgattgctgttggaggaatgccatt

SEQ ID NO: 46579 - DNA, 569 bp, Zea Mays
ctggatttttagaaaataaataataaatccaaaattcactaaatttttgggataatctctaagtaatatttagaagccttgggtagagtttggtatgatttggaccttgtttgatacttagaacccaaaaccctacccctgccctttgaacttcactattgactccgaaaaccctaagttctcagagatccgtgaaggaaagttgtactcaagaccttagataacaaacttctattatttttgcatcttcatgagcactacatgagcattcattactatacttggctatatttagaaaacgaagaggaagtagaagaagagacaaggacttcatcaccaccaccacctgaggaacatcaggcagacagctgtttctattttgatatttgcaggaccgagcctgattcaccagtaaaacaaggcaagctccggtgcatttgccacctccttgttcctttttaaatctttctcacttgcttgatgcattaggtgataggagttgagtgctaaaacaattcctgcatttccttccttgaatttgattaccttcctttgaatccctattttac

SEQ ID NO: 46580 - DNA, 168 bp, Zea Mays
cttaaatcgagacttgggttaggaacaggtgatgttctacccaggttgattaaggattatagcgaatgtaggcttgatgatcgaggacgttttaactggtcacatgcctcatcattggtaagctttgcctcgggcagacaaataccagaataagataacacacaatgg

SEQ ID NO: 46581 - DNA, 420 bp, Zea Mays
ttcaggatcgccgttacttctcggatatgaagacttggtcactgacttgcaatctaagtcatgggtggaatcataatgagcaaaaattgtgttgtatggattaatgtgatgatgaaattagactagatgcaaacaaggtctattaatacttaatctagcattaaaatgttgaaagtaaggatccactcatagtaagcttttctgcaaacagagtccttgattcttgataagccttaccttgaatccttttaaaaccagcatacccttgagtgtcttttctttagtcgggtaagtcttgttgagtacttgcgtacttagggttttaaccattgttgctgcaggttacgagtcacttgattgtgattggtgttaagcgccggtgggcacgaccttctataattataagtatttcttctatac

SEQ ID NO: 46582 - DNA, 436 bp, Zea Mays
ccaatggacgagggttgcaatcaacccctttcaagcggtccaaaaacccacttgaataccacggtgttttgctttcactttactatatcccgcttgcgaggaatctccacaacttggagcctctcgcccttacactttgaagttcacaaagaagcacggagtaagggagggatgagcaacacacacaagacacgaaatcagagtaccaacacgcacacaagtcgcaacaagagctcacaacacaacttagcgagttcacaactcaaatggagctctaattgctatcgcaaagaatcaaatgcgcagaatcgaagtcttggtgcttaggaatgcttagagaatgcttggtgttctcctccatgctcctaggggtcccttttatagccctaaggcaactaggagccgttgagtgcattccaggaaggcaattcttgcc

SEQ ID NO: 46583 - DNA, 1041 bp, Zea Mays
ggatctccttccttatttggcgaagccgaccgttggcgctttggagccattggcgcatcggacactgtccggtgcacaccggatagtccggtgcccccttccgaccgttggctcggccacgtgtctcgcgcggatcgcgcgaccgaccgttggcccggccgaccgttggctcaccggacagtccggtgcacaccggacagtccagtgaattatagtcgtacgccgttaatcacttcccgagagcagcaagttcgcctgagccagcctggcgcaccggacactgtccggtgcacccagacagagctgactttggcataacaaagccatctttaatttcaacttgatttttcctgtttccagcacttagacacaatacattagtctctaaaacaatgtactaagtctgagaaacatacctttattcttgatttgtactttgtccaccatttacacttacgcacttgtgttggacactaaatcaccaaaatacttagaaatggcccaagggcacatttccctttcaatctccccctttttggtgatttatgccaacacaacataaagcaactaatagaagtgcaacatcaattcaaatgtgaacacaaatttgttttgaatcaaatttggcatatatggatcattctttgccaccacttggtttgtttttgcaaatcaaactcaatttcctatctctaagtcaaccacacttgttgaaacataaagagagatatttcaagagaaattgatcaaagagttcaaaaaaactccccctttttcccataattaagccttctccccacaagagaccaacttttgacaataagaggcaaacaagagtattttgacaaacaaaaactctaactctactattttcaaaattcacaagtggtagctgatccatttggtagctgatccatttattgctttggccttattttctccccctttggcatcaagcaccaaaacgggatcaattttggccctttaaccccattgcctcaccaaaatcttcaactaagagtagaaaggcaataagagtac

SEQ ID NO: 46584 - DNA, 100 bp, Zea Mays
caaagtccctgagggtttgcctgatccaaagtagttgcgcacaacactgtcctgcggcaacgtactcagcttcagcggtggatagggcaacagaagtttg

SEQ ID NO: 46585 - DNA, 397 bp, Zea Mays
cccgaagcaaggcgtagctactaaatatctaagaattcgctttacggccactaagtggcactcccttggatcagattgaaatctagcacacatgcatacactaagcataatatccggtctactagcacataaataaagtaaagaccctatcatggaccagtatgccttctgatcaacagacttacctcctttgttgaggtcggtgtgtctgtcagttcccattggagtctttgcgggcttggcgtccttcatcccaaaccgcttgatcaagtcttgtgtgtacttcgtttgggagatgaaggtcccatcctttagttgcctcacttggaacccaaggaaatagcttagtttgcccatcatcgacatctcaaacttttgagtcatcaccctgctaaac

SEQ ID NO: 46586 - DNA, 99 bp, Zea Mays
caaaaagaccaccatcacaagtcttagtaaaaagagttggatcggctttttcaaccttgaaatcattagcaattaaaaagtctctaaggcattcatacc

SEQ ID NO: 46587 - DNA, 467 bp, Zea Mays
atccagcttgagcccccggatgcataaacctgcaaggcaatttaggcttgggtcttaggtacccaactcatgttgggtcctacaaggttagtacaaatagctttagggacccaaatgcaagttttatctcccttgcattttgcccctaattttctagcaactaccttcttatcctttctacaaatagcaaaggaagcatttaaagcatgataaattgtagaaggttcactatttgctttcctaggcatatgaacaacatttcttctaggcatgtgattaatagtatttctcctagctacatttctatcattcataatagaagaactagaagcaaccatagcatgagaatcaagagcatcgtaacttctataaacatttctagaatgtctcctatcatgatacatgaaggcatggttcttttgagcattactaaccataggggccttccctttctccttggcggagat

SEQ ID NO: 46588 - DNA, 510 bp, Zea Mays
cttaattgaggggtgtctaccaatcgtgtaggcatcccttgcaaattttagcttgttaaattcactcttgctagtcttaagttgagcattaagactagccacttcatcatttaatttagaaatgcaagctaggtgttcactacaagcatcaacattaaaatctttgcacctattgcaaattataacatgttctacacaagagttagatttatttgctgctactagtttagcatttaaatcatcattaacaccttttagagtagaaatggtttcatggcaagtagatagttcacacgaaagcatttcattccttttaacttctagagcaagaaaattttgtgcactaacaaatttatcatgctcttcatacaaaagatcctctcttgcttttctaataacctattcttatcattcaaggcatcaattaattcattaattttatcaaccttggttctttctaggcctttgaataaacatgaataatctatttcatcattatcactagactca

SEQ ID NO: 46589 - DNA, 569 bp, Zea Mays
gcggtggcggcgagtccttcgttgtcggagtcagacgaggagcaatccgaatcccactcctttccaagatgtgcctcgcccttcgccttcttgtagttcttcttttcccactttccactcttcttttcctggtcactatcattatcgggacaatttgcgataaaatgaccaatcttaccacatttgaagtaggagcgcttccccttcgtcttgttcttgttggggtcctccttgcgaccctttagcgccgtcttgaaccgcttgatgatgagggccatctcttcatcattaagcccggccgcctcaacttgcgccactgttgggggccttcggcttccgaaggtcctcaaaaacgtaattttgactatgttttccaaaagaaatatgtgaacaggtaccttcgaagtcagattgcgagtatacaagaacatggttaagacgaagcttgattgggacggcgatcacaacgaaggataagacgatcacgaagctacgtgcagaagagcttcggcataacggcagaaagaggaaaccgacttaaagatgaaaagccaaattagacctcgaag

SEQ ID NO: 46590 - DNA, 718 bp, Zea Mays
cgtacgtaggaggtgtgtttcatatatatttgagagtgcatggaacgttctcgattcagtacatgcatgatagacccatgtctttttctttcaggaacgtgtatatatagagagagagagagttatagacccatatggatatgagctaggcagcaagttatagataaattctttcggtgtaattaaaacgcagcactgtactgatgtttcccttgcagcagcctctgctcttgtgctttgccatctctttcgcgcggtagctatcgtattaatttgatacccatgtgtctcatgtgggtggccgtgacgacacggaggacaaccaaccgagctggacaacaagttttatcacggtttcagaaacgatgatcatggagttttatcatggagatttgcttgggttgtggcatatccgcagaccgcaggttagggcggtcttccgttggagtcttgatcatgtccacctctcgtcattcaacaacgcgcttccgcagagacctggctatgctagcagataacacacatgtaaatgcaagtgtcgatataccaaaccaatgtgagggaaagggacaaactgaattttttttctctctctaaggtttggttgcttgttggcaacctacacctctattgaggtggatcctaagattcaccactccacatagaagatggtagacctctctaaacatgaactgattcaacttgagctacttttttt

SEQ ID NO: 46591 - DNA, 1517 bp, Zea Mays
gtgccctttacatttgctaataactttaaggtaatccaccgaggtctaaatagccttttcccttttaagtcggttccctttcctgccgttatgccgaagctcccttgcacatagcttcgtcactgtgtcaaccttcgtattgttcgttcttttcccactgtgcggttctgatccgagtacgaaggcacctgttcatatattacactcgggaaacattgttaaatcatgtttttgaggacattcagaagacgaaggcccccaacaaatagtttatacataatttcctttctaatgaattagatcatttagatcatttgttcctacaatagaattaaaggtaattaatagattaattatcctttatcataatttattaatcaaatcgatagtcaatttagatttatggcatgattaatgatttcatagaatttagttcacattatatacgaatcacttagtttttcctaaaggataaaataaagtaataagagtttaagttcttttataacttaaagtgttactttatatattgacttcgaatataataataaatgctatgtgttttctaatgaaattaaaagatggttattcgttcattatcttttgcatgacaatccacttaagggactataacctagtttttcataaaataggtgtttaataataatgatcttttcatataaaacctatttagacttatatcttaatttatcataagtgattggttaacaatatttataatatgctccataatgcttctaaaattaataatgtgattagtagcccattaaccttagatatatatatcatatatcttttctaaaaggttaaaaaggtttaatattgttataatgtgttttatcatcttataaaccctttatcttagacatatcgtgtatgacgttttataaaagattaaattggtgaacctaatatctgtatattttaattaagatatttttaagctcatgtcttgttttataaagtatagatcacacatttttgaaaagaatatctttttattataacccgtgcgagtaatgtttttgaaaagcgaacactctttcgttagtatttcttttagctttacgtatggtgaatgttgtatgttattgagtggtgtttgttcttcttgtttgtttgtgtgatattcagtggttgatctagtagttaagaatcaagatctattcctatccgtggaagaacctcaagttttctataagcaaggcaagtggacttcttcctctgcatactctgtttgatcccaaacaatacatttaataaagtttattcttcgatatatatatatatatatatatgcataatttgatgggttacctatttagatacccctaacctttccaaccttactccttgtttaacctgggattatgatcaaatcaagtagctatgctattgctacaactttaaatttatgcagtcactcctgtttatgatactaatgttccaaatagtaagtttacattattgttgttaacccgatggttaaacatgat

SEQ ID NO: 46592 - DNA, 377 bp, Zea Mays
gttgtttttatgaaggagagcttcggaaaaaaggaaaatgttgttttctatgcttcgttgcgtacgaaaagaagggaaggtgtttttttcgccttcggctcaaaaaaggaaatttcgtccacatcaaagcatttctcaaaaatcagtgaaaggttaaggatatattacaaggtatggacagtatacatggaagttttgtttacatttacaaaagttatctcaaaagtttttcaagtactgtctgcagtctactatctaaatctccaaggagcttcggcttcggcgttatttttgatcatcagcttcggcttcgtcatcctacatgaataaggtcattggaagtcagaatcaagtttataggaaaaggtaagtacaag

SEQ ID NO: 46593 - DNA, 1879 bp, Zea Mays
attgtctctatttctctatgatgatataataaagataaatgcatgatgttatataattatccatgccatcttttatgtttcatatgcttcgtctttcattaacgtatactgtgatcatgaaggttcgtcctttatgaccttcgtccgaagatcgttataccctaagggaaataatgcttcaaaggacgaaggactttattgtttaacattctctgtgttgccttgttcttaactcatagcatttgagaacaagtccccaacacatagtggttttctaatccctaatattgctatataacccttgacttcttatacttttgttttcttgccattgtattgccacccttgcgcaatatctaccttgatatactaaacctttgcctctctacttttctccttgataatactttctccctaactcactttatatccttggttgtatcatttatcctcactttagtagttcacggttatcttatttcactattggccaccaacaaatatgtcttgtctaactccttgatgattcttacccaactacttgatgttataatatctttcttattccaaaccttgtctcaccttttgttttggttgaatgagtagaattggattatgttgtgctggtatgcttgagttcattgtcctttgtgttcatgtttgatttgcttctttgaaatgattgttggtgtattatgtgacttttgtccataatgacatcagttagctaggtaaaaccttagatagatgggttttctcttctctctaaaatctgtctttgctcaacccttttgtccctcccattcttccatacccatacagatgtcagaccttggaatgtcaactacaagtgaagtcactaagtgcaaagaatgcggtgtgttgacaagtcaaaacaacactataaataaaacagctgatgaacagacattcaagacacaaaaggatgcaaaaccaaaccaacagacaagtgaccttggaaaatgttgttgatgtgagtactatggaattccttgtcgccagatcagtacaaacgaaagtgaaactacaaaacagaagaaccagattttattttctggcataaaaagacagatgtctctccaagaacaactaatagcagattctctcatatctaatgcactgttagttgatgaattgcaaagtattccaaaaaggaaacatcacaaggatgcccaacctcaagaagaaacacatgagtgttacattgatggatggactattacttgcacatagtttcagcctcgtcgtcgcatcaggtccaagaaacaaaaaggaaaacatggaaaaagtcaagaaataacttcaagaaaagcttgctatcaatgtggacgtgaaggtcattacttccgtaactgtcctgagaagagttcactacaaatcacctccaagatgaagctatctcagtcttcagacatggaatatgaacaaaaatacacagaaacttctaccaacaacgtaaagacaactcgaccatgtaacttattgttggggaccataattaggggtacccccaacactcctaaactcggctggtaatcaccatcagcacaagctgcagagcctgatgggcgcaattcaggtcaaggctccgtccactcaagggacacgatctcgcctcgcccgagggtctcctcaagcaacgggcgcaccctcgactcgcccgaggcccagctcgggcaggcttcgcactgaagcaaccttggccagatcgcctcgccaaccgaccgtatcgcaggagcattcaatgcgaggatcgcctgacaccttatcctgatgcgcagtcctcagtcgacagggccgaagtgaccgcagtaacttcgcccttccactgaccgacctgacaagaaagcagcgccgc

SEQ ID NO: 46594 - DNA, 174 bp, Zea Mays
atcatgggcgagacaatctcgttcgctcctctgaaggccatcaagtcccaagtcttagcggactttgtggctaaatgggtcgacacccagcttccaacagctccgatccaaccggaactctgaaccatgtatttcgatgggtcgctgatgaaaacaggagcaggtgcgggcctg

SEQ ID NO: 46595 - DNA, 2680 bp, Zea Mays
cgaggatgcggcttgggccacggctaggtctgccgcaagggctccggcccgagcagatgcctcggctaactggactccaagagcctcagcccggctttcagcctcggcggcccggccccgagattggtcccgctcgccgatgacctggccaagctccaactgctgccgctgtgcctctgcgcgtgctgccgatgcctctgctcccagatcgacacagagcaaccgaaggtccgccacctcggcgctccgttgggagaggcgctcggtagccccggcaagcgtggtcctcaggatcctcaaacaaaatgctactaaactacacatctaacattcatatataaaatttcgacagcatcccctttgaaaattacataaacggggaagcaacaaaatataaatagatatcacgataagagaacataatagacattaataatctgctatcaatggaaagacaaccataacggcatgaactaaatcaaccagtgcgcacaactagttagaaacaacatcctttgacaagaagtttctaattaaatcatgactgcacctaagtagcgttattatgagagtgaaggtggatgtgctgctacttcccacttcccttgatgagcaacaagcacctacattgagtaatgcaagagtgagatgaaacatctcagcaagcgaattgttttgacaagatatttaaaccacaaattgaattaatcaacattttaaaagaatcacaattaagatcagaaattcttgtagatatagaactcagtagtctcaatataaccaataccatctcattttcttaaacaaccacaatagtttgtataacacttccctgcgtcaacaatacctgcaaatatcacttcaatgtatgcataggaacacaaagtgtaggtactctatcttcatacctctgagggtataaaaccacatcatatgcaaatatcacttcaatgaatgcatatgaatgcaatgcatatgtcctctgccttcatacctctaagggtatgaagccgcatcgtacccctcctcgggcaacgtacgatgctaagttgtaccggtacggtcggaccataggtcacgacccaacttcagatgcaagtgaatcatgcaatgtatatggcatgctgcatttatcaatatacttcacttccttcacatacaatacaacctcaaataatacttcatttaccttcagatacaataccaacctcaaataatacttcatttaccttcaggggtgtgaattaatctcatgagtcatactcgaatcataatcatcatcaatatatgattgagcatcagtataatgcaagcaagtaaagcatcaccatagagttcaattatgaaagaatccaatacttctgaatattagagtgtaggcaatagaaataacaggtcagaacggaagcaaccaccgctacattcacttgccttcatcgaagaagaaaaatgtactaggcatgatatggagtgtagccacctgctagcgggcataaaacttagtacaaatatttcacaaacatttgccaacaatcaacaaatcgatcctacacctgaaaccaagacctggtggaaaacctcccactctgaaccacatgccatacaacagcaatgttgcttgttaattttgtatctttaaaattataacagtggtgatataaaacaaatactccatgagtatctacacaaaatattctacaacttcggtattcgatggataattaaattctgccatctataagttctaaaacatctaacaagataactgactgaatctgttttaaacagcagcatagttaactttcaaaattcgatatctcacaaactactcaaccaaaaatcatgaaattctgctgaaagtaagaacttttatccctctacaaaagtctccatagctgggagagccaattcggccatttacttgatcaaacctaccagtgaacagacccgctcatttctgtcaggctaacagaaacagccacagtaaaacaaacataactggagtttcataattcatatgaatgcactctttaacaatctgaaaagcttataaaattatctacatcttttcttacaaactcaaggtttaattctgttgataaaattgcctaaatcttaagagaacagattctgcacagaattaagagactgaaaaactgctataatcaaactgcaataactctctgatctgatgtccgattgaggtgttcttcacggccacggaaagatctacaaattatctacgacttatatatagacttttcatttttttgaggcctctaagaccacagaaaactgggattaacagaaactgtcgaatctgccattctgcagaaaactaaattcgagatcaaaacctaaccccacatctaatccaacctctaatcctttaatttccatgatccacaacctccaaaagcacataattacagggaggaacaaggatctcatccatacctagggtttccccaagaaattctgcaagaagagatggggaagaacatctccttgatcctctcttccccttcaacttaatgtgctcctcctcttctcgatccttgctgcgcggggggagatctagagggaggagaaagccgtggagaggggctgccatgggaggagaggacagccagcccaagggaaaaggagagaggggcggccaagtgtgggaggggggaag

SEQ ID NO: 46596 - DNA, 441 bp, Zea Mays
gcctcagtggctgagaataagctgagtcggggtaaagcggcccatgcgggaaaggaagagggagtgggctggagtgctggacaggggtcttggccctgggaaggtaagcttttttttttgtttctcttttctattttgttttcttttctttttgcaaaattcccaaagtccagatttgaaattcacataaattttctaaatgcacaaacaattgaaacacgagcatgcaatgcaaagtttatatacatatgctatttgtgtttattttggttcttttgtccacaaaacatataataaggcatgattcacacactatccacattttatggaaataattcttctgaaggtgtgattgagaagtcaatttaaaaatacatatcctttactttgtgatttttctatcatgaattattttaatttaaatattttaaagagtgtttt

SEQ ID NO: 46597 - DNA, 279 bp, Zea Mays
gtttttttaacttttttatgataaaaatatatatttagatgtctggatgacttatttcaggatctggatccgaagcttggcttcataagctatggcgccgaggatgcaactgtaactccttgtttgcgtcgaattttttgtttttttaacttttttatgataaaaatatgcatttagacctctggttgacttattttaggtctggacctgaaactcggcgccataagctacggcggcgagctctgacatgatggtggcggctcccggcggctagggctg

SEQ ID NO: 46598 - DNA, 83 bp, Zea Mays
gtgtcctcgaaggccgcacctcaccgtcggaagttgtgccacccatcgttgttacctcgtattttcccaactcctcatcaaag

SEQ ID NO: 46599 - DNA, 480 bp, Zea Mays
gagaaatcggcacgacgcatgacgattgcagcacaagtccgatccttgcggaggtagttgctgacgcgtgggtcccgtgcagtagtgatcgtgggtgatgcaggcgtagctggcccacatgacagaggacagatgcgcgtacgcgggccaaacaggagtgcacgccagcgagttgggccggccaggttcaatccggcccaagcgcatagttttcttttttttctttttctttttctttttcttttttgttttccttttccttttatttttgaatctcaagtttgaattcaaacattgttgtgaagtttgtactcagattaaaggtataaattaagggtactagtttgaaaaagatatatttatttttatataggtttctttatattgtattctcttttcctttttccctccaacttcaattctatttctccaagttctaaattgtgaattaggtattaatgtatttctattaatattatt

SEQ ID NO: 46600 - DNA, 400 bp, Zea Mays
gggtgatgcatgcatagctgacccacatggtagaggacagacgcgcgcacgcgggccaaacaggagtgcacgccagcgagttgggccggccaggttcaatccggcccaagcgcatagttttcttttttttctttttcttttcttttcttttttccttttcattttatttttgaatctcaaatttgaatccaaacattgttgtaaactttgtactcagattaaaggtataaataagggtactagtttgaaaaagatgtatttatttttatataggtttctttataatgtattctgttttcctttttccctccaacttcaattctatttctccaagttctaaattgtgaattaggtattaatatatttctattaatattattattactattattaaatgcac

SEQ ID NO: 46601 - DNA, 448 bp, Zea Mays
cgcgtgtatcccttcttccttatcacttccgagctcagcggaacaccgtaacagatgcctcgatcgccggcaactaccctagacggctattgcggctaagagtccacctgcgggtataaagactgggccccacctccgagttgtcctccgagaaccattatcgcgttctagttcccagagaaagacagggagagagaagctccgccaccaggagagaagaagatggccggcctctccttgcaggtctgcccgacacgggcaagacggcgctagcgctcggcatgctcggcgatggggtgcgcaggcgccgttctccctgccgggtctgctcggccaacctttcctgacgagctccgtccggccggccaagtccctccgtcgcgccccgctccttgctcctttcctctggtcgcagcgcgccctgggcagtgtcccttctcgtgcgatt

SEQ ID NO: 46602 - DNA, 235 bp, Zea Mays
cagacttttgctgcttctgtgccaaggtggttcccaaagaagaaaatcaagactgaagtgcgggaggactcggtcctccacttaggatcttttgcttttagcttatcgggaggagtttgtgcctccccgggtttgtattatattacttctatgcactcacttttagtcttagtctggtctgtaataacataactcaagcttgctttttgaaataaatgtaagattatgtaattcg

SEQ ID NO: 46603 - DNA, 148 bp, Zea Mays
ctgagttgtgggcttcattgagcaggacttctcgtgcctctcccattggtacacacagacggttcttgaaccaaagaactccttgttcatctgtcctaaggtccggaagttgctccttgcgagctctttccataagtcttgctgtttc

SEQ ID NO: 46604 - DNA, 424 bp, Zea Mays
cttagcataaagttgatgtgccctgactcttccgaggacgattcaaaggtgacgctcatggtccttgcgattcttggaatagataaggatgtcgtcgatgaagactacgacaaacttatccaattcttccatgaataccttattcatgaggttcatgaaaaaggcgggtgcatttgttagcccaaacggcatcactgtgaattcatattgtccgtatctggtgatgaatgcagtcttctgaatatctgcttccttgatcctcagttggtgatatcctgacctgaggtctatcttggagaaatatttggctccctgcagctggtcgaagagatcgtcgatccgagggagtgggtacttattcttgattgtaacttcattcaaggaccggtaatcaatacacattctcatacttccatcctttttg

SEQ ID NO: 46605 - DNA, 364 bp, Zea Mays
taaaggttagagtatcctttaataaatactacaccttaggaattaaagaatataatttctttctgtttgtatgtttaaaagcatccgcataaagggattaataataataatagatcaaataaacatatatgaatctcatgctggattttgattgtgattttattttgaagtttaaatttggacctaggatcaaatttgaatttgaaatttgcaaaataactaaaagaaaaaaaagaaaaaaaaggagaaggaatcgcctacctgggccgaaaccctagcacgttggcccacttatgtgcgcacccagccaacccagcgcgccgacaggtgggcctgtcgagtcagccacccaaccacgatgccg

SEQ ID NO: 46606 - DNA, 899 bp, Zea Mays
cgtcgttctacaacccctggaccgacaccatctccatgttgccgggtcaagcccctagtgcctcccgtcctcctgtgcaggcgccggctttcctgactgcacccacctatggagtcccttcgccacctgcctccggcatgcccccatacgacgtgcccctgacgacctcggcttcgcctcagctcgtgcctccggggacccacaccatgactccctggtcgccactagctggaggctaggacgcagcctcccttgtcgccgcctacaacaccatggcgttggctccaccctcccctgactgggtcatcgactccagtgcatcctaccacaccacccctacagcaggcatgttatctcgttctcacccacctcattcctcccaccccacttcggttgttgttgggaatggttccactctgccgatcacctcggtaggtgcctcggttctccccggaccgttctacctgaacgacattctcgttgcccctcacatcactcacaatctcttttctgttcgtcggttctgaaagtcgcctagaggggggtgaataggcgaaacctgtagattaaaattttatcccccaactagatcctttgattagtggttagaacaagaaatatgattatcggagtataagaactaagtcatttgcttgtaaccaaagttgctttgaaataatgcggaattgataaacaatacaattactagatatatggatagaaaagcaagaagacttagatgagaagaacaataagtcaagtttctttcttgcgaagtgttgcttcactaaatgagaatttgacttgaagcaacaccaaaagatattgacaaagaatagcgcaagaaaacttagagaagggaaaacaaacaaatcacaagcaataaacacaatggacac

SEQ ID NO: 46607 - DNA, 184 bp, Zea Mays
ctaaactcaattgagtagctctcaattgctcgctctctcttttgtggcacttgtgttggttgtagtgggctagatcttgtgtataggatggatcaatgaatatagatggttgtgagggcttgagtatgtcaactagatgacttggaatgttgcttggactccccctcattgaagtggccggttg

SEQ ID NO: 46608 - DNA, 923 bp, Zea Mays
cttttattggttttgtgttgaatctttggcacctgtagaacatgtaatctagagcaaactagttagtccaattgtttgtgttggacattcaaccaccaaaatcatttaggaaaaggtttaaagcctatttccctttcaggttcaccaccgacaattcctgttccattgagtttgacccttctggtttttctgtgaaggatctggccaccaggacccctctcgtccgatgtgacagcaccgagccactctacacgcttcgcccttcatccaccagcgcgtccccacctcccgtcctggtctctgccaccacctccaccacttggcatcgtcgtctcggccacccaggacctgacgtcatgaccaagctttccagtagtctagattcttctcatagtaggggacattttgagggcctctgtcatgcttgtcagttaagtcgacatacttgtctcccgtttcctacttcgtcttctcgggctgagcaggcttttgacttggttcattgtgatctttggaccacccctgtaatcagtttttctggatacaaatactatttggtgattttggacgattattcccattttctttggacttttccctgtgattgaagtctgacactttcaccactcacacacttctttgcctgggtatccacccaattccgccgcccggtttgtgccctccaatgcgacaacggccgtgtgttcgacaaccacgcctcccggtgcttctttctcaccaatggcgtccagttacgtctctcgtgcccctacacctctgctcagaacgaccgggccgagcgcatgattcgaaccaccactaatatgatctgcttccttctctttcaggcgtctcctgccagctactgggtagaggccctgcacaccgccacccacctcctcaaccgccttccttcgaaggcg

SEQ ID NO: 46609 - DNA, 369 bp, Zea Mays
caagtggctctttcgccacaagctgacctcggctggctccctcgaccgctacaaggcccgctgggttcttcggggcttcacccagcgccccggagtggactacgacgagaccttcagcccctcgtcaagtttgccatcggtcgcgccgtcctctccctcgccctctcctgggactgggcgatccatcagctctacgtcaagaatgccttcctccatggcactctgacggaaactgtctactgtagccagcccaccggcttcgtcgacgccgctcacccggatctggtatgtcggctgaaccgctccctctacagcctcagcaggcggcgcgggcctggtacagccgcttcgcctcctacttagcctcca

SEQ ID NO: 46610 - DNA, 65 bp, Zea Mays
ctccctctccccattgatggactccattcatggtgcttgaagacgccgccgccccctgattccgc

SEQ ID NO: 46611 - DNA, 429 bp, Zea Mays
ccggtgtcgaggcagcgacaaggcctaggcgcgctcggcggctggctggagagaggaggtgggagcaggggcgaccagggaggagccagggaagtggtggctagggttagcaggagagtggcggccggcttcctgggcctaatgggccgattcggctcggtagattaggattaggttttgttttttttcttttttttttcttttttctaatttcgaaaatacctattaaataatcataaaattcataataatcaaactaaaattataaatttataaataaaatattaattcttggactaatattatattatttatgtgaattttcctttaagaagaaatgatattcaatattcaacatcaatcacgagcattcaaaaaatcattctaaaggcaaataaataatgaacacttaagagaaaattaattacc

SEQ ID NO: 46612 - DNA, 192 bp, Zea Mays
ggaggagccagggaagtggcggctagggttagcaggagagtggcggccggcttcctgggcctaatgggccgattcggctgggtagattaggattaggttttgtttttttttttattttttttccttttttctaatttcgaaaatacctattaaataatcataaaattcataataatcaaactaaaattataa

SEQ ID NO: 46613 - DNA, 1146 bp, Zea Mays
ctctaggacacgacggtgcccactccgcgccggcggcacgccggtgaaccacgttcccgcgcccaaggacactaccctcgagcccgacagcgtcaacgcgatgtggaattgatggcgaaaacatgggtggatgacttaccggcagtgacacagtagaaactcccggtcacggaacagggctacccacgatggagttcggtcgacggcgagaaatcgcccacggtccgcgggtcccgccttccaattgcggtcacggacgacttcccgaggcgttggcgaccctcctcggccacaccccgagaacggaaacctagtatcgatgagaaccaccgacgacgacccaaattactccttgaccgccctccctctctcaccacaacgacgttttcagcaagatgcggatggagaagtggacgatggtcttactacggtggctggattcttatgtagggtgaaggaaaagggggaaaggaaatggattgcgaccgagctccacagctctggctgttgcgcgaggttgttacagccacgcaagctgacagatgggtcccatgtgtaagcgtctaagcgcggtagccgactgagtcgtgggaccaggttgtcggcgtagtggcgtggtgcgtggcacgcttaagcgcggctgatgggtggggccgcatgtcggcaccaacagcttgagtggggaggagaactcgcacgacgccactgactggtgggtccgataggtcagctagacacagccatgcctgggccgagggcaagctggcggcagggttggagtgggccggtctggccaattcggcccaagtgcgcgtttttctttttctttttcttttatgttttcttttctttttatttttagatctcaaatttgaattcaaattttgttgtgagtttcacacttagattatatgaacaaataaaaataccagcatgaagaagtattttcattattatatacattctttctagttattaaggaatgtattaacttgtatgtgtgtgtatatatatgcatgtgtcacatagaaagaaaaaatttccataaacatcaaatactctaacacctttatttactatgatttgggtattacagtttcagatgatgcgagatgatgaatgatgagatgctatgcagcatgatgc

SEQ ID NO: 46614 - DNA, 288 bp, Zea Mays
ggacttttggcctgtacttgtaacaaagtgatattgtgctccaaatttattttgctatcacatatgtttttcctatttattggaattcagagaggtggaaccaggtggagaacatgctttgtctcctgtaatttctttacttagggctggtttggtgatcaggtaaatggatgggatccatgggaggaattcccttctatttaaaattgaataacaagaggattcctctcctatggattccttcaattccctggtcaccaaatcagcccttagtgttcttgctcccaa

SEQ ID NO: 46615 - DNA, 1050 bp, Zea Mays
gaatggctgtcccaacgcgaggtaatcctacgcgtcatcaagcacaacctgttgagggccaagcaacgcatgaaacatcaagctgacaagggttgttcagagagagaatttgcagtgggcgacctcgtgttcgtcaagctacagccgtatgttcaaggatcggttgcgcttcgtgcttgccataaactcagcttcaagttctttggtccttttgagatcctgcagcgtgtgggtctagtcgcttataagctgaagctcccagaagattcaaatatccatcctgtattccatgtttctcaattgaaaaagtacaccagtccatcaacaccggttagtgctcatgtccctacaaccgacctggctctgcaatttccagcgcagattctagaccgtcgctcagtctctagagggggatcatcagtggcacaggtgcttgttcgttggtctggcatggacacatctctggcgtcctgggaagatgaagccccgctgaggatgaagtttccgaccgcggccgcttaggggcaagcgtcgtttcaaggagggggatgtcagcccctgtactcaggataccagtgagcacgagcaagacatgcagaatgggcgagcgacaagggagatgggccgctgcgctaggaggctcagcgttcgctttgccggcccagagtgccgtagttaactgtagctttcttatatgctgtaaggaaggagagttgaaacttgtcatgtaaaaaacatctatccgaataccctaatctatctcgggggaacgttcccagttcctccgtatccctctctccctcttctccagttcgtgtgtgttcctgttaggagactggttgctaacagcgacaggggagcttcgcgcgcagacagccggagaagcaaggagatgggacggcgcgcaggggaggagagaggtccgcgcgacagatagaagcgcgcggagggaggagcgcgccatggcagggaccaggggcgcggcgagctgcgcgacggcagaaacgctgggctggagaagacatcgcgagggagagagagaggatgaga

SEQ ID NO: 46616 - DNA, 303 bp, Zea Mays
ctattgtcgagcaccaaaaaaacattattgtaattgttcgtcaatctttggttatgtctctactatattaaagcaccagttttgacgatcatcccgcgttatatttttacaaataaccattttctattgtttgaaatgaccaacaagacacattttcttcacatcgatcacatctaatccaattcgtctatccactccccgtcctcagcgaatccatgccttgcacggggcgcgagcatctgagtcacccacacaatgacacaaacccacgcatgttatgtctttcgttcgtagcaacgaacg

SEQ ID NO: 46617 - DNA, 276 bp, Zea Mays
cgaatattttgtgaacagggtgccagaacacgccctagtgcgagcaagtaaaacgttctttttttcctgaagagcttttaatcttagctaattatttcgctgttagggtatagtggtcaccctaaacaacacgaaagcaagtgcgccatgctgtttaaaggtgtttttcgacttaagccgatcgcctggctggtagggcatagtggtcgccctaggtcgagtaagcgcgaacatgccacactgacttaagtcgtcgccgacttaagtcgattgctc

SEQ ID NO: 46618 - DNA, 303 bp, Zea Mays
ccttcttccacccgctcaactactaacgcggttctaaccacgtgagtcgtgcgggatatatatagcaacagatcttccgtctactgatttggggcagctcggcgtggcggcttgagtaccggtgtagtcaggaacttttcaatgcctctagagcttcctgtgcctctgtggttcactgaaacttgtccacctttttgagcaacttgcagaatggcatgcctttctcgtctagccttgatatgaatctgcttagggctaccatgcatccagtaagcctctgtaccttgttctgcgattgtggcg

SEQ ID NO: 46619 - DNA, 649 bp, Zea Mays
aagattaatgggactgcaatacaaaattgtctataagcaaggtaaagagaatattgctgctgatgctttgtctagagttgggcatttgatggcactgcagactttgactaaagtgaagcctttgtgggtacaagaggtgcttaactcttatgtgactgatgatgaagctcagagattattagctgagttagtccttcatagtcccaatgaacaagggttttcagtgcagaaaggtgtgattagaaaagggaaccagatttgggttgctcagaactcagctctcagaacaaagattattgctgcactacatgacagtatagtgggaggccattctggcagcttggcaacctatcacagggtgaagaggttgttttggtggaaagggttgaaaactgatgtcaaattgtttgtgcagcagtgtttagtatgtcaacatgctaaatctgaaagagttctttcaccaggattgctacaacctttacctattcctcagggtgcatggcaagacttgactatggacttcattgaaggccttccaaagtcggaagggtgtgatactattttggtggtggttgatagatactctaagtatgcacacttctttgctttgagacaccctttctcggcagcaactgtggcacaagtgttt

SEQ ID NO: 46620 - DNA, 160 bp, Zea Mays
ctcctcctctctcaattcttgcatccaccaaaccctagccgccccccctctcaatcccctcctcccaaggtgccaatccttgccgctcggatcatcgttgtcgtggtgcgagtcttcaatcgttttggtggagggaagaagggaggaaggaaagggggag

SEQ ID NO: 46621 - DNA, 523 bp, Zea Mays
accacattcattgaatttttttgacctagtgaatgcattctaggtatatcaaacaagataatgcaaatgcttatgatgacatgtcagagttttagttaatgtaacaccaggggtgttacagtcttcccccctaaaaagaaatctcgtcccgagatttaaaagtctaggcttagtaatggaaaaggaaacgtgtcactgacttatttcctaatttctcttacaaggtaggggaggtgttctgtttcacttaaccacgatgttgttcaacacctctaaggcagttacctgagctccttcccaaggagccattcctttagcatggaacatccaatgtggccaagatggttttctagcacgttctggaatacgcactactactcataccatggttgtcctctaagaatagtgcgtgacagcatttctctaaggggaaatcttttattagcatagttcttagaaagatgcatgtataattacagaatcaaccttagttgattcaaccttctatacattgcactctttc

SEQ ID NO: 46622 - DNA, 238 bp, Zea Mays
tgtccatctatatctgttctccaactttgctatagaaactatagtctaaaactactcatattgatcacaaaacagctccaaattaagcatcatatactgaaattcaggtttcagagactgaacccaaagcagttggaaccagcctgacagtccaattttgagccacttttactcctttttctgtgtagcaccaaaccaaactcacttaaagaaatttgttctcctatatatggtcttc

SEQ ID NO: 46623 - DNA, 2304 bp, Zea Mays
acacttctaacattcgtatataaaatttcgacagcatctcctttgaaaattgcataaacggggaagcaacaaagtataaatagatatcatgataagaaaacataatcgacattaataatctgctagcaatgggaagacaaccataacagcatgaactaaattaaccagtgcacacaactagttagaaacaaacatcctttgacaagaagcttctaattaaatcatgactgcgcctaagcagcgttattatgagagtgaaggtggatgtgctgctacttcccacttccctggatgagcaacaagcacctgcatagagtaatgcaagagtgagatcaaacatctcagcaagcgaattgttttgacgagatatttaaaccacaaattgaattaatcaacattttaaaagaatcacaattaagatcagaaatacttgtagatatagaactcagtagtcccaatataaccaataccatctcatttcctcgaacaaccacaataggttctataacacttccctacgtcaacaaaacctgcaaatatcacttcaatgtatgcataggagtgcaaagtgtaggtactctgtcttcatacctctgagggtataaaaccacatcatctgcaaatatcacttcaatgaatgcatatgaatgcaatgcatatgtcctctgccttcatacctctaagggtatgaagccgcatcgtacccctcctcgggcaacgtacgatgctaagttgtaccggtacggtcggaccataggtcacgacccaacttcatatgcaagtgaatcatgcaatgtatatggcatgctgcatttatcaatatacttcacttccttcacatacaatacaaccacaaataatacttcttttaccttcaaatacaataccaacctcaaataatacttcatttaccttcagatacaataccaacctcaaataatacttcatttaccttcaggggtgtgaattaatctcatgagtcatactcgaatcataatcatcatcaatatatgattgagcatcagtataatgcaagcaagtaaagcatcaccatagagtccaattatgaaagaatccaatacttctgaatattagagtgtaggcaatagaaataataggtcagaccggaagcaaccaccgctatattcacttgccttcatcgaagaagaaaaatgtattaggcatgatctggagtgtagccacctgctagtgggcataaaacttagtacaaatatttcacaaacatttgccaacgatcaacaaaacactcctacactagaaaccaagacccagtggaaagactcccaccctgaaccacatgccatacagcagcaacaatgtttgttaattttgtatctttaaaattaaaacagtggtgatatcaaaaaaatactctaggagtatctacacaaaacactctacaacttcggtattcaatggataattaaattctgccatcaataagttctaaaaaatctgacaagataactgactgaatctgttttagacagcagcctagttaacttcaaaattcgatatctcccaaactactgaaccaataattatgaaattctgctgacagtaagaacttttagccctctacaaaagtctccatagttggaagagccaattcggccatttactaggtgaaacccaccagtgaacagacccgctcatttttgtcaggcaaacagcaatagccacagtaaaacaaacataactggagtttcataaatcatatgaatgaactctttaacaatctggaaagcttatgaaattatctacaacttcttttaccaacccacagtttaattctgttgataaaattgcctaactcttaagagaacagattctgcacagaattatgagactaaaaaactgctataatcaaactgcaataactttctgttctgatgtccgattgaggtgttcttcacggccacggaaagatctacaaattatctacgactcatatatagactttttatttttttgaggccactaagaccacggaaaactggcatgaacagaaactgttgaatctgccattctgcagaaattaaattcgagatcaaaacctaaccccacatctaatccaacctctaatccttcaatccacatgatccacaacctccaaaagcacataattatagggaggaacaaggatcccatccttacctagggtttcttcaagaaaatctgcaagagatgggggtagaacatctccttgatcctctcttcctcttcaatccatcttgctcctcctcttctcgatccttgctgcgtggggggagatctagaggg

SEQ ID NO: 46624 - DNA, 180 bp, Zea Mays
ctcgaattcgaccactccaagcaaaacacccaaggtaccccatatagcaccaccgttcgaaacatgggtccattattgttcttaattaacacaagaacttctaccttggactaattgtctaaggaaactacacaacctgacatcaagcatgaaccaacatgtaatgaagctcaaatcaag

SEQ ID NO: 46625 - DNA, 433 bp, Zea Mays
caacttcatatgcaagtgaatcatgcaatgtatatggcatgctgcatttatcaatatacttcacttccttcacatacaatacaacctcaaataatacttcttttaccttcagatacaataccaacctcaaataatacttcatttaccttcagatacaataccaacctcaaataatacttcatttaccttcaggggtgtgaattaatctcatgagtcatactcgaatcataatcatcatcaatatatgattgagcatcaatataatgcaagaaagtaaagcatcaccatagagtccaattatgaaagaatccaatacttctgaatattagagtgtaggcaatagaaataataggtcagaccggaagcaaccaccgctacattcacttgccttcatcgaagaagaaaaatgtactaggcatgatctggagtgtag

SEQ ID NO: 46626 - DNA, 391 bp, Zea Mays
agcacataattatagggaggaacaaggatcccatccttacctagggtttcctcaagaaaatctgcaagagatgggggtagaacatctccttgatcctctcttccttttcaatccatcttgctcctcctcttctcgatccttgctgcgtggggggagatctagagggaggaggaagcagtggagggcggctgcaaggggaagggggaggggcggccaagggtggggaaaaggggggtttggcggccaagaaaagggaaaaagggagggggcgaccactagggttttgtgggagaaagaaacgacgcctcagatgtctcctgactttgcatccaacggcccacaactctttccctcatccacgcaccgaagatcaacttttggtcaatatttt

SEQ ID NO: 46627 - DNA, 200 bp, Zea Mays
cttttattttcttttattttcttttattttcttcattctccattatttcacaaattcaaatttaaatactaatttaaattcaaacttgtgactagttcattctcaaaccatatttgtgcaattaaaagtattaggtttgaggatatttattcaaatatattattcatgttttcatattccttctcttttctagattcaag

SEQ ID NO: 46628 - DNA, 454 bp, Zea Mays
gcgactgatttattttcttctgcgcctaatcttctcggatcttggcgtagacgaggatgacaatcgacgacttgttcgagcctttgtcgagcgtctggtgaatatcaccaggctagcttcgtcttcacctgattcttaggatttcttgaggatgcacgaacgacgacgaccttcgattaaattctttgaccgagcacttgataagcgatgcacacggacctcgcttatttttggcctaacgtccgggattcggggttcgacgaggtcgagcacggaaggacgaggttcgacgggcttgacgacgatacgggagggtgacatatatagagctgcatagatccggggctgctgcacacacgacgcgacgacgaacgatgacaaccggcgaggtcgacgacgcgatggggattaaggccgagcgagccgagaggcgcgctggtgagcaggaaaccgc

SEQ ID NO: 46629 - DNA, 344 bp, Zea Mays
ggaaaagaaatcggagccgcgcgcggaacagaaatgggctgagggaagtccggcggggttgaggtagtgggccgcaattaggtattttggcccaggtaggggtttttctccttttcttttctttttcttttctttttttgttttcttttctctgaatttcaaatttgaatctatatatgtatttgaatttcaccctagagcccaatgtacaaattcaactcaaatttgcaagaatattatgtatttatttatatatgttttttgtatataatgttttctttcctcccctcttttcttgattacctctcattctcaaatattcaagcgagtcattaactctcaaa

SEQ ID NO: 46630 - DNA, 308 bp, Zea Mays
gagggaaacctggcataggcaagtactgaggagtcccaggcatataaaacttctgcttagggggcggttgagagcacctagagggggggggtgaatagatgatcctgtaaaatcaaacactaaatagccacaaacttgattataaaggtgttagtgcgagttaatcaagttgttatgaagcgagctcttgcgaacacaaacaatcacagagaagagcagcacaagagacacgatgttttatcccgtggttcggccaagtataacacttgcctacttccacattgtggcgtcccaatggacgagggttg

SEQ ID NO: 46631 - DNA, 211 bp, Zea Mays
ggagagggagagagtagcaggcggcggcttctgctggcgtgcgcggctgtagtctagggtttggggtattgggcccctagtgggttggctaggttaggggtttttttcttttttttttctaattccgaaatacatttttaaagagctcaaaaattcataaaaattacaccaaaactatttataaataaaatacttgtttttagactaataa

SEQ ID NO: 46632 - DNA, 1055 bp, Zea Mays
aatatttgtactaagttttatgcacactagcaggtggctacactccagatcatgtctagtacatttcttcttcttcgatgaaggcaagtgaatgtagcggtggttgcttccattctgacctgttatttctattgcctacactctaatattcagaagtattggattctttcataattggactctatggtgatgctttacttgcttgcattatactgatgctcaatcatatattgatgatgattatgatttgagtatgactcatgagattaattcacacccctgaaggtaaatgaagtattatttgaggttggtattgtatctgaaggtaaatgaagtattatttgaggtttgtgttgtatctgaaggaagtgaagtttattgataaatgtagcatgccatatacattgcatgactcatttgcatatgaagttttgtcgtgacctatggtccgaccgtaccggtacaacttagcatcgtacgttgcccgagaaggggtacgatgcggcttcatacccttagaggtatgaaggcagaggacatatgcattgcattcatatgcattcattgaagtgatatttgcagatgatgtggttttatacccccagaggtatgaagatagagtacctacacattgcattcctatgcatacattgaagtgatatttgcaggtattgttgaggcagggaagtgttatataacctattgtggttgttcgaggaaatgagatggtattggttatagtgggactactgagttctatatctacaagcatttctgattttgaattgtgactcttttaaaatgttgatgaattcaatttgtgttttaaatatctcgtcagaacaattagcttgctgagatgtttcatctcactcttgcattactcaatgcaggtgcttgttgctcatcaaggggagtgggaagtagcagcacatccaccttcattctcataataatgcttcccagacgcagccatgatttaattagaaacttcttgtcaaaggatgtttgtttttaactagtcgtgcgcactgattaattcagttcatgttgtt

SEQ ID NO: 46633 - DNA, 1110 bp, Zea Mays
gtcaaatttgatgggatccaataggttaccctagtttggctatcgttataccttatttaccactgaatttttgggtagtacctaatattgctttacgtggttttgggtatggagatacacattattcatgatcatacttttattatcagtttgttatttactgttcatgataagatcattatgttaattggaacatggagcgaccacccgggaaaacggtgttaccacaaggatggtatgggacgcccttggctgactaattaggaaatctagtggaggactaccttacccgaaaggggcaagggcagtaggggagtgtcagtgtaggaaggtccttgcgttgattttgctgtggtggcggtcaggcgagggatccctgcattggagcttcctagaaactgtagcgggttttctgaagctagtggaactttgtaaaggtctcgtagtgttaccctgcctcgcttccttggtagaggtgtatgggggtcgtgatcccttggcagatgggtaacatgacttgtaggtaaagatgtgcaacctctgtagagtgtaaaactggtatatcagtcgtgctcacggtcatgagcggctcagaccctcacatgattaatttatggaattaaattcaatttgtcatttgcatcgtattgggatttattatcaatttttatctattattactcttgtttggtatttacttacatttagtaactgctaataaaacttgaccacttattaaaagcaatgctcagctttaaccattatttgttgatcagccttacacttcacatgagctcacaccttgttgagttcatgcacattattccccacaacttgtgagctatgatcttttgtgagcacactcttgcgatatatatagcccccacaggtgaagagcaggttgtccaagagaagccctacaatgaggaatacgaattgatctaggtggtgtctcccagtcagcttgatggcgccaaggaatagtatttagttcattttatggttatcatttatttttgtaagacttccgcaatgtaataatgatacctgtgacatttatctctatacactgtcattatatgtgatgttcttcttttgcgcacatatgag

SEQ ID NO: 46634 - DNA, 1046 bp, Zea Mays
ttaatgttgaatattgttgaacctgtgataaaattatgttgggttcgatacatttgttatgctggtacttatttttgcgattcaaatgatcatgtctatcataatgctaatgggtatgggtacccgatgggtacccgctacccatggtgggtatgggtatggcataattttgtacccatgatgggtagtgggtatgggtatgggtaaatttttcctagtgggtatgggtatggcttcgtatgcccactgggtaccttacccactgccatccctaggcgaaacccacttctgataatggcaggttttgcaaatttctcctctctcgataagaatattaaggtggccataaaatgctttgctgttcgctcctcttggtagaagtgagctccctcctccctctgcgccgatgcaaccaaaccctcctcctcgcaccgcgccgcatgcctccgcacgcgacgaggcgacaatgctatagctgaccaccccacttgatctgtcaggggagagagatacagatagacagacggacggatgacatgcatgggtggtttcatgtccaccatcgccacacgctttgcattcttcccatccacgcctctgtccttcaccgtcgtggtcgtcgacgcttcgacacacaacctcgccatccctgagatctctcaagccgtcctacactatcctagtcgtcgacgccgcgataggccgcctcgccatcttggagatcttccgagccacctcgcaccacggaggcgtgatgcacactgtccccacatcccaaccatcgccaacatgccaacttcatagagctgtggtgttcatggaggaggcggcaacgtctttcttataggccgggtgatccttgcgcgagggagtgcggctcgagcaggggtcgttgcactccttgagtgagggggatgctcgagtggggggtcgttgcgctccttgtgcgaggggagaggctcgagcgaatggctcctgcggttgcgatgccgaggggagggcagcggaagaagcgacaggacgaccgctgggtgggttgggggtgg

SEQ ID NO: 46635 - DNA, 407 bp, Zea Mays
agttaataaatggtgaccatactcattttaaaactataaaatcatacacatattaaagcgttgtcgtggggttcgatttcggttacacgtatatatcgaatctctaagatcatacacatgaatcgtcaaatcacatcaactcaatattacaacaataattcacaataaattcaaaacatgatttaaaaaataaatattccggggttatcttcaaccttgtgttttcgttcctgcgcagggatgagcgtcgacgagcaggaagggttcaacgggcaggggaacgggcgcgatcgtcgtactgcgcggatggaactccggcgaggttccacggacagcggggcggacggcgacgggcgtagacgaactccggcgacggtgtgggcaagtgggagagagagagagaggga

SEQ ID NO: 46636 - DNA, 476 bp, Zea Mays
aaacgaatgtcacaactttaccatataaaaggagttttgtacaaaataaataaataattacatcgaacggagacaacgatctagcaacccaaagttgattgggagacgacgacctagacatctcacgaacacattgcagcatcctccatgcgcctcatcccgtggtacctgttcttgacctgtggggggtgtgagacagcaagggcgagctcacatatgttcatcgctcaacaagttgtggggaataatgtgcatgaactcaccaaaggtaggagttcatgtgatgtgtaaggctgatcaatgataggggttgaagctgagcattgcttttaataagttggtcaaattttattagcagttactaaatgtaagtaaataccaaaccataatgataatagaacaaaattaataataaatccatgcaatgcaaatgacaaattgaatttagttccataatttaatcatgcgagtgtcct

SEQ ID NO: 46637 - DNA, 357 bp, Zea Mays
cccctactgcccttgcccctattgggtaaggtagtcctccactagctttcctagttagtcagccaagggcgtcccattccacccttgtggtgcacgtgtttctcaagttaagctccacgttctaattaaaaataatgatcttgacatgaacataaataaaataacataataattggaacatggacataatgtaatattaatcccaaaaccatatagagcaatagcaacactacccaaatgattcaggggtaaacaatgtaaaaggataaccagtctagggtgacctattgggtcccatcacaattaaacctatgcaggaataaatgattataaagaacattattgggtaaataaaag

SEQ ID NO: 46638 - DNA, 337 bp, Zea Mays
ctcgaaccggacctatttttttcaaatcgcacaacattaaaacttggtgtgtttacttcttatgtgctgctagaaaagagaaaaatataaaaaatatttgaaaaagaaaaatcacaaaaatagcaaaaatcacgaaaaagagaaaaaaatgaagaaaacagaaaaatgagtagcacataaggagaaacaccatggttttgtgcacctccgtgattaatttgcttccaacttgtttctttgctatatctacatacttgtgcctctttcttgtgccttggtcccactgttctaatacattttctaggccagcaactaggacgagtacttggaacactta

SEQ ID NO: 46639 - DNA, 738 bp, Zea Mays
gtcaggtgaaggtaactatcgatttggtggagatgcacacagacgatccggcttccaatcaacacgactagaaccccgcaatcgcagcaccacttctcctctggttatcaactgtgcactgcgcgattgacctcgccacgagggctaattcctgcctaagaatcgaagacacaagcaagaacaagaaagaacacaatctagaatattgcggatgaatgattaagctcacaagttggggtctcataaaccgatctacgtcgactgttcttgatagatctaacttaagcaaaatcctcccctaatgtggtggcggctactgattatataagggttaggagcgtgactccctccctggatgcgccctaatgggcccaacaaagatacacagcccaaaggccaattacggtgtcgcagcaccgagatagattacggacgtcggtttggtcctccaccttgtttcgaacgtccttgctggccttccacgcctccaagtccttcaccatgtccttgctggtcctttccttcattcctaagtacaattaattcattaggtagcacactattctcaaattcacaagaataagtacataggaacgagctcacctgcaaattcaattgtcttgcgcgtgcgcgagtaatcggaccttgaacatcaactaggggagtgttgtttgtatccatggtagtgatgtcctcatcatcctccccctcttgaagtggagtcatcctcgactcaag

SEQ ID NO: 46640 - DNA, 328 bp, Zea Mays
ttcttctctccctaaggttatgcggatccacggcgtgcaggaactccggtgtgtaattgcggcttctaggtgacgaatcgctccgggcgtgtgtgtgagagtcattaagggggtgcaatgaccagcaccagtcgttcaccgaggtccgcccgatgcagtgcccgtgaagcgacgtcggtggcgatgcacacattctagccaattggcggtgggagctaagccttgtgaccgagttgagcccgcgaggtatacgagggggaaggagagggtgcaacttatgtcgaaggagaaggtcggccagggtcccttaacggccacagagattcac

SEQ ID NO: 46641 - DNA, 628 bp, Zea Mays
ctctagaagtagaaaaatgtcaaaaactatctagtgagctaagcacttgccatgacaccattgtcaaccttagaaatgaaaatgctagtttaattgctaaggttgagtctcatgtttgtgatgcttcaattcccaatcttagaaatgataatgatgacttgcttgctaagattaaggaattgaatgattctcttgctagccttagagtagaaaatgaaaatttgattgctaaggctaaagattttgatgtttgcaattctattatttccgaccttagaactaagaatgatatgttacatgctaaggttgttgaattaaaatcttgcaaaccctctacatctaatgttgagcatgtttgtatttgtactagatgtagagatgttgatatcaatgctattcatgatcacatgtctttaattaaacaacaaaatgatcatatagcattattagatgcaaaaattgccgagcataacttggaaaatgaaaagtttaaatttgctagaagtatgctctataatgggagatgcccgggcatcaaggatggcattggcttccaaagggaagacaatgtcaaacttaatgcccctcctaaaaatttgtctaactttgttaagggcaaagctcccat

SEQ ID NO: 46642 - DNA, 370 bp, Zea Mays
gtgagacatctagttctaggcaaccaacccgtgctaagtttcctaagaagaagactcctaatgcatcaaatgatcatgacatttcatttaaaacttttgatgcatcttatgttttgactaataaacccggcttgttgggggcaaacacaagggctccaagacttgtgtttgggtacccaaagttcttgtgtctaatgccaaaggacccaaaaccgtttgggtacctaaattcaagaactaaaattgttttgtaggtttatgcatccgggggcacaagttggatcatcgatagcggatgcacaaaccacatgaccggggagaagaagatgttctcctcatatgagaaaaaccaagatccccaaagagcaat

SEQ ID NO: 46643 - DNA, 767 bp, Zea Mays
ctcctgaccattccatttcaaatgtttttcttgttgattcattagattacaatttgctttctgtttcccaattatgtcaaatgggctacaactgtctattcactgatgtaggtgtcactgtctttagaagaagtaatgattcaatagcatttaagggtgtgttagagggtcagcaatacttggtagattttgataaagctgaacttgacacatgcttaattgctaagactaacatgggttggctctggcatcgccgactagcccacgttgggatgaagaatcttcataagcttctaaagggggagcatattttgggactaacaaatgttcattttgagaaagacaggatctgtagcgcatgccaagctggaaagcaagttgggtcacatcatccacacaagaacatcatgacgagtgataggccactggagctcctacacatggacttatttggcccgattgcttacataagcatcggcgggagtaagtactgtctagtaattgtggatgattattctcgcttcacttgggtgttctttttgcaggacaaatctcatacccaagaaaccttaaagggattcttgagacgggctcaaaatgagttcggcttaaggatcaagaaaattagaagtgacaatgggacggagttcaagaactctcaaattgaaggccttcttgaggaggagggcatcaagcatgagttctcttctccatacaccccacaacaaaatggagtagtggagaggaagaatcgaactctattggac

SEQ ID NO: 46644 - DNA, 430 bp, Zea Mays
ctcaagaagacatcatatgaactcctaaccggtaaaaagcccaatatttcatattttagagtttttggtagcaaatgctttattcttgttaaacgaggtagaaaatccaaatttgctcctaaaactgtagaaggctttttacttggttatgactcaaacacaagggcatatagggtctttaacaagtccactggactagttgaagtctcatgtgacgttgtgttcgatgagactaacggctctcaagtagagcaagttgatcttgatgaaataggtattgaagaggctccatgcatcgcgctaaggaacatgtccattggggatgtgtttcctaaggaatccgaagagcctccaaatgcacaagatcaaccatcctcctccacgcaagcatctccaccgactcaaaatgaggatgaagctcaagttgatg

SEQ ID NO: 46645 - DNA, 1337 bp, Zea Mays
aagagggcaccttcattagccaaacaaagtatactcaagacattctaagcaagtttggaatgaaggatgccaagcccatcaagactcccatgggaacaaatgggcatctcgacctcgacacgggaggtaagtccgtggatcaaaaggtataccggtcaatgattggttcattgctttatttatgtgcatctcgaccggacattatgcttttcgtttgcatgtgtgcaagattccaagctgaccctaaggaatcacaccttacggccgtaaaacgaatcttgagatatttggcttatactcctaagtttgggctttggtaccctaggggatccacttttgatttaattggttattcggatgccgattgggcggggtgtaagatcaataggacgagcacatcggggacttgccagttcttgggaagatccttggtgtcttgggcttcaaagaagcaaaattcggtcgctttttccaccgccgaagccgaatacattgccgcaggacattgttgcgcgcaattgctttggatgaggcaaaccctgcgggactacggttacaaattaaccaaagtccctttgctatgtgataatgagagtgcaatcaagatggcggataatcctgtcgagcatagccgcactaaacacatagccattcggtatcattttcttagggatcaccaacaaaagggagatatcgagatttcatacattaacactaaagatcaattagccgatatcttttaccaagcctcttgatgaacaatcttttaacaaacttaggcatgagctcaatattcttgattataggaatttcttttgttgacttgcacacatagctcatttatgtacctttgatcatgtctctttcatatgctatgactaatatgtttttcaagtctatttcaaaccaagtcataggtgtattgaaagggaattggagtcttcggcgaagacaaaggcttccactccgtaactcatccttcgccgccgctccaagagactctccatctttgtgggagagagcaaaaggacttcgtctttggtataatcttaactcatttatttatgaccaaaggggaagatagcacttcaagggctctaatgattccgtttttggcgattcatgccaaagggggagaaagtatgagcccaaagcaaaaggaccgcaccaccacctatttcaaaaacttcgtgttttccaagaatattatcaattggtatcctattgtgttcaaaagggggagaaagtagtatttcaaaaatgatatatcaaaaccctcttgaacactaagaggagtatctcatttagggggagctttgtttagtcaaaggaaaagc

SEQ ID NO: 46646 - DNA, 727 bp, Zea Mays
ctagtccctaattaattttgatggttgaattgcccaacacaaataattggactaactagtttgttctagtgtataagttatacaagtgcaaaaggttcacacttagccaataaaaagaccaagagttggattcaacaaaagagcaaaggggtcaaccgaaggcacctctggtctggcgcaccggactgtccggtgtgccaccggacaatgtccggtgcaccaccggacatgtccggtgcaccagaggactccaacgcaaactcgccaccttcgggaatttccagaggcaactccgctataattcaccggactgtccggtgtacaccggacagtgtccggtgcgccaaggaagagcggcctcaggaactcgccggcttcaggaacctccaacggctagtccgctataattcaccggacatgtccggtgtgcaccggactgtccggtgcaaccccggggcaacggctattcggcgccaacggctacctgcagcacatttaatgcgcgcgcagcgcgcgcagaagtcaggcgcgcccatactggcgcaccggacaatgaacaggagatgtccggtgtgcaccggacatccagaagggcccacaagtcagaagctccaacggtcagaatccaatggcagtgatgacgtggcgggggcaccggacatgtccggtgtgcaccggactgtccggtgcgctatcgaacagacagcctcccaacggccacttttgg

SEQ ID NO: 46647 - DNA, 680 bp, Zea Mays
cgcccgatgacgccacgacgagcttctacacgcactgaagatcgcccttgtctttttctggcctccactcactgttgtggccacgggacaacaccgatgatgacttctctctgagccctgtgtctcacggtgtcgatggcggatgtgcggtggttcgatgggtgatgagggggcgattgggttggctttatacccaagaggcgagggaataccggccacgagaagaatctgcgagaaagtcggcacaagtcagcgagcaacgaggcggcgacatggtttggttatgaatttgttatggagcagatgcggtggggaagggctagctgacgactgggaccttatgtcagcgactttggatttgtgtgagtgggcagcgcccatgaggctgacatagcgcccccataaggcagcatcccaggacagagtcaaggcatggataaggttgggcccacctggcggtctatgcgcaccgagatgcaacatgggaatgcgagagtcctgaccgagcgacagacaacctggccccacctgccagcgctagagcacaaagcgcgcgcgattcggctgagctaggagtcgttggagtccatttgggaggccctggttgccttttgtccattggtgcactatactgtccggtgcaaatcggacagtgaacagtgcgctggcacagaatccgt

SEQ ID NO: 46648 - DNA, 296 bp, Zea Mays
gacagcacctctaccgattcgcaaagataaacacataatccaattgattgcagcacaaaaacaacaaaagttaatcacaaattcaccttaggttcttcccttactccttccttcttcctccctccaaactccaattgagattgcagccacacgacggagaaccacacgggagggctgcaccttgggaggaggggaagaaatggggggggcagctagggttttgggtggtgagggctgcaaatgtttgaggaggaagaagatgggagaggggggggggcgtccaagagaaaggggag

SEQ ID NO: 46649 - DNA, 1170 bp, Zea Mays
ccaggtcttggtttcaggtgtaggagcgatttgttgattgttggcaaaagtttgtgaaatatttgtactaagttttatgtcctctagcaggtggctacactccagatcatgcctagtacatttttcttctttgatgaaggcaagtgaatgtaggggtggttgcttccgttctgacctgttatttctatcgcctacactctagtattcagaattattggattctttcataattggactccatggttttgctttacttgcttgcattatcctgatgctcaatcatatattgatggtgattatgattcgagtacgactcatgagattaattcacacccctgaaggtaaatgaagtattatttgaggtttgtattgtatctgaaggtaaatgaagtattatttgaggtttgtattgcatgtgaaggaagttaagtatattgataaatgcagcatgccacatacattgcatgattcacttgcatctgaagttgggtcgtgacctatggtcctaccgtaccggtacaacttagcatcgtacgttgcccgaggaggggtacgatgcggcttcatacccttagaggtatgaaggcagaggacatatgcattgcattcattgaagtgatatttgcagatgatgtggttttataccctcagaggtatgaagacagagtacctacactttgtgttcctatgcatacattgaagtgatatttgcaggtattgttgacgcagggaagtgttatacaaactattgtggttgttcaaggaaatgagatggtattggttatattgagacttctgagttctatatctacaagtatttctgatcttaattgtgattcttttaaaatgttgattaattcaatttgtggtttaaatatcttgtcaaaacaattcgcttgctgagatgtttcatctcactcttacattactcaatacaggtgcttgttgctcatcaagagaagtgggaagtagcagcacatccaccttcactctcataataacactgcttaggcgcagtcatgatttaattagaaacttcttgtcaaaggatgttgtttctaactagttgtgcgcactggttgatttagttcatgtcgttatggttgtctttccattgctagcagattattaatgtctattatgttttcttatcatgatatctatttatac

SEQ ID NO: 46650 - DNA, 170 bp, Zea Mays
cagctgaaaatctgcccagcacattagaatatattgaaggcgaggttgatgctcttgacgaagttattggtgggcatgccgacttctgcgccctggtagcttctcggggcacagctaccgcttttctgaaggctggttgtacgcatggaaatattgtgaatagaccaaac

SEQ ID NO: 46651 - DNA, 289 bp, Zea Mays
gtctccacgtgcgggcccgatcggtcacagtcacaagcacgcgcacaggcaagtggctggcggcgctagggtaaggcacgacaatgggccagcgcagggagaaaaatggagatgggccagcgcgaggagaattcggcccaaacggcgattttctttttttttttccttttattttctgtttccatttccttttcctttattttttttttcatatttgaattcttaaatttgaatccaaatttgattgcaaactttgaatttgaactagatgtactagtccaagatgtgg

SEQ ID NO: 46652 - DNA, 429 bp, Zea Mays
agacatctgaggcgtcgttcctttctcccacaaaaccctagtggtcgcccccctatttttcccttttcttggccgcccctcccccttccccttgcagccaccctccactacttcctcctccctctagatctccccccgcgcagcaaggatcgagaagaggaggagcaagatggattgaagaggaagagaggatcaaggagatgttctacccccatctcttgcagattttcttggggaaaccctaggtaaggataggatccttgttcctccctataattatatgattttggaggttgtggatcatgtggattgaaggattagaggttggattagatgtggggttaggttttgatctcgaatttaatttctgcagaatggcagattcgacagtttctgttcatgtcagtttttcgtggtcttagtggcctc

SEQ ID NO: 46653 - DNA, 1330 bp, Zea Mays
aaattaacaaacagtgctgctgttgtatagcatgtggttcagggtgagagtctttccactaggtcttggtttcaagtgtaggagtgttttgttgattgttggcaaatgtttgtgaaatatttgtactaagttttatgcccgctagcaggtggctacactctagatcatgcctagtacatttttcttcttcgatgaaggcaagtgaatgtagcggtggttgctatcgttttgacctgttatttctatcacctacactctaatatgcagaattattggattctttcataattgaactctatgatgatgttttacttgattgtattatgttgatgctctatcatatattgatgattattatggttcaagtatgacccatgagattaattcacacccctgaaggcagatgaagtcttatttgaggtttgcattgtatctaaaggcatacgaagtattatttgaggattgcattgtatctgaaggcagataaagtattatttgaggtttgtattgtatctaaaggaagtgaaatttattgataaatgcagcatgccatatacattgcatgacttatttgcatctgaagttttgtcgtgacctatggtccgaccgtaccgatacaacttagcatcgtacgttgcccgaggaggggtacgatgcggcttcatacccttagaggtatgaaggcagaggacatatgcattgcattcatatgcatacattgaagtgatatttgcagatgatgtggttttataccctcagaggtatgaagatagaggacctacacattgcattcctatgcatacattgaagtgatatttgcaggtattgttgatgcagggaagtgttatacaacctattgtggttgttcgaggaaatgagatggtattggttatattgtgactactgagttctatatctacaagtatttctgatcttgattgtgattcttttaaaatgttgattaattcaatgtggtttaaatatctcgtcaaaacaattagcttgctgagatgtttcatctcactcttgcattactcaatgcaggtgcttgttgctcatcaaggggagtgggaagtagcagcacatacaacttcactctcataataacgctgcccaggcgcagtcatgatttaattagaaacttcttgtcaaaggatgtttgtttttaactagttgtgcgcactggttaattcagttcatgtcattatggtcgtcttcccattgctagcagattattaatatctattatgttttcttatcatgatatctatttatactttgttgcttcccgtttatgcaattttcaaagaagacactgtcgaaattttat

SEQ ID NO: 46654 - DNA, 339 bp, Zea Mays
ccacccctttggccgcccccctctcttttcctctcttccacgcttgcagccgccccaattcctctcctcttggctgcagccgcccactccctatcaaaccctagccacccccttccccaatccccctcccaaggtgcagcccctctcctttgggatctaaatcgagtggtgcaagcctctaattggagaattggtggaggaagaacaaagaggtgaaggaataactcaaggtgacttatgtttattttgtatttttgctgcgattacgtttgattaaccgttcccctaagcgaattggtggtagtgctgtcctgattttgggtggcaggcggacagaag

SEQ ID NO: 46655 - DNA, 545 bp, Zea Mays
ctgacatgttatcttccgtagactacttccttgaaatgatttctatgttgtttgttagaatgatcaagctacatatgccatcactgttagatcaaaagagtatataactcagatgtattccttaagtaaagttcttaccagtttagaagctttcatcaaaaatcgaaacctatatgtgtctgatcgtgtgataaaatcacccttttcatgtgaggactcctttgtcttgatcttagtggcaactgcacacatggagccttaagtgttcttctggctgagaccgactctgatggttgacctctctgcttagatggaaagtgatacatgctatacccactagagaaacaatatctggagacactcgcttttgcttggaactagcttatgctatcactattatggacagggttatacgcttctctactcttagaagtctttcgttctgaatctcgggacgagattcttttaaggggggaaggttgtaacaccccaggtgtttatcgtctactcgaccacgagtgcggacgataacacgtgatagctgt

SEQ ID NO: 46656 - DNA, 499 bp, Zea Mays
ggcacacaagtcagtaacagatagcaatgttgaataagtgttccaagtactcgtcctagttgctggcctagaaaatgtaatagaacagttggaccaaggcacaagaaaggaggtacaagtatctaggtgcagcaagaaacatgcttgggctaaaataatcacagaggtgcacagaacaatggtgtttctgtttatgtgctactcttttctttttttttcttttttttgagattttttcaaatatttttttatatttttctcttttgcagcagcacatatgaagaaaacacaccaagtttcagatttttttgtacaatgacgcgtcctctggaatttctacaagtttgccctaaaatcggaataaatgtttggaaaatcagaagtcctatttccaagccgaatttgggaattttaaaaacagcgaatccggcaaagccggaaagaatcggatgcgaaatttaattttgtgcgatttgaaaaaaaatgggctcgattcgag

SEQ ID NO: 46657 - DNA, 307 bp, Zea Mays
gtgtatagagataaatgtcacattaatcagagtatttattacatagcggaagtcttacaaaataaaagataaatataaaaggatctaaatccatccttgacgccagaaagtcaactgggagacgccacctagatcaaatcgaactcctcgttgcgtggctcctcttgaaccacctgttcttctcctgtgggggtgtgagacagcaagggtgagctcacacatgttcatcgttgaacaagttgtggggaataatgtggcatgaactcaccaaaggtgggagttcatgtgatgtgtaaggctaatcaac

SEQ ID NO: 46658 - DNA, 359 bp, Zea Mays
ctcgaatctgcacgccggtgatgaactccaagcggcccagccatgcactaggcggatcgggcgttgactacaggcgctagtggaggaaccgcgtccgcgcgcacgtggtggaggggaacgaggcgggagaacgctacagtggcaggggtgtggctggcgctgttcgctgtctcgcgatgcaaagccagcagcggtgttcctacccttcaccgcctaaccctgcaagcagcggcctataggcacgaactccgccccgtggccctgcccacgcgaaccaccgctctgctatccgcaccggccactgcgcaccttctcctttcctctctctctctctctccacctcggttgcgctggctcgg

SEQ ID NO: 46659 - DNA, 1542 bp, Zea Mays
aagtcaggcacgcgcgaagtggcgcaccggacactctacagtgcatgtccagtgtgccaccggacatctagccgggcccagcagtcagagctccaacggtcggaacccaacggcctggtgacgtggctggcgcaccggacactgtccggtgtgcaccggactgtccggtgcaccatgcgacagacagcctccaccaaacggctagtttggtggttggggttataaatacccccaaccatcctacattcaagtcatccaagttttcctacttcaactacttacaagagctctagcattcaattctagacacactcaagtgatcaaatcctcttcaaattccacacaacgtcttagtgattagtgagagagatttgcttgtgttctttcgagctcttgcgcttggattgctttcttctttgattctttcttgcgatcaactcaattgtaaccaaggcaagaggcaccaattgtgtggtggcccttgcggggaagttttgttcccgtttgattgagaagaagaagctcactcggtccgagggaccgtttgagagagggaaagggttgaaagagacccgatctttgtgaccacctcaacggggagtaggtttgcgagaaccgaacctcgataaaataaatccgtgtgtcacactccttattcgcttgcgatttgttttgcaccctctctcgcgaactcgattataattctaacgctaactcggcttgtagttgtgattaactttgtaaatttcagtttcgccctattcacccccatctaggcgactttcaggatatatgtcccccacagggtgccccccaagcggggtactgtggcatcccaaatggatatggtggcataccccacatttgattcgggacatatggcggtggcatgtatgtatattgatatggcacaggtggatatgggggtggaggtgtccatgcaggtatgttgggtcgtaattggacattatgacccgtcattctttccgattggtgaggtggtccaatcggtcttacctgctgtcgctcttgagtgggtgagcgaggtcgctttgctggctggtcacttgatctgaccttcttttttacatatttagacaataactggttaaaggtcgggccgaatcttaccagtcggccagctgcctttaccgtgttagatttccacatacctatttctgttcgtcgcagtttgaaggtacgtggtcatcgtggttcctgggcgttgccgaaccgtccactggaatggtctggagtttccgacggtgtcccggaccatccgtgtctatgtgtcagactgtctgcgatgcgcaaaataggtgcacacgcctggtcccttgcttgcgcgtgcccctatcgttggaggtggtgatggtaactttcaaagtctcccctccattaggagtcttttccgccaccactttcctgcaaaagattttattattttcatcgactttctgtgcgtcgccgatgatgacttctttgcctttgcccttatcggttgtgctgggccgaatcaggtcttttttgccttcgaagttg

SEQ ID NO: 46660 - DNA, 2118 bp, Zea Mays
ccattacgtttttttaaaaaagacccaccttctcgtacacgttgtggtcgagatgatcagaacctggagccaacaatatgtgtccaacagaagttcttgaggatggaaggtaattagtacatgaaatgtttgtttcgatcagttttgtgatttctatatttgaggtcaacatagtctatgaatatagcagcaggtgatgcttcatatagcggctacgttatatagtgttggagtcatttgccgtttattacaaagtacgatgatgtccatggcccctgttgcttaaatccctagatgagaatctaaaggtaggacatgcatgacgccagtcaaattccatgcgcctttggcttggtctatggctttatgctcacactataaatggtggtgtaataataggtcgccatacacacctataactcttaagataattaatttacaatccctaaaggcaggcagatcacaaatggtagctaaaccacagtaaaagtagtcactaactattttccttactcagattcagtaatacatgctaccaccaaatatatagtgatattgaacattgaacttgttaacaccttaaactctattccaagtacatttttgcgcttgctcattatgcatatgaaagttttcaaatgtatcatttttgccccagggtcgatctactcctgggaagatctctgcgcgcggtttgttgcaaacttcgccagtgcttaccagcaacatggcatggaggcccacctccacgcagtgaggcaagagcccggagaaactctccggacatttatctcccgcttcaccaaggtgtgaggtactatacctctcatctccgatgcttctatcatcacggccttccgccagggggtatgtgataaaaagatgttggagaagttggccacgcatgacgtggaaacggtccccactctctttgctttggccgacaagtgcgccagggctgctgagggtcgtgcgtggcactcagcgccacagatcggggctgcccaagcaggcggctcaggtgccgtcgctcaggacggcaagaaaaggaagaaaaagaactgtggcaacgagaagccgcactccgccgctctggtcgtggcagctgcgactgggggccggggcgaccgcaacaaacgcccacgacgaccgaggggtaacagcggcacatgccccgtgcaccccagcggtcgccatagtgccgcagaatgccacgagatcatcgacctcgcgaaacgtgtcagcgcgtggcgcgagcagtcttccggggatggctccccacctcgtcgccgactcggcaaggaaaaggccgacgacaaagaggtggccgtggccgaaccggacctcgggtatcaatcacccgagggggtcctgaggatgtcttcactggagactccaattccggtgaaggcaactagacggaccaccagggggccccgtgctacttggcctgcggggccgaagtctgccttccccccggaaacccttctggactccccacgggtccaacctttcgatgggtttgtgtaggggccactacaacgtgaggacgtggactcaagcggcggactcaggtgtcaagtcgcaacccgaaatgcacatcgtaaccaagcgcccaagtactatggtcgacggttcgtgcatagtaggaacccagggtcggaacctaatcctgcggcaaagtactgaaccaagaggggatctgtaacctctaccccagcagggaggaacccctcaaggcgatggaaatatgccaacccgagggatgccaactttgctatagctgaagaagtaccccttcctatcccagtaagttcatagaagcaactctgaggggttagatttttctcctttcataattaaattttgcatatgtgtacaccagcccggtgaggtctgcccacataaacctggcctgatggtttacacccatgcatatcaagttataaagaggaaattcaccccctcggacgcgtttctatgacaactttatcttcctgctccatggatttggcctatagttttcagataataccttttatctaacccacccgcacggttccccatctgtcctaacatgacgacatccgaattgagctgccaggcttgcagtttagg

SEQ ID NO: 46661 - DNA, 993 bp, Zea Mays
cagaaaggtcctcgcccccgtcctcctacgggggtgaggacaagaccatccaagaacgcggccgccaccgccgcggcgtacaacgtcttgtacaaccccctgggcggcgccagagcagtgcagccggttgcgcagggaacgccacggatgcggcagacctgcgcacggcgcgaccgtcgcttgtacggtggacgaacagccgcgccccgtttggcggcgggaggcagcaccaaagccatctaagccaaggagccagacacgcggcagctgacggcgcctgcagccggtcggccccgcgtagccgaagttcacctcctccgcaaggctggtgaacatccttctcctccaaatgctggaggaagaagcgggtcaccagcccatgcagaaggtaggaccccaactcggctcgccttccaccccagcgatgatgatgaacatccttgaagctgagggcaggggggaagccgcagcccgactcgcttctctccaccataaggctggtggtcatccttgtagatgaccactggcgggagactgcagtcgggctgcatgatgaaaatccttgaagtcgagcgatggcagaagagcgccaacccccatgaggtcgcgctcctccaacaacagcaagaagaagacaagatcggcagcaccaccgcgcaggaaacgaagagcgcgagctccccggcagtgagaccgctggggagggtggccctgacgcggatccctccagcgaacaccagcgcgccctatccagaggctcgaaaggcggaagggcacggtgaatgcaagaggagcgaggcatggctactgcccgagggatgagcacctttttaaaggcagatttccccgcccatgccccgaagcatcacgggcaaggtctcccctgatgcgcaccagggttcccattctatgacatgggggccaggcctcacacgtcgtacaagctggcccgaagcgtgaagaaggcgaatcgtcgcacagggagcgtgcaac

SEQ ID NO: 46662 - DNA, 5801 bp, Zea Mays
gttagatttttctcctttcataattaaattttgcatatgtgtacaccagcccggtgaggtctgcccacataaacctggcctgatggtttacacccatgcatatcaagttataaagaggaaattcaccccctcggacgcgtttctatgacaactttatcttcctgctccatggatttggcctatagttttcagataataccttttatctaacccacccgcacggttccccatctgtcctaacatgacgacatccgaattgagctgccaggcttgcagtttaggacctcctttacgaaagcagggaggtctgatagcctgggggccggttccaaagaacgggagctcgttccatggaatggtccggagcagtgtagccgcttagcctggtctcgtaccgtaagcctgcacaacccaccattttgtgacgggtaccttagtatttggaactatagctatgtgggtccgacaacctagggtccgactcaggaaaatgggcacttgtctcctagggtggtccggagccgtgtagccgcttagcctggtcccgtaccgtaagcctacacactccaccaccctgcgatgggagtcctagtatctagagccgcgacccaagggggtccggacacgcaacttggccacccggactaaaccctgcgagtcccgagcatgtatcaaaggatggctaatatcagacaggggaccctatgggtgtactactaacgctccctagctgaagctgtgtacagatccagatcccggccgaggctgcctctcgagagttgttgacaaccctttttagatacgctggtaaccaaccttgacacatcaagcctgcatcccaagcggggggccaggtaccagggaggagtcaacaacatcacacatagcaggaacatgcggtacacagataagtgctaacactgcttgataaatagtactcaaaagtaccttacaaaaagcaaaagtattacattcgccttcaagcggaatcctagttccacctctactctgcaggtataaactactagacgccagcggagtcgcgctggaaagcccgcgaccactgtccttgcgcaatcctctagaacggcgtaacaacagtgatggccgcctcaatgtgtgcaccattgcgaagaggtcctcgcccccgtcctcctacggggggcgacaacgaggccattaaatccaaagagttggaggcttggtggcaggtggcgctggtggtctcgccagcggaggcaaccacctctgcaacgggcagcctcaccagcggcggcgaccacctcagcaccgatgatagcggccacctctgcaccggtggcttaccagcgacggcggccgcctcaccgcatgcagaaaggtcctcgcccccgtcctcctacgggggtgaggacaagaccatccaagaacgcggtcgccaccgccgtggcgtacaacgtcttgtacaaccccctgggcggcgccagagcagtgcagccggttgcgcagggaacgccacggatgcggcagacctgcgcacggcgcgaccgtcgcttgtacggtggacgaacagccgcgccccgtttggcggcgggaggcagcaccaaagccatctaagccaaggagccagacacgcggcagctgacggcgcctgcagccggtcggccccgcgtagccgaagttcacctcctccgcaaggctggtgaacatccttctcctccaaatgctggaggaagaagcgggtcaccagcccatgcagaaggtaggaccccaactcggctcgccttccaccccagcgatgatgatgaacatccttgaagctgagggcaggggggaagccgcagcccggctcgcttctctccaccataaggctggtggtcatccttgtagatgaccactggcgggagactgcagtcgggctgcatgatgaaaatccttgaagtcgagcgatggcagaagagcgccaacccccatgaggtcgcgctcctccaacaacagcaagaagaagacaagatcggcagcaccaccgcgcaggaaacgaagagcgcgagctccccggcagtgagaccgctggggagggtggccctgacgcggatccctccagcgaacaccagcgcgccctatccagaggctcgaaaggcggaagggcacggtgaatgcaagaggagcgaggcatggctactgcccgagggatgagcacctttttaaaggcagatttccccgcccatgccccgaagcatcacgggcaaggtctcccctgatgcgcaccagggttcccattctatgacatgggggccaggcctcacacgtcgtacaagctggcccgaagcgtgaagaaggcgaatcgtcgcacagggagcgtgcaaccgcactgcggttacacgcccttccaccttcgccgcaaccaacggtcaagaaggccaaccgccgcacaagaaggagcatgcaaccgccccgcggttgcgcgcccctcagcttcgctacaaccggtggtccaacctatggcgtgggggcccaggcccacatgtcatacacccggcgcaccggttcctgggtgcaggaaagtcgcaccgccgctcacgccaatgtcgcgcctcctcgacgccgtcacagaagactaagaggataaattttcaaaactgatgcagcgactcgaggcactccgcacatggcccaacaaagacattaagtacgaaggtcacgattcagtcagccgtgggggcaggcgtggcagtcggcgtgaccataggcgggccggtagtaactgcatcaacgggtgcgcaggagcagtgaaccgatcgccagtcaaacactagccccacatgtaggctcgcatcctcccctgaggcgggcccgggggccactgtcggtaccctggattaggggtaccccttactacggtatgaaggcacgatgctgcgcagctacccttagccgtgcggggaatagccccaggggtatctcgtgagcagttaaggtggcgttctcggagacaacaccgttgggcccagaaggcgcatgacccctatgcgcacaacccggacccccaaagtaaagtagctcggagccattggatagggttcggaccccatcaagtgagctccggaccacccgtaacaaggtcccaggagaggaagtgccgcaacctaggcatgggtccggtattgacgcgtgtccaggctctatccagagcgcctccgctccccactcggtcgagggtctaatgctaccacatggcttattatccgtgacataggccagcgggcggagcatgacgtaagggctctgggccgcgcatttattgcggaaaggacacgccgcctgtccacctctctgacaggcgatgtgcccccacggcatttattgtgtcctgtccattccgctggcaggcggcgctagtgccaccctgtagacggcgcacctgtccagtccgttgctgaaacagtgcgcccgtgctgcgtggtgcactgtgctcatcccttgtgcgagaagcttcccccagcacgccgataccacgcagatttcgggtgtcagggcgcaagaagattgctccagcagaagatattagtagctacatccgctatgttcttgggcccacatgtcggggctcagtactcttgtacatgtccccctttagctataaaaggggaggcatgcgacgttacaacacaagctcaatcttgaggacacagacccaagtcatccaagacaactcaagctctcaagcaatataacacacagtggagtatggtattacgctccggcggcccgaaccactctaaactcttgcatgttcttgtgttcattccttcatctcgcaacaagcaaacgcttaggcccctcctcatcttaggatttagggcgggtgcactctgccacccgcccggagatttcctctccgacagccgtaaagagagtcatgagatatttagtttacactcctaagttagggctttggtaccccaagggatcctcgtttgatttaataggatattccgatgccgattgggcagggtgtaaaattgataggaagagcacattagagacttgtcagtttctggggagatccctggtgtcatgggcttcaaagaaacaaaactcagtagctctttccaccgccgaagctgagtacattgccgcaggccattgttgtgcgcaattactttggatgaggcaaacccttggggactatggctacaaattgagcaaagtccctctcctatatgataatgagagtgcaatccgcatggcgaataatcccgttgaacacagccgcactaagcacatagacattcgatatcactttctgagggatcaccaacaaaagggagatatcgaaattgcttatgttaatacccaaaaccaattagctgatatctttatcaagccactagatgagaacaccattagcaaacttaggaatgagctaaatatacttgattctcacaattttgattgaaacattgcgcacatagctcatttatatacctttgatcatgtctctttcattttggtacaaatgcatatttcttattattcttgtaccaaggctacgactaatatgctttgaagtgtatttctatactaagtcgtagattgaaagggaaatggaatcttcggcaaagacaaggcttccactccatctctaacggtatcatctactctttgtcgttgtttctccactctcaattggtataacccttcactcatatttatattaccatttgggagaaagtattataagggctctcgaagtctctgttttttgcgattaatgcgaaagggggataaaatattaagcccaaagcaaaaggaccgcacaactaccatttcaaaaaatttcaaaatgaagttttacttggtattttcgattggtatctaatttacaattaatccttcaattggtatctttaaaaatcaaaccttaatttggtatctatttcaaaaccctctaagaggagaagttcattcagggggagttttatttagtcaaaggaaaagcatttgaaacagggggagagttttcaaatcttgaaaaatgcttcttgcaatcttattcatatacctttgactatttgcaaaaagactttgaaaagattttccaaaagtatttgctaaaacaaaacaagtggtgcaaatgtggtccaaaatgttaaataaaagaaaaagcaatccattcatatttagtgagatattcaattggtttaactcccaagtaacctatgcacattctaaatgcaaactagttacatttctacactttatatttgctttggtttgtgttatcatcaatcaccaaaaagggggagattgaaagggaaatagggttaaccttttcctagaattcatgtattacaggtgcataaggttcaacacaaaccaataaaagattcgagttagggactcaatttaaaaagagcaaaaggaatcgagtgggctgaaaaatggcgcaccggactgtccggtgtgccaccggactgtgtccggtgcaccagggccgtacaggtgtcaaccaaccactctcgggaaaacgaaggcgcgctccgctataattcaccggactgtccggtgtgccactagactgtccgatgagccagcgggcaacgactatccagcgccaacgttcgactctgcaaagtgctacagtgagccacagttctgcggcagaagtcagagccgcgaagtcagagggcaccggactgtctggtgtggcaccagactatccgatgccgcaagaggaaaaagctccaacgatcgacttcgctctgaaccctaacgattgggtgacatggcggggaaccggacagtgcacagtgcctgtc

SEQ ID NO: 46663 - DNA, 298 bp, Zea Mays
gaacggatcaacgggggcgcgggctcacgatttgtagagaagagaagggagcagagagggcgccgggaggggagaagaagggctggcggcgccattaatggaggatgaaacagtcagcttcaatggagcaaagattcgagtccacttcctaggaacgcagtaaagtaaaggggaaagggaaggagagaggaggagccaggcggcgcatgtggcgtccacttcctaggaaggcgagcaggctgaagaggtaaagggagcgacggcgttgctgttccctgcggcggcggcggcgttacgc

SEQ ID NO: 46664 - DNA, 299 bp, Zea Mays
gtggaatataaaatctagaagaatttagctaaaagtccatataccaaggttgtagaacttggaaaagtgaacaaatttcatatctggagaattccaagttgtgtggagaaatttggagtaatttgcaacatttcagcttgggttcagtttgaattgggctgaaaacagtttcatatagctgtttttggacccttataacttttgatctatggacttttggtaaggagttgctataacaaattgtagagtaattgttggagcacaatcccttttaagtgtactagccctgaaactacatg

SEQ ID NO: 46665 - DNA, 750 bp, Zea Mays
caaatgtcgagcgacatcgtggttaactcgtggttaagcgaaacagaacacctcccctgccttgtaagagaaattaggaaataagtcagtgacgtgtttccttttccattactaagtctagatttttaaatctcgggacgagatttctttttaggggggaaggctgtaacacccctagtgttacgtgaactaaaactctgacatgtcatcataagcatttgcattaacttgctttttacacctagaatgcattcactagatcaaaattttacaataaggtgatgtggtgtgttgagtataggacttaggttgaaaaacttgcttggaattatggataaaaaaaaataattcctaaaccgaggacttgttgggaatgagctgcatatactaaagttggatcttagactagagagtaactttgtttttgatggatggatcaaagggatgaatccctggaagaagctgaaaaacagatgaaactcatttgaaacccgaaactaaccccaaatgtggaatataaaatctagaagaatttagctaaaagtccatataccaaggttgtagaacttggaaaagtgaacaaatttcatatctggagaattccaagttgtgtggagaaatttggagtaatttgcaacatttcagcttgggttcagtttgaattgggctgaaaacagtttcatatagctgtttttggacccttataacttttgatctatggacttttggtaaggagttgctataacaaat

SEQ ID NO: 46666 - DNA, 266 bp, Zea Mays
ctagccctaaagatattcgaaacttggagtaaaactggtccaaaatagagctgtcagagattgtcaaattcagacttttggagtaaattcagattcagaatttctgtgtttgatgccaactttgggctgtgatagattgtaatccaaaagggtttagctaacagtcactatgtaaaacctgtagaggaactattggagtataaattttaataagcaacttgcccctaaaaccatatgctactaggagtaaaggtggttcaaagtgg

SEQ ID NO: 46667 - DNA, 704 bp, Zea Mays
ctgctgcttccgcgacctcggggatacgatttctcatggtctcaaatcttttgaggtacaaccagagagtttcgtccccccggcgcttgatggatttgaggtcccatggttgcgccggtttgtcggagagagattggaagttggcggtgaagcgccgactgaagtcgctccagtcgtcgatgcaatgttggggtaggtgtcgcagccattgcagcacgtcttgcccaaggacaataggcaagtacgcgcttcggttgctccagcggctcgggcagcagtggtgtagacggtcagccagcctcccggatcctgcttgggttcatatttgtcaacgttggagaccttgaagttagggggccactgaatggccctgaggtgtggagtaagcgccgatactccacacgtgtcctcttgtcgtcgatgatgatgtatgtcccggggaggggagtggttgtcgtggcgcctcgatcgtccccgggtggtgccaccagtcgaagccgttgccgactcagttctggtggcctgactccgatcccatgatcccggtcatattcttctcggcgacggatctcgttctcgtgtcgtcgttcgcgtgaagcgttgatggagctccgcgcgtcccgtcgactgttgatggtgtgtcgtagatcgctcggcggatgagcgagtggcagaaggtggttggctgcccgagtgaacagccg

SEQ ID NO: 46668 - DNA, 9281 bp, Zea Mays
cgaagtcggggttcaggttgcgtccgaagagtggattctctcgatgttgccttgtttcctgcttagcttgttcttgagcttaccgacggtcacgtcgttgagagttccttctttctctgaggacccgttctttcggagtttctcccacttctgagacctcgtctcgtgatacgggctgtgccggatcccgttctccggcttcatgatgtcgccaaatatttcggtgtcggttcctccgccggcgagattcccgatgaagaggttcttctcctggtgcagtcggttcatcgtcgcagataggattcgattctgctcttcccccgatgaagaggatgtcggggtagaatggaatagttgtcgcgacggtcttctctctgctctcctttgaggacggagacgcagaaagagcatcttgacaatctttagccttatttgcttcctttttccttgtgatccacgtccatttttccgtcggagaggtggatagcggagttctccgggtagatggaccctcggctcctagcttgccgaaggtgaacttttttcagagcgctggaggttgcgctttttcctgctttgctccgattttcttggagatctttgaggaagactttctctccggtggatccacgatgcgatgcagagttccctcctcatccactacagatgagatagttccaaagcagaacacagacccgggacagaggatgatcttgtgcaggaaggtgacggccattgagctagcttggatcggtgacaccccccctacctggtgcgccagctgtcggtgttttgggtccaaccgcgcactcggggttgcccctcaaggtgctttttggagtaggacggtgttaccaactgtagctcgatggttcgtgctagatgcatgagagacagtggacagttgtgtacaggtccgggtcgctttgagatacgtaacaccctacgtcctggcgtgagtactttatgtggtgggttacaaggaggttctctagtactggaaacgtagagagccgggtggatggctaagtagtgaggtcgacgtctttgaaggggtgccctctaggccttatatactcgaccgtggggcatttacatgtggatatgataacaacgtgtgcctaagtaatagtgaaatgactgagtctatcttcctataattaagccaacccatcctcgctcggttccgatgtacggggctcctgcgcggggaggtcgggtcactgttgtgatcactgctcgaattcgtcgggccgtctgggcttgcgtcgatctgatcttgtgtcgatccacttcaccaggcgttctttcccaggcccacgaagggatgacctcgcgaattattgggcccacgggcctttcgtgagatcttttatccttctggtggacccgggggatatccgtcccccacacttgtgtttgagtcataaccaagtaaaaagccttctacagccttaggagcaaatttagattttctacctcttttaacaagaataaaacatttgctaccaaagactctaaaatatgaaacattgggctttttactggttaggagttcatacggtgtcttcttgaggattcagtgaaggtagagacggttgatggcgtagcaagcggtgttgattgcttccgcccaaaaccggtccgaagtcttgtactcatcaagcatggtcctcaccatgtcaagtagagttctattcttcctctccactacaccattttgttgtggcgtgtagggagaagagaactcatgcttaatgccctcatcctcaagaaagccttctatttgtgagttcttgaactctgtcccgttgtcgcttctaatctttttgatccttaagccgaactcattttgagctcgtctcaagaatccctttaaggtctcttgggtttgtgatttttcctgcaaaaagaacacccaagtgaagcgagaataatcatccacaataactagacagtacttactcccgctgatgcttatgtaagctatcgggccgaataggtccatgtagagtagctcaagaggcctgtcagtcgtcatgatgttcttgtgtggatgatgaacaccaacttgcttccctgcttgacatgcgctataaaccctgtctttctcaaaatgaacatttgttagtcccaaaatgtgttctccctttagaagcttatgaagattcttcattccaacgtgggctagtcggcgatgctagagccaacccatgttagtcttagcgattaagcaagtttcgagttcagctctattaaaatcaactaaatatagctgaccctctaacactcccttaaatgttactaaatcatcacttcttctaaagacagtaacacctatatccgtaaaaagacagttgtaacccattttttataattgagaaacagaaagcaaattgtaatctaaagaatctacaagaaaaacattagaaatagaatggtcaggagatatagcaatttaccaagtcctttgaccaaactttgatttccatccccgaatgtgatagctcgttagggatcatggtttttcacataggaggagaacatccttttctcccctgtcatgtggtttgtgcacccgctatcaatgatccaacttgagcccccggatacataaacctacaaaacaaatttaggccttgttcttaggtacccaaacggtcttgggtcctttgacattagaaacaagcactttgggtacccaaacacaagtctttgaccccttgtgtttgcccccaacatatttggcaactattttgcctaatttgttagttaaaacatatgatgcatcaaaagtcttaaatgaaatgttatgttcatttgatgcaataggagatttctttttaggcaatttaacatgggttgattgcctagagctagatgcctcactcttatacataaaagcatgatgagagccagagtgagacttcctagaatgaattctcctaattttgtgttcagaataaccagcagtgtataaaatgtaaccctcgttatcctgaaccatgggagccttacccttaacaaaattagacaatttcttaggggcattaagcttgacattgtctccctgttggaagccaatgccattcttaatgcctgggcgtctcccgctatagagcatgcttctagcaaatttaaatttctcattttctaaatcatgctcattaattttagcactaagttgagctatgtgatcattttgttgcttaattaaggctaggtgatcatgaatagcatcaacattaatatctctacatctagtgcaaatagtaacatgctcaacggtacatgtaggggtttgcaagtatttaattcaacaatcttagcatgtaaaatagcattctcatctctaagattggaaatggaaacattgcaaacatttaaatctttagccttagcaattaacttttcattctcaattttaagcctagagagagatgcattcaacttgtcaatcttagcaatcaaattagcattatcatttctaaggttgacaagagaatcatcactatcatttaatttctcaaccttagcaatcaatttatcattctcaaatctaaggttggaaatggtgtcatggcaagtgcttagctcactagttaatttttcacatttttctatctcctgagcataagcatttttaactttgacatgcttcttattttctttaataaggaagtcctcttggctatcaagagttcatacttctcatgaatagcactaatcaattcattcaatttttctttttgttgcatgtttaagttggcaaaaagggtgagcaagttatcctcatcatcactagagttctcctcatcactagatgttgcatattttgtgaaggctctagattttaccttctttttgccatcctttgccatgaggcacttgtggccgacgttggggaagagaagacccttgttgacggcgatgtttgcggcgtcctcgtcggaggaggagtcggtggagctctcgtcggagtcccactcccggcaaacatgggcatcgccgcccttcttcttgtagtatcgcttattctccttcttctttcccctcttgtcgttgcccctgtcactgtcactagaaataggacattttgctataaagtgaccgggcttaccacattttagcaaaccttcatggagcggggtttgtaatccctccccctcctttgcttgaggatttggcggaagctcttgatgatgagagccatctcctcgttgtcgagcttggaggcgtcgatggggagtctacttgctgtagattcttctttcttctcctccgtcgccttgaatgcgacgggttgcatctcgggtgtggaggaggtgccttgctcgatgattttcttggagcctttgatcatcaattcaaagctcacaaattttcctatcacttccttgggagacattagttaatatctaggatcaccacgaattaattgaacttgtgtagggttaagaaatacaagtgatcttagaataaccttgaccatttcatggtcatcccatttggtgctcccgaggttgcgcacttcgttcaccaaggtcttgagtcggttgtacatttcttgtggctcctccccttgatgaagcatgaagcgaccgagctccccctcgatcatttccctcttggtgatcttggtcacctcgtctccttcgtgcgcggtcttgagcacgtcccaaatctccttggcactcttcaacccttgcaccttattatactcctatcgacttagagaggcgaggagtatagtagtggcttgggagttgaagtgccggatttgggctacctcgtccgagtcatagccttcatcccccatggatggttcctgtgcaccaaactcaacaatgtcccaaatactagcgtggagtgaggttagatggtgcctcattttatcactccacatgcaataatcttcacaaaaaccggtggtttgtctaatgggacggaaagtaaaggggtgcgtttggaaatacgaggatagagtaagggaatcttactaaacttcttgcgctcatgtcgcttagaagtgacggaaggcgtgtcggagccaaaggtggagggcgacgaagaatcggtctcgtagtagaccactttcttcattttcttcttcttgtcgccactccggtgcgacttgacgtggggaggtgactcctccctcttcttgttgccagactcccctgatagagccttcccgtggcttgtggcgggcttcttgcccgtcaccatctccttcttggcgtgagctcccgacatcacttcgagcggttaggctcttaatgaagtatcgggctctgataccaattgaaagtcgcctagaggggggtgaataggcaaatctgaaatttataaagtttaagcacaactacaagctggggttagcgttagagatataatcgagtccgaaagagagggagaaacaaatcacaagtgaataagagcggacgacccggtgatttgttttaccgaggttcggttcttgcaaacctactccccgttgaggtggtcacaaagaccgggtctctttcaaccctttccctctctcaaacggtcacttagaccgagtgagcttccttccttgatttcccgggtcacttagaccccgcaaggaccaccacacaattggtgtctcttgcttcgcttacaaggctttgagagtaagagtgagagaaataagaaaggccaaccaagcaacaagaacaacaaaagaacacaagtcgatcttctcacaagtcctaaaaactagagttgaattgtggactttgattcgatcggtggatttgatttgtgtcttggagtgttgtgtattgctcttgtattgaatgaggagtagtgaatgcttggatgccatgaagagtggtggttgtggggtatttatagccccaaccaccaaaatggtcgttggagaaggctgctgtcgtatggcgcaccggacagtccggtgcgccagccacgccacccaaccgttagggttcgactgttggagcttctgacatgtgggacaccggacagtccggtggtgcaccggacaggtcctgttcactgtccggtgcgccatctacgcctgctctgacttctgcgcgtgcagttgcactgttcactgtgcaatgtagacttttgcagatgaccgttggcacagttagtcgttgctttgctgacacaccggacagtccggtgctacaccggacagtccggtgaattatagcggagtgccattttctgaaacccgaagcttagcagttggagggtattctccctggtgcaccggacactgttcggtggcacaccggacagtccggtgcgccagaccaggatagccttcggttgtcttttgctctttttatttgaaccctttcttggaccttttattggtttgtgttgaacctttggcacctgtagaactcataatctagagcaaactagttagtccaattatttgtgttgggcaattcaaccaccaaaatcatttaggaaaagacttgaacctatttccctttcagtggaccagtggcataccgactccagttacctaaaacattgtctgctgtgcataatgtgttccacgtgtctcaattgaagaagtgtcttcgggttcccgatcgaaccattgaaataatggatattgccttagaaccagacttgacatattcagaacatcctattcgagtcttggatcaaaaaggcagaattactcgaaggaaaactctcaagttttacaagatacagtggaaccaacatacagaagatgaagctacttgggaaactcaagattttttagataagaatttcccaggctttttggcttcgtggaaattgtaagatgtgtacaattgttgtaataaaggaatgaaccccataccacccctgccttgtaccaaaaataaggaaataaagatatgtcgtgtttccttttccattacttgctctaggacttttaatctcgggacaagattcttttatgggggaaggatgtaacacccctagtgttactatcactaaaacttgagcataacatcataagcattggcatatcatgtgtttgtcacacctagagtgcattcactaggtaaaaaattcaaacaagttgtattgatgtgacatttcatgggtgaaaccctaggatacagtacttaaccctaaactgggcttagaagagtaaacaaagcctaaacaagagaaaactccaaaacttattaataatgatcatagaatatcaccattaatgaacttaagggatacccaaaccctagaagtaccagaaaccctaaatagacccctggaaaaccctggactgaaaccctaggggattatctataaaagtgtgcacattttggaactaagtgcaaaaaccatggaattagggtaccttaactcatatggttcacatgtgaaaatatttgcaaattaaaccatgagttttgggcttatttgcaaaaaggccacatttgtgcttcaatggctaagtctgaatttcagtgaatgggatcaactttgaagccctatatcttccaaattatgaggattttgccctaggtcagcacatcaagtttgtaaagctactaaaggagaacaactttgctatagggattaagccttggtcacatgaaaaatttggagtaaaatgagcccaaaattgggctgtcagactgccctaagtctgaattcagactgacagtgtggttgagcaatctttgagctaggattcgaccatgatccagtcattgtttggctataattgctatagcaagaatgtagctggatcatcaggcaacaactttcttacaggtggattaataagttgccacatggaaaattgagatctggggctctacaattagctctgtcaggcacctgataagaaccccgatggtacaatgtttggattagaacgccaacacagagacgctcgtcgccagcgacctccgcaccgcgattcatgtcggccgctgcgattcgtgcgccgtgacttgcggataaccgtggacgagtaaagatcttggcgcctggatcgactcgggctcggtcacggctaagctccccgtacccacttgctcgccgatcggtcgggatgggagagcaaacaatagacattatatcaaattatcaatcctagcaaaacaatgtaactctacagaaaatgatttgaacaaacattttttacttttattcattgttcctccttggtttaatgttaaaacatagaattgaaatgttatttgttcaattgcaattcataatagctgctatgtgcatctaccctttcccaaatcatcaactgttgtcctgctagctggcaccaattttggctccacacaaccatgcctcctagtccctgcacacacctctgctggtcagtcctgtttgccatggcttcctcccctacagccactgatcaacagtatctcaccaaaaaattccactgctcccaacttttgttgccttaattaatgtccagatgaaaaatttaggatgcgtgtactaaaatgagatatattggtaatgcacaaacataaccacggagcataataaagaaagtattcgcacaccataggtgattgtgaggtcgttgaggatgatgatactttgtgtctttgaaagtcgcctagatggggggtggataggcgaaacctaaaaaatataactttacaccccaactagatcccttgattagtggttagaacaagatacacaattatcggagtatataaaaactaaaacctttgcttgcaatgagtattgttgggggccttcggcttccgaaggtcctcaaaaacatgatttaacaatgtctctggagtataatgtgtaaacaggtaccttcggacatagatcaaaaccatagcgtgaagatgcgcaaagaatatgaaggatggcgcagagccgaagctatgcgcaggggagcttcggcgtgatagcagaaaaagaaaccgacttaaagaggaaaagactatttagaccccgatagattactatagaattattatcaaaagcaaagggcctgaatgtaattttgcatgggctgcgacctgtgcctataaatagatgaacagtactctcgtactgttcacactgacttggcattcgcttttgcattacgcttgtacccttgttttccttcgagccgaaggtacatttataatttgttattgttgatatagtaacgcaaataaaaataagttgataataatgtttaaagtgtttatgtcatttttcatatcttgcatatgaatctttcttcatcatttattgtgcttatgaaggtttttccttcataaccttcg

SEQ ID NO: 46669 - DNA, 1339 bp, Zea Mays
ctcaatattcttgattcgcgcaatttcttttgctaaattgcacacattgctcatttatatacctttgatcatgtctctttcatgtgctatgactaatgtgttttcaagtctatttcaaaccaagtcataggcatattgaaaggaaattggagtcttcggcgaagacaaaggcttccactacgtaactcatccttcgccgtcacttcaagcatgagcatcaagcaaaaggaccggacttcgtctttgggggagaaatgagcccaaggcaaaagggtcggacttcgtctttggtataatcttaactcatttatttatgaccaaaggggaagatagcacttcaagggctctaatgattccgtttttggcgattcatgccaaaaagggggagaaatgagcccaaagcaaaaggaccgcaccaccaccaatttcaaaaaacttaagtgttgaatattttcaattggtatcctattgtgttcaaaagggggagaaagtagtatttcaaaaatggtatatcaaaaccctcttgaacactaagaggaggatctcttttagggggagttttgtttagtcaaagaagaagcatttgaaacagggggagaaaaagtcaaatcttgaaaaatgctttgcaaaatctcattcatttacctttaactatttgcaaaagaactttgagaaagggtttacaaaatagtttgcaaaaacaaaactcgtggtgctaatgtggtccaaaatgttatataagaaagaaacattccatgcatatctcgtaagtagttatattagctctattccaaagcaacctttacacttacattatgcaaactagttcaattatgcacttctatatttgctttggtttgtgttggcatcaatcaccaaaaagggggagattgaaagggaattaggcttacacctagtccctaattaattttggtggttgaattgcccaacacaaacatttggactaactaagtttgcccgagtgtataaattacacaggtgtaaaaagttcacactcagccaataaaaagaccaagttttggattcaaccaaagagcaaagtgggaaccgaaggccctctggtctgggagcaccggactgtccggtgtacaccggacagtgtccggtgcaccaccggacatgtccggtgcaccaccggacatgtccggtgcaccagaggactccaacgcaaactcgccaccttcgggaatttccaaaggtgactccgctataattcaccggactgtccggtgtacaccggacagtgtccggtgcgccaagggaggtcggcctcaggaactcgccagcttcgggaaaatgccaacggctagtccactat

SEQ ID NO: 46670 - DNA, 1864 bp, Zea Mays
ggcagggggcaccggactgtccggtgtgcaccggactgtccggtgcgccatcgaacagacagaactcccaacggccacatttggtggttggggctataaataccccaaccaccccaccattcattgtatccaagttttccacttcccaactactacaagagctctagcattcaattctagacacaccaaagagatcaaatcctctccaaattccacacaacgccatagtgactagagagagtgatttgcttgtgttctttcgagctcttgcgcttggattgctttcttcttctttgactctttcattgcgatctagctcacttgtaattgaggcaagagacaccaaacttgtggtggtccttgcgggaactttgtgttccaagtgattgagaagagaaagctcactcgatccgtggatcgtttgagagagggaagggttgaaagagacccggcctttgtggcctcctcaacggggagtaggtttgaaagaaccgaacctcggtaaaacaaatctccgtgtctcacttgcttatttcgcttgggatttgttttgcgccctctctcgcggactcgtttctttattactaacgctaacccggcttgtagttgtgtttatatttgtaaatttcagtttcgccctattcaccccccctctaggcgactttcactttcttatcttcagacatcttcgaaaatgttgagaaagtactcacaaggccgaagattaaaaatttaaaaagccaagcaagtgttggtgcgcaagagctaaaaactgagtaagcaagagcagatggcaagaaagcgtaccaaatgagcccatgatgtgctcttatttatacgcctagtgcattgaaaattggaaagtcccgcttgtcagtgactgtttctattctagcaaaggggagttgtttttcggaccttcggctcagggccttcgttcatgtcgcaatctgaatttatcattctaacaaattaatattgtgaggggctactgttgggggccttcggcttccgaaggtcctcaaaaacatgatttaacaatgtctctagagtataatgtgtaaacaggtaccttcggacatagatcaaaaccacagcgtgaagatgcacaaagaatatgaaggatggcgtagagccgaagctatgcgcaggggagcttcggcgtgatagcagaaaaagaaaccgacttaaagaggaaaagtctatttagaccccgatagattactatagaattattatcaaaagcaaagggcctgaatgtaattttgcatgggctgcgacccgtgcctataaatagatgaacagtactctcgtactgttcacgctgacttggcattcgcttttgcatcatgcttgtacccttgttttccttcgagccgaaggtacatttataatttgttattgttgatatagtaacgcaaataaaaataagttgataataatgtttaaagtgtttatgtcattttttcatatcttgcatatgaatctttcttcatcatttattgtgcttatgaaggtttttccttcataaccttcatccggaattcattatatccgaagggagataatgcttcgaaggacgaaggactttaacatttaacactttctatgttgccttgttcttaactcttagcatttgagaacaagtccccaacaagtattgttttcaaagagtgcggaattaaatcaatgacaatactattagaaatgttagtggagaataatgcaagagggcttagttaagaagagcaataacacaagttctttcttgcaaggcgttgcttcactagatgagaatttaacttgaagcaacaccaaaaagatattagcaaagagtagcgcaagagaacttagagagggagtg

SEQ ID NO: 46671 - DNA, 209 bp, Zea Mays
cccctctctctctctcttcctctcttccactcttgcagccgccccaatccctctccatcttccccaagtgattgcagcgccacccctcaaccctagccccccctcttcctctccaaggtggagcctccccgcttggtgtccatcgtgtgggtgcgagtcttccatgggagtttggagggaggaagaaggaagaaaagaaggaggaaagg

SEQ ID NO: 46672 - DNA, 266 bp, Zea Mays
tacatgttgggaatgaggggagtagcagcacgtccactttcactctcacaatagcgctgcccaggcgcagccatgatttaattagaaatttattgtcaaaggaagtttgtttttttaactagtcgtgcgcactagttaattcagttcatgtcgtatgtttaacttctctttgctagccgattaataatacttagtatgtttttgtcatgatatatgtttatacattgttgccccctcatttatgcaattttgcaaaggggatgctg

SEQ ID NO: 46673 - DNA, 252 bp, Zea Mays
gcgggggaaaactggaggggagcttggcggccatggctggagcgccgcagcgcgcgacgctgggagatcggcatggcgcaggcgcgcagggaacttcacggctggaaggagaccagagagagagagacgcggtgcaggggagcttcagggaagaacggcgccatgggagcttcgacggcggctatggatagcgaaagctgtgcgcggccagccgaggagcaaggacgaccgcggtctggcgagctggaggcc

SEQ ID NO: 46674 - DNA, 719 bp, Zea Mays
ctacactccagatcatgcctagtacatttttcttcttcgatgaagacaagtgaatgtagcggtggttgctatcgttttgacctgttatttctatcacctacactctaatatgcagaattatttgattctttcataattgaactctatgatgatgttgtacttgattgtattattttgatgccctatcatatattgatgattattatggttcaagtatgacccatgagattaattcacacccctgaaggcagatgaagtcttatttgaggtttgcattgtatctaaaggcatacgaagtattatttgaggattgcattgtatctgaaggcagataaagtattatttgaggtttgtattgtatctaaaggaagtgaaatttattgataaatgcagcatgccatatacattgcatgactcatttgcatctgaagttttgtcgtgacctatggtccgaccgtaccggtacaacttagcatcgtacgttgcccgagaaggggtacgatgcagcttcatacccttagaggtatgaaggcagaggacatatgcattgcattcatatgcatacattgaagtgatatttgcagatgatgtggttttataccctcagaggtatgaagatagatgacctacacattgcattcctatgcatacattgaagtgatatttgcaggtattgttgatgcagggaagtgttatacaacctattgtggttgttcgag

SEQ ID NO: 46675 - DNA, 102 bp, Zea Mays
tgcttcgcctcctcgtgatcagccccatctgggtcatgtgggcggaagatctcaacacctgtcagatgttcaacgacaagcccaaaccagaatttatcaatg

SEQ ID NO: 46676 - DNA, 1684 bp, Zea Mays
atctaatccaacctctaatcctttaattcccatgatccacaacctccaaaagcacataattacagggagaaacaaagatctcatccatacctagggtttccccaagaaattctgcaagaagagatgggaaagaacatctccttgatcctctcttccccttcaactcaatgtgctcctcctcttctcgatccttgctgcgcggggggagatctagagggaggaggaagccatggagaggggctgccatgggaggagagagcagccagcccaagggaaaaggagagaggggcggccaagtgttggaggggggaaagggttggcggccaagcaggggcaaaagggggaaaaggccaccactagggttttctttgcgggagaaaagaagcgacgccacagatgactccgacttagcacccaatggcccacaacccttttcccacatccacgcaccgaagatcaacctttggcaacatttttttgggatattacactctaccccccttaaaaagaattcgtcctcgaattcgtccactccaaacaaaacatccatggtaccccatataacaccaccattccaaaaacatgggtcaattattggtcttaattaacacaagaacttcgacctcagactaaatgtctaaggaaactacaccacctgacatcaagcatgaaccaacatgtaatgaagctcaaaccaagtcatagatgcaatcaacactacgatttcacaacatcgaatttggatgcagccatacatccgcatcaatgtcttaaaacgacactctttgatgaaggggtaatatgcactaagcacaacctttaccaacttcaacaattcattttaatttaatggtgaaacatccacaccagatgaatgtataagaagatcaaacacctcacctcacagcaccacgaaacaattagttctattgaaacaaaactcctaatcttcctaaaccttgttcttgccataatgaaaagataatcatgtaatctaacattctttgcaccccaccgaaagggagaaaatctacagaactaatggagcaataaaaccgacaagaagccaataacattatgcacggcacagttcatcgaacaaatgccaaaaactccacatagagcactgacagcccaacgacaacacaatacttgcttaacccatgtcactatacttcatccaacaacttaactaagaaaaatatacaaactagtaaggttaacctacacataatataagtcttcatctactgtagttcagaaacttacatttcattctatcatatgatgcactccgagtaccagacataaaaggtcaatactagccccgtaatccttcacacatttggaaaacatcccaagctgatgttaaaaccacatcatctaggaataggtgactaaccacacacaaccaactctaggctaggcaatgacttcattcaaaccaatagataagtggtctgacaatggctccacaaacatgcatcgggaagagaaccatcaaatcctcaacgtattaatacataatcaatggatcaagaaaaatcaaagatttattctacaattagcatgactaacatgcaaccatttcaaaccacatctaggctttgtggctactaaaacacacgatagaagagagagacatgtaagccattctggctgtgtaaagacttcccccaaaaat

SEQ ID NO: 46677 - DNA, 2268 bp, Zea Mays
ataaaaccacatcatatgcaaatatcacttcaatgaatgcatatgaatgcaatgcatatgtcctctaccttcatacctctaagggtatgaagccgcatcgtacccctccgcgggcaacgtacgatgctaagttgtaccggtacggtcggaccataggtcacgacccaacttcagatgcaagtgaatcatgcaatgtatatggcatgctgcatttatcaatatacttcacttccttcacatacaatacaacctcaaataatacttcatttaccttcagatacaataccaacctcaaataatacttaatttaccttcaggggtgtgaattaatctcatgagtcatactcgaatcataatcatcatcaatatatgattgagcatcagtataatgcaagcaagtaaagcatcaccatagagtccaattatgaaagaatccaatacttctgaatattagagtgtaggcaatagaaataacaggtcagaacggaagcaaccaccgctacattcacttgccttcatcgaagaagaaaaatgtactaggcatgatctggagtgtagccacctgctagcgggcataaaacttaatacaaatatttcacaaacatttgtcaacaatcaacaaatcgatcatacacctgaaaccaagacctggtggaaaacctcccactttgaaccacatgccatacaacagcaatgttgtttgttaattttgtatctttaaaattataacagtggtgatatcaaacaaatactccatgagtatctacacaaaatattctacaacttcgttattcgatggataattaaattctgccatctataagttctaaaacatctaacaagataactgactgaatctgttttagacagcagcatagttaactttcaaaattcgatatctcacaaactactcaaccaaaaatcatgaaattctgctgaaagtaagaacttttatccctctacaaaagtctccatagctgggagagccaattcggccatttacttgatgaaatctaccagtgaacagacccgctcatttctgtcaggctaacagaaacagccacagtaaaacaaacataactggagtttcacaattcgtatgaatgcactctttaacaatctggaaagcttatgaaattatctacatcttttcttacaaacctaaggtttaattctgttgataaaattgcctaaatcttaagagaacagattctgtacagaattaagagactgaaaaactgctataatcaaactgcaataactctctgatctgaagtccgattgaggtgttcttcgcggccacggaaagatctacaaattatctacgacttatatatagactttttatttttttggaggcctctaagaccacggaaaactgggattgacagaaactgtcgaatctgccattctgcagaaaactaaatttgagatcaaaacctaaccccacatctaatccaacctctaatcctttaattcccatgatccacaacctccaaaagcacataattacagggagaaacaaagatctcatccatacctagggtttccccaagaaattctgcaagaagagataggaaagaacatctccttgatcctctcttccccttcaactcaatgtgctcctcctcttctcgatccttgctgcgcgtggaaatctagagggaggaggaagccatggagaggggctgccatgggaggagagagcagccatcccaagggaaaaggagagaggggcggccaagtgttggaggggggaaagggttggcggccaagcaggggcaaaagggggaaaaggccaccactagggttttctttgcgggagaaaagaagcgacgccacagatgactccgacttagcatccaacggcccacaacccttttcccacatccacgcaccgaagatcaacctttggcaacatttttttgggatattacactctaccccccttaaaaagaattcgtcctcgaattcgtccactccaaacaaaacatccatggtaccccatataacaccaccattccaaaacatgggtccattattggtcttaattaacacaagaacttcgacctcagactaaatgtctaaggaaactacaccacctgacatcaagaatgaaccaacatgtaatgaagctcaaaccaagtcatagatgcaatcaacactacgatttcacaacatcgaatttggatgcagccatacatccgcatcaatgtcttaaaacgacactctttgatgaaggggtaatatgcactaagcacaaccttt

SEQ ID NO: 46678 - DNA, 1942 bp, Zea Mays
cctcccctatccaatgttcacgcgtacaccatgtatggcgtgtgggccaaccctgtctggtgcttcccctagcttcggccgttgcaaaccgccccaacaaatccgcgtccaagttgctggaatctctccccggtcgggctcagcaatagagtataaaacctgaaccctgcacccttgaagcgcccaacccgccatattcaagagccctcatcgaaagcatgaaggagatctgactgatggcttggggtcgcggtggtccgctacacctgaatcacaccatcgaagtcgttcgaacccggcatgtgctcgagtaggggtcgtcgggtacactgagtgtgtccaggacctcttcgtgcaagctcgatgatcggagagctcgtcgccatgaaaactgagatggatcgccgccgtgaatctatgcctggcgtggtagggttccgtcgcgccctagactccggtatgaattcgtctctggcactcaccatcttctgtagggcgcttatggcacgggtggtttttgagtttgggcacggggcgccggctttgccaattgcaggcgaaggcgccgccgtgggaggagtcccctgtgcggtcgtgccctatatcggggaaagaagaacacgtcgtagccgtcagttctcagaggggtggctgcgattagaatgcgtaaaccccttcgcgtgatttgatctgagtcgtcgatctagatcgtgtggttccgatttgatgaaggataaattaaatctacaccatcaatcctcgatctaacggttgtccctgtgtatcggtttggattttgggtatagagatacacattattcatgattatacttttattatcagttgcaatttattgttcatgttaagatcattatgttaattggaacatagagaaccacctgggaaaatagtgctaccacaagggtggtatgggacgcccttggctgactaattaggaaagctagtgcaggactagcttacccgaaaggggcaagggcagtaggggagtggtcagtgtagggaggtcattgggttgattttgctgcgatggcggtcaggcgaggaatccctgcattggagattcctataactgtagcgggttttctgaagctagtggaactttgtaaaggcctcgtagtgttaccctgcctcgcctcctcggtagaggtgtatgggattggccttctcttggcagatgggtaacatgacttgtgggtaaagatgcgcaacctctgcagagtgtaaaactggtatactagccgtgctcacggtcatgagcatctcagacacttacatgattaatttatgaaactaaattcaatttgtcatatgcattacattgagggtgttgttattaattttgttctactacttaattgggttggtatttacttatacttagtaactgctaataaaattttgaccaactttaaaagcaatgctcagctccaaccatcctctttggtaagccttacacttcacgtgagctcccacctttggcgagttcatgcacattattccccacaacttgttgagctatgaacgtatgtgaactcactcttgctgtctcacacccccacaggtcaagaacaggtaccacaagatgaggcgcatggaggatgttgtgacatgttcgtgcgaggtctaggccgtcgtctcccaatcaactttgggttgctggatcattgtctcctcatgatgtaatgatttatttattttgtacagaactcctattatatagtaaagatgtgacattcgtttctgtaccactattcatcatatgtgtgagacttggtcccagcacatttggtgtttatttcgcgcctaggttttggacccctaaaatccgggtgtgacattatgtatcgtgacctagcatgtccttgttgtgtggccattgtcctctccacaaaaaagtcagtacaattttctaggttgattg

SEQ ID NO: 46679 - DNA, 3499 bp, Zea Mays
aacattattaattccttctcattatattatcatagaaagatagaaacaatattgaattacaaatgtaccttcggcttgatagaaggtaaaagtacaagcgtgacgcacaagtgaataccagtcagcgtccccagtacgggggtactgttcatctatttataggcacaggacacagcctgtgagaaattacattcatgccctttacatttacttttgacttatagacaaatctatgaggactagatagccttttcccctttaagtcggttcctttttccgccattgagccgaagctcccttgcgcgtagcttcggagcaacagcaaccttcgtcacgatcatgcttttctcatcgtgtatgcctttaacctgagtctgaaggtacctgttcatatgccatacttggaagacattgttaaatcacgtttttgaggaccttcggaggacgaaggcccccaacagtagcccctcgcagtattaatttgtttaagataatgtaacaccccgggatcctcaaacacccagaatgctactaaactacacatctaacattcatatataaaatttcgacagcatcccctttgaaaattacataaacggggaagcaacaaaatataaatagatatcatgataagagaacataatagacattaataatctgctagcaatggaaagacaaccataacgacatgaactaaatcaactagtgcgcacaactagttagaaacaacatcctttgacaagaagtttctaattaaatcatgactgcgcctaagcagcgttattatgagagtgaaggtggatgtgctgctacttcccacttcccttgatgagcaacaagcacctgcattgagtaatgcaagagtgagatgaaacatctcagcaagcgaattgttttgacaagatatttaaacaacaaattgaattaatcaacattttaaaagaatcacaattaagatcagaaattcttgtagatatagaactcagtagtctcaatataaccaataccatctcatttccttaaacaaccacaatagtttgtataacacttccctgcgtcaacaatacctgcaaatatcacttcaatgtatgcataggaacacaaagtgtaggtactctgtcttcatacctctaagggtataaaaccacatcacacgcaaatatcacttcaatgaatgcatatgaatgcaatgcatatgtcctctgccttcatacctctaagggtatgaagccgcatcgtacccctcctcgggcaacgtacgatgctaagttgtaccggtacagtcggaccataggtcacgaccaacttcagatgcaagtgaatcatgcaatgtatatggcatgctgcatttatcaatatacttcacttccttcacatacaatacaacctcaaataatacttcatttaccttcagatacaataccaacctcaaataatacttcatttaccttcaggggtgtgaattaatctcatgagtcatactcgaatcataatcatcatcaatatatgattgagcatcagtataatgcaagcaagtaaagcatcaccatagagtccaattatgaaagaatccaatacttctgaatattagagtgtaggcaatagaaataacaggtcagaacggaagcaaccaccgctacattcacttgccttcatcgaagaagaaaaatgtactaggcatgatctggagtgtagccacctgctagcaggcataaaacttagtacaaatatttcacaaacatttgccaacaatcaataaatcgatcctacacctgaaaccaagacttggtggaaaacctcccactctgaaccacatgccatacaacagcaatgttgttttgttaattttgtatctttaaaattataacagtggtgatatcaaacaaatactccatgagtatctacacaaaatattctacaacttcgatattcgatggataattaaattctgccatctataagttctaaaacatctaacaagataaatgactgaatctgttttagacagcagcatagttaactttcaaaattcgatatctcacaaactactcaaccaaaaatcatgaaattctgctgaaagtaagaacttttagccctctacaaaaggctccatagctgggagagccaattcggccatttacttgatgaaacctaccagtgaacagacccgctcatttctgtcaggctaacagaaacagccacagtaaaacaaacataactggagtttcataattcatatgaatgcactctttaacaatctgaaaagcttatgaaattatctacatcttttcttacaaacccaaggtttaattctgttgataaaattgcctaaatcttaagagaacagattctgcacagcattaagagactgaaaaactgctataatcaaactgcaataactctctgatcggatgtccgattgaggtgttcttcacggccacggaaagatctacaaattatagacgacttatatatagactttttatttttttgaggcctctaagaccacggaaaactgggattaacagaaactgtcgaatgtgtcattctgcagaaaactaaattcgagatcaaaacctaaccccacatctaatccaacctctaatcctttaattcccatgatccacaacatccaaaagcacataattacagggaggaacaaggatctcatccatacctagggtttccccaagaaattttgcaagaaaagatggggaagaacatctcttgatcctctcttcgccttcaattcaatgtgctcctcctcttctcgatccttgctgcgcggggggagatctagagagaggaggaagccgtggagaggggctgccatgggaggagaggacagccagcccaagggaaaaggagagaggggcggccaagtgtgggagggggggaaaggggtggcggccaagtaggggcaaaagggggaaaaggccaccactagggttttctttgcgggagaaaagaagcgacgccacagatgactccgacttagcatccaacggcccacaacccttttcccacatccacgcaccgaagatcaacctttggcaacatttttttgggatttacactctaccccccttaaaaagaattcgtcctcgaattcgtccactccaaacaaaacatccatggtaccccatataacaccaccattccaaaacatgggtccattattggtcttaattaacacaagaacttcgacctcagactaaatgtctaaggaaactacaccacctgacatcaagcatgaaccaacatgtaatgaagctcaaaccaagtcataggtgcaatcaacactacgatttcacaacatcgaatttggatgcagccatacatccgcatcaatgtcttaaaacgacactctttgatgaaggggtaatatgcactaagcacaacctttaccaacttcaacaattgattttaatttactggtgaaacatccacaccagatgaatgtataagaagatcaaacacctcacctcacaacaccacg

SEQ ID NO: 46680 - DNA, 503 bp, Zea Mays
gccacggaaagatctacaaattatctacgacttatatatagactttttatttttttgaggcttctaagaccacggaaaactgggattaacagaaactgtcgaatgtgtcattctgcagaaaactaaattcgagatcaaaacctaaccccacatctaatccaacctctaatcctttaattcccatgatccacaacatccaaaagcacataattacagggaggaacaaggatctcatccatacctagggtttccccaagaaattttgcaagaagagatggggaagaacatctcttgatcctctcttccccttcaattcaatgtgctcctcctcttctcgatccttgctgcgcggggggagatctagagggaggaggaagccgtggagaggggctgccatgggaggagaggacagccagcccaagggaaaaggagagaggggcggccaagtgtgggagggggggaaaggggtggcggccaagtaggggcaaaagggggaaaaggcc

SEQ ID NO: 46681 - DNA, 275 bp, Zea Mays
agcacctctaccgattcgcaaagataaacgcataatccaattgattgcagcacaaaaacaacaaaagttaaacatgaattcaccttgggttcttctcttcctccttccttcttcctccctccaaactccaattgagatcgcagccacacgacggagaaccacgcgggagggctgcaccttggaggggggaagagaaatggggggggggctagggttttgggtggtgagggctgcaaaggtttgaggaggaagtagatgggagagggggggagggg

SEQ ID NO: 46682 - DNA, 1249 bp, Zea Mays
atgacatccgacttgaaaccatgaaatcgacgacgcctttcagctcagcatttcaccgaaaatagggtgagtgctgcgtcgaatcgcgcttcatcttcatccacatcgagaattctccggccatgtactgatttatttccttctgcgcctaatcttcttggatcttggcgtagatgaggatgacgatcgacgacttgttcaagcattttgtcgagcacttggtgaatatcacactgctagcttcgtcttcaccttacgcttgggattcttgacaacacacagaacgatgacgaccttcgattgaaatctggagcgagctggtgaggtgggggtcgagcaggggatgatgggttcgacgactcgacgataaacacgaacacgccgaaacccgatggatgaggagcgagctggcgaggtggggttgagcaggttagcgcgagctcaggcgatgacgaagtcacgagcaagggaggacgggttcaatagctcgacggcaaacacgagcacgcgcgaagctcgatggacgaagagcgagcgcacggatgggctcgggctgggacaagaggacgacaaacgcgcagagcttcaaaatcacgcgcgagagatagaaagacgcgtgaccagagacctaagcatccacgctggcaatttggacgaaagcgaactagtggcgacaactcccgaccaggcaacgatgcatcggcacgagtgtcgcgggatagcagcaccacaacagcaagcgagctgcgaagcgaaattaacggcgggccagagcgaccaatcggcgagatccaatcggcgagatccaaataccacgtgatgggcatcagggacaagcgcgcggcagcaactatgatcgactagcctactgatatagggccaagcgaggtcgacggcattgggggttctgcgacaaggcaacaatggctgacgagttggagcactagcgagtagccgacgtgggtgagcaaagcaggcaggacgccgggcgtcgcggcgagctagaaacggattcggtgcgggagttcgacgcgccgtggggcgagtagagaacttcacgcacacaacagacgacctcgacaggaaactcaacggcggtgatttgggcgagcgcgacataagagaccagagagagagacgcgctgacgagtaagcaggaagccgcgacgaggaagctcgacgcgcagactgggcgagctgggcacgcggcaaaagaagaggagcagcgcgcgtagggagagggaaaaac

SEQ ID NO: 46683 - DNA, 272 bp, Zea Mays
ttttgattgcgcatgattgattttcggatatttaatagcatttcgtcttaaatgaaaatcctagtaaataatatataaaataatattagtccaaaaataaacttttttatttataaataattttggtttaattattatgatttttagagttatttaaaaatgtatttcgaatttagaaaagggaacaaaaaagaaaaaagaagaaaaaaaaaacgcaaaacctaacctagccggcccaacatccccagctcgcccctccctctggccgccgc

SEQ ID NO: 46684 - DNA, 819 bp, Zea Mays
cttaaaaatccagttttattatcaggttaagtcattacctgcatctagagttctttctaccctagttcaagtacttggcctacactagccgtctttttatcaaccctttagttcactggattcctacgtgtaagtcagtgatcaagtcttcatgtctgagaagtaacgacgatccgaatcgattaatacccagctggggatctccaaccacatgactgtaacactccaggttccacaaacaacccggtatactactgtactacacttccgacgtccatatataaaatttcggcagcatcccctttgcaagattgcataaaagagggagcaacagagtataaacatatatcatgactaaaacatactaagtattattactcggctagcaaggaaagataaacatacgacctgaactgaattaaccagtgcgcacgaccatataaaaaaataaacaaacttcctttgacaataagtttctaattaaatcatggctgcgcctaggcagcgttattgtgagagtgaaagtggacgtgctgctactcccctcattcccaacatgtatcaagtacctgcattgagtaatgcaagagtgagatgacacatctcagcaagtaaaataatatcaaacagtttaaccacataagaacattgttttaccaccacttaattccacaaccttcttattacgaaggtgcagcacgtatacaacgtacaacgcacctagttaccacacctcgcaggtagaaaccacaatagtaacatagtaatgtcacacttcatatattcctcataagtgcaaatgtctgcaaatgcaaggat

SEQ ID NO: 46685 - DNA, 169 bp, Zea Mays
gaatgagcctcggtatgacacgaccattgtgcaacatgcaactcgggtccctttgccagttggccgaagtggaattcagagttgtgacggagcatattagtactcgggatttggtgcaagaatacgtggccaacaaaacatttccaatgtctggtgggtaggggatgcc

SEQ ID NO: 46686 - DNA, 149 bp, Zea Mays
taggaccgagagatgatgatcgtgcaagtgatgtggtgtcaaccacaagatgcagttggtggacgacttgaagaatgatggatctaacatgtggatgctcgccaagcgagtgtcatctagcagacactatctgatgttgaattccaggc

SEQ ID NO: 46687 - DNA, 271 bp, Zea Mays
gttgtattgctatgaactgcaaaaaatgtcttatcctgtgtgtcatgatagtcttgactaggttgtgttatgtgtttctcttgtcttgctatctaggtggtattgtaattgttcaacccttttgccaataaaaattgttgcctgttttgcccataaaaagacccccttctccaaacaatctagtggttcccaagtgaaacttcaaaaaaaaattatgcttcagttggtattttctaacctttgtgtatcttacccttgaagtgacacctgc

SEQ ID NO: 46688 - DNA, 257 bp, Zea Mays
ccgagagatgatgatcgtgcaagtgatgtggtgccaaccacaagatgccgttggtggacgacctgaagaatgatggatctaaccagtgaatgctcgccaagcgagtgtcatctagcaaacactatctggtgttgaattccaggcaagccccggttttatgcataaccgttatatatatgctattttactgcacttaatgtttgtaggcttgtgctgtgcacttatgtgtaggagttgcctgaaaccctagttgcatg

SEQ ID NO: 46689 - DNA, 276 bp, Zea Mays
aggtacctccttgatttggttgatggtgtgacttggcctccatccctgccaccgggatagatggtcgagagggttactgcttccgtaggagaagaccaggaggagtagcgtggccggatttcgccatgttactcggttttctccattagttatttccgctgcactaaaaatattgttactgcttttaaaactccgataatgtaatcagtattgatacttgttaaatttgtggtattatgctttattgtatttctctgtgcctcaccttcgagtgag

SEQ ID NO: 46690 - DNA, 145 bp, Zea Mays
ctccctcaaactcttgcagccacaccacctaaccctagccgccccccatctcctcctccccaaggtgccattccttgccgcttggatctacgtcgcgtggtgcaagtctccaattggttttggtggagggaagaatggacgaagg

SEQ ID NO: 46691 - DNA, 191 bp, Zea Mays
cccatttcccctagcccttggccgccccccccatctcctcctccctcaaactcttgcagacacaccacctaaccctagccgccctcccatctcctgctccccaaggtgccattccttgccgcttggatctatgtcgcatggtgcaagtctccaattggttttggtggagagaagaagggaggaagaaaagg

SEQ ID NO: 46692 - DNA, 344 bp, Zea Mays
ttgctttgggaaagaagggatgtagcagcacggccactacacctttaaataaaggaaccactgcttaataatgatgttaaatagggagggtcaagtctaggggattattatattctagcctttcatggtagtcgaactgttttttttggtgggctgagttacctatcttttatttggtcatgaatgttcattactaccgttgcatttcgattatactatgtgaattatctttcttttgtatcctatataagctctatgttccccttgttatgcttctttcaagggaggtgctgccggattttgcaatagtttctttctctatttcttttcttgtgttgcataag

SEQ ID NO: 46693 - DNA, 648 bp, Zea Mays
ttttttgatatttttctcagcacaagaagcaacaaaataggagctacaccaagtttcacctaaaacagagatcagatgtggtctacagaaaaagagcaagttctctgaaaagcgtgcaagagctttgatgattttttttctttattttcctgaattttttgacaattttatcgaaaccaaacaggtcgtaggcaagtttggctggcctcagaatggtgtcaacaagctcctgtaaaaatttcagattttttggacaaccgagcaaaaagttatgcccggtttaaggaaggtacctcaagttatgtttaaaacgaccgagatgagtcaacaagttccttttttttgtttgttctctggttctatcctttctctttcgttttcctttttttcttttctttttttttgtttctatttttttacgtaaccgaaggagaaaaacaagaaagcagtgttgactcgatttgtggcgtgaccaaacaggagatggtggcggcgcgctagggtttgaatggtggaagaaagaaggatggtgagaaaaaacacaatgcgaccagcaacaaatgacgcgaaagcacacaaattcaacaatgcagattattgaaagaaggtacgaggctcaaaagggtgctaggataaggtctaacctga

SEQ ID NO: 46694 - DNA, 817 bp, Zea Mays
ggaggccgtagatgtatagatctcatcaagatgattccgatcaatcactagtttgccttgtttgaagtccagatgagtcttttcgagtgccggttgatctgagccattggatattaggattgtggaagtttccttctatttatacctccctaaccctagaatccacgtcctcccacccctagcagccgtcacccttttgtgccttgccccaagagatgagaggaagaaaaaagaagagaagagaggggagatgagggcataccgttgctcatcatcgtcgttcctctccaagaattggttggatttcctttcctctctctcttttctccacttgatgaatgctttctcttgttttggatgagttttaggccctgaaattagtttttttggttggattagatgggagattagattttgatctcgaaattagtttctgcaggatggcagattcaacagtttctgttcatgccagttttccatgatcttagtggcctcaaaaaaataaaacgtctgtctatgagtcgtagataatttgtatatctttccgcggccgtgaagaacacctcaattggacatcagatcagaaagttattgcagtttgattatagcagtttttcagtctcataattctgtgcagaatctgttctcttaagatttaggcaattttatctacagaattaaactttaggattgtaaaagaagttgtagacaattttataagctttccagattgttaaagagcgcattcatatgaattatgaaactccagttatgtttgttttactgtggctgttcctatttgcctgacaaaaatgag

SEQ ID NO: 46695 - DNA, 1553 bp, Zea Mays
agaacttatagatggcagaatttaattatccattgaatactgaagttgtagagtattttgtgtatacactcctagagtatttgtttaatatcaccactgttataattttaaagatacaaaattaacaaacagtgctgctgctgtttggcatgtggttcagggtgggagtctttccactgggtcttggtttcaagtgtaggagcgatttgttgattgttggcaaatgtttgtgaaatatttgtactaagttttatgcccgctagcaggtggctacactccggatcatgcctagtacatctttcttcctcgatgaaggcaagtgaatgtagcagtggtttctaccgttttgacttgttgtttttttatcgcctacactctaatattcagaattatggaattctttcataattgaactctatggtgatgctttacttgattgtattatactaatgctcaatcatatattgatgatgattatggttcgagtatgacccatgagattaatttacacccgtgaaggcagataaagtattatttgaggtttgtattgtatctgaaggcagatgaagtattatttgaggtttgttttgtatctgaaggaagtgaagtgtattgataaatgcagcatgccatatgcattacatgattcatttgcatctgaagtttggtcgtgacctatggtccgaccctaccggtacaacttagcatcgtacattgcccgaggaggggtacgatgcggcttcatacccttagacgtatgaaggcagagaacatatgcattgcatttatatgcattcattgaagtgatattagcagatgatgtggttttatactctcagaggtatgagggcagatgacctacacattgcattcctatgcatacattgaagtgatacctgcaggtattgttgacgcagggaagggttatacaacctattgtggttgttcgaggaaatgagatggtattggttatattgggactattgagttctatatctacaagtatttctgatctcaattgtgattcctttaaaatgttgtttaattcaatttgtggtttaaatatctcgtcaaaacaatttgcttgctgagatgtatcatctcactcttgcattactcaatgcaggtacttgattcatgttgggaatgagggaagtagcagcacgttcaccttcactattataataacgatgcccagttgcagccatgatttaattagaaactcgatgacaaatgatgtttgttttttcctagtcgtgtgcactggttaatttagttcatgtcgttatgtttaactttcctttgctagcagattaataatgcttagtatgttttttttcatgatatatgtttatacactgttgcccctcgtttatgcaatctttcaaaagagatgctgccgaaattttatatatggatgtcagatgtgtagttcagtagcattctggggtgtttgtggaccccggggtgttacaaaaggattggacacgatgtaaattttcggcaatactttgttaaatgaaagtgtgctgaggcacgaagcaaacttcgag

SEQ ID NO: 46696 - DNA, 535 bp, Zea Mays
cacgttttggtcaccacgagatccaccattaccataaacatctctggctcgtttttgccaccacggatacatctcatgtcggatttggaagtttaaatacaatctggaaagcttatcttatcttctttccaacggatctgaccttgcctcaaaaattcattctgagtgctccgcaatcatcatagagatttctggaccttctatattaacaagatttgttaaatctgatttcaaaggggctgttagcaatatccttattgtttgggttgtcatagtaaaaaaaagggttcaggccccagcaaaaaaaagaagaaaaaaaagaaaaaaaggaaaaaaaggaaaagaaaaagaaagaagggggatgaatctctaaatctattgtttctctttgtgctgtgctagatgttctttttcagtgactatctttgtgcctaggctcatgtctctagcatggtttagcctaggactagcacagtaccaccgttgaatgattattcagcttgcttttgtaactaacgtggtactagtgtattcc

SEQ ID NO: 46697 - DNA, 275 bp, Zea Mays
cgatggtgagtcacggagcaaatacaataaagcataaaatcatacattaaggagtattaaattattacatcaccatcggagtttttcaaaagtagtcatcattgttcgaagtgcagcggaataaaactaacgatagataaatggagggatggggaagcctgtcccatcactcctcatgctcctcctcagccgaggcgggatcgcactcgacagtccaacccggtggcaagatggacggccaagtcactccagcaaccatgtcctccaaagaacct

SEQ ID NO: 46698 - DNA, 805 bp, Zea Mays
cttcccttgcctttaaatcatttttgacgtaaaaccactctcccatccaggacccaggccatcttttctagaatgttggtactgggtggcttgcattggggcgagcaataaatccataacaaccgaagttgttgtggtactgttctttgcaagtggccttcgtctcatataaaagctcgtgcatactacagaagcactttgagcttagctccagtccctgacttcttacagcccagacaaaaatccccatcctaataatagcttcgggggtgatctgatgaaggaagatctggaatatcttcagcacttcaaccacaaacttgctcagcaggaaccgaagacctgcctttaagaagcttcagtatataacaacttcgttttctttcgaagcaggggcagtgctgtcttctccaactctggcattagacatgtcgcgaaaatatctccccctcatggcatcaacatgactttgcttgatagtcgattttccgaagatagtatggcttgggcgccatggccgatcctcagagttttcgtccccactttccacgtcataactatcgctgtcatcagaatctttgaataaaccttccatgatctccttagtaattttctctgaatttgtttttgccatggactcaataaatccagcaatgtaaggatctgcaaccttcttctcttcaaacagcttcgtctcttcgattgttttcttctcttcagtcatctttttctctgcactcatcttcttctcttcaaatttgaagcaaacgtatctttaaaccaaagctctaaaggcttgaaaaat

SEQ ID NO: 46699 - DNA, 162 bp, Zea Mays
tccttcctcccttcttccctccaccaaaacgattgaagattcgcaccacgcgacgacgatccgagcggcaaggaatggcaccttgggaggaggagatggggggtgggggcggctagggtttggtggtgtggctgcaaggattgagagaggaggagatggaag

SEQ ID NO: 46700 - DNA, 489 bp, Zea Mays
agaaaacatactagacattaataatctgctagcaatgaaaagataaccataacgtcatgaactgaattaactagtgtgcacgactagttaaaaacaaacatcctttgacaagaagtttctaattaaatcatggttgtgcctgggcagcgttattatgagagtgaaggtggacgtgctgctactcccctcattcccaacatgaatcaagtacctgcattgagtaatgcaagagtgagatgaaacatctcagcaagtgaattgtttcgacgagatatttaaaccaaaaaaattgaattaatcaacattttaaagggatcacaattgagatcagaaatacttgtagatatagaactcaatagtcccaaaataaccaatgccatctcatttcctcgaacaaccacaataggttgtataacactttcctgcgtcaacaatacctgcaaatatcacttcgatgtatgcatagtaatgcaatgtgtaagtcatttg

SEQ ID NO: 46701 - DNA, 5140 bp, Zea Mays
aattaatctcacgagtcatactcgaatcatcatcatcatcaatatatgattgagcatcaacataatgcaagcaattaaagcatcaccatagagtccaattatgaaagaatccaatacttctgaatattggagtgtaggcaatagaaaataacaggtcagaacggaaagcaaccactgctacattcgcttgccttcatcgtagaataagaaatgtactaggcatgatctagagtgtagccacctgctagcggacataaaacttagtacaaatatttcacaaacatttgccaacaatcaacaaatcgctcctacacttgaaaccaagacctggtggaaacactcccaccctgaaccacatgacatacagcagcagcactgtttgttaattttgtatctttaaaattataacagttgtgatatcaaacaaataatataggagtatctacacaaaatactctacaacttcggtattcaatggataattaaattctgccatctacaagttctaaaacctctaacaagataactgactgaatctgtttcagacagcagcgtagttaacttcaaaattcgatatctcacaaactactcaaccaaaaatcatggaattctactggcagtaagaacttttatccctctacagaagtcttcatagttggaagagccaattcggccatttacctaatgaaacctaccagtgaacagacccgctcatttttgtcaggcaaacaggaacagccacaataaaacaaacataactggagtttcacaaatcatatgaatgcactctttaacaatatggaaagtttatgaaattatctacaacttcttttaccaacccatagtttaattctgttgataaaattgcctaactcttaagagaacagattatgcacagaattatgagactgaaaaactgctataatcaaactgcaataactttctgatctgatgtccgattgaggtgttcttcgcggccacataaagatctacaaattatctacgactcgtataaatactttttatttttttgaggccactaagaccacggaaaactggtatgaacagaaactgtcgaatctgccattctgcagaaattaaattcgagatcaaaacctaacccacatctaatccaacctctaatccttcaatccacatgatccacaacctccaaaagcacataattatatggaggaacaaggatcccatccttacctagggtttccccaagaaaatctgcaatagatggggggtagaacatctacttgatcctctcttcctcttcaatccatcttgctcctcctcttctcgatccttgctgcgtgggggagggggagatctagggaggaggaagaaatggtgggcggcttccatgggaggagaggggatggccaactaagggaaaaaagggggagggtggcggccaagagagggggtggagggaaaaggggtggccacctagggttttgtgggagaaaagaactgacgccccagatgacttctgcctttgcatctaacggcccacaaccctttcccacatccacgcaccgtagatcaacttttggtccaaaaatgtttttgggatattacactctaccccccttaaaaagaattcgtcctcgaattcggccactccaagcaaaacacccaaggtaccccatcaccaccattcaaaacatgggtccattattggtcttaattaacacaagaacttctaccttggactaattgtctaaggaaactacacaacctgacatcaaacatgaaacaacatgcaatgaagctcaaagcaagtcatagatgcaatcaacactacaatttcacaccatcgaatttggatgcaactatacatcaacatcaatgtcttaagacaacactcttttatgaaggggtaatatgcactaagcacaacccttaccaacttcaacaattaattttaattaaatggtgaaacatccacacccgacgaatgtataagaagatcaaatacctcacctcaaagcaccacgaaacaagtagttctattgaaacaaaactcctaatcttcctaaaccttattcttgccatcatgaaaagataatcatgtaatctaacattctttgcaccccgcaaaagggagaaaatctacagaactaatggagcaataaagccaataacattctgcgcggcacaggtcatagaagaaatgccaaaagctccacaaaaagcactgacagcacaacaacacaatactaggttaaccaatgtcactatacttcatccaacaactcaactaagaaaaatattcaaactagtgaggttaacctacacataatataagtcttcatctactgtagttcataaacttacatttcattctatcatacgatgcactcaaagtaccagacatacaaggtcaataataaccttgtaatccttcacacatttgacaaacatctcaagctgatgtacaaaccacatcatttaggaataggtgactaaccacacacaaccaactctaggctaggcactggcttcattcaaaccaatagataggtggtccaataatggctccacaagcatgcatcggggagagaaccatctgatcctcaacgtattaatacataatccatggatccagaaaatcaaagatttattctacaactagcatgactaacatgcaaccactttaaaccacatctaggctttgtggctactaaaacacacaatagaagagagacatgtaagccattctagctaggtaaagacttcccccaaaattcctataaaagtaccaatattcatttctttcagaactggtttctcgacataaacaatcattctttgcaaagatagttggaactatccaccaaccgctcaacaacttaaattcaaattgatggttaccttgtaacccaaaacacgcaattcacagtcctcttagaaacatcctcaatcaagcatatataacaatattattgtaataaaactcaacaatgaaaaacatggtgaaaacaacataggcatacttgtatatcacagtcataataacaacttcaatctcacaaaagaccatcgatatcaaacgcattaataaaacaatataaagatttagagataaattatatcaggcattaagtcataaacaacttaccacatcaccataaaggaatgggggaggggtgaaattattgtcgcctacacttcaaagacattaatatatatcaaagatatttgtacccatacccttcctatatgtgcaagtgtgtcaaatttatcttcaaattgccaagaatctaaagcctatgctttgataccaactgtaacaccccgggatccacaaataccacgaaatgctactaaactacacaactaacattcatatataaaatttcgacagcatctcctttgaaaatttgcataaacgtggaagcaacaaagtataaacagatatcataataagaaaacatactagacattaataatctgctagcaatggaaagataaccataacgtcatgaactgaattaactagtgtgcacgactagttaaaaacaaacatcctttgacaagaagtttctaattaaatcatggttgtgcctgggcagcgttattatgagagtgaaggtggacgtgctgctactcccctcattcccaacatgaatcaagtacctgcattgagtaatgcaagagtgagatgaaacatctcagcaagtgaattgtttcgacgagatatttaaaccaaaaaattgaattaatcaacattttaaagggatcacaattgagatcagaaatacttgtagatatagaactcaatagtcccaaaataaccaatgccatctcatttcctcgaacaaccacaataggttgtataacactttcctgcgtcaacaatacctgcaaatatcacttcgatgtatgcatagtaatgcaatgtgtaagtcatctgccttcatacctcttagagtataaaaccacaccatctacaaataccacttcaatgaatgcatatgaatgcaatgcatatgtcctcttccttcatacctctaagggtatgaagccgcatcgtacccctcctcgggcaacatacgatgctaagttgtaccggtacggtcggaccataggtcacgacaaaacttcagatgcaagtgaatcatgcaatgtatatggcatgctgcatttatcaatatacttcacttccttcacatacaatacaacctcaaataatacttcatttaccttcgaatacaataccaacctcaaataatacttcatttaccttcaaatacaataccaacctcaaataatacttcatttatcttcatgggtgtgaattaatctcacgagtcatactcgaatcatcatcatcatcaatatatgtttgagcatcagcataatgcaagcaattaaagcatcaccatagagtccaattatgaaagaatccaatacttctgaatattagagtgtaggcaatagaaataacaggtcagaacggaagcaaccactgctacattcacttgccttcatcaaagaagaagaaatgtactaggcatgatctggagtgtagccacctgctagcgggcataaaacttagtacaaatatttcacaaacatttgccaacaatcaacaaatcgctcctacacttgaaaccaagacctggtggaaagactcccaccctgaaccacatgacatacagcagcagcgctgtttgttaattttgtatctttaaaattataacagttgtgatatcaaacaaataatctaggagtatctacacaaaatactctacaacttcggtattcaatggataattaaattctgccatctacaagttctaaaacctctaacaagataactgactgaatctgtttcagacaacagcgtagttaacttcaaaattcgatatctcacaaactactcaaccaaaaatcatggaattctactggcagtaagaacttttatccctctacagaagtctccatagttggaagagccaattcggccatttacctgatgaaacctaccagtgaacagacccgctcatttttgtcaggcaaacaggaacagccacagtaaaacaaacataactggagtttcacaaatcatatgaatgcactctttaacaatatggaaagtttatgaaattatctacaacttctt

SEQ ID NO: 46702 - DNA, 187 bp, Zea Mays
tctgcaatagatggggggtagaacatctccttgatcctctcttcctcttcaatccatcttgctcctcctcttctcgatccttgctgcgtgtgggagggggagatctagggaggaggaagaaatggtgggcggctgccatgggaggagagggggtggccaaccaagggaagaaaagggggagggtggc

SEQ ID NO: 46703 - DNA, 145 bp, Zea Mays
gcctttaccggaagttcgggcaaatgcctaagtacgatccggaagtccaccaccttgggttcctcctttcctccttcttttcttccttcttcctccctccaaactcccatggaagacttgcacccacacgacggacaccaagcgg

SEQ ID NO: 46704 - DNA, 2302 bp, Zea Mays
cacgttcttgatctctagaaaattcccacagcaccagcgctcagcctttgttcttatcttctccgtgtcactcgctcctgctgctcccaactctctcgccgcgtcactctctctctcccgctggacttcgctccttggccgtctcgacgaagccaggtctggccatcaccttcctggccgcgcgcgttcttcttctactcggagcaccgtcgactgtctcggttctgcatcaccgggacaccttcctctgcttcctccctcgccggccgaactccttcgcccgctgccatagtgccctgcccctgcgatggccgtgcgtatccttctgttccacatcgctgcgccatccttcacctcgcccggttgtgctttgttgcgccgtcgggtgctcctggtcctgcgccgtcaacctgccatgcgagctagctccacctcgcctgctcgtgtttctctctgtcgtgcgctattgctgcgtcgggcatccatggccgcaggcgataacctgctcggcctaattgtcgcctcttctgccctcgccgccctaaaccaccatccatctcgcgcatggcacaaagctgctctgctaccgcgccttccgtaattaacggtcgtcgttctcctcatctagtgctcgcgtggccttgcccggaccgcgctgctgactgtcgaccccgccgttgcttcaaagcgctcggacaccgacgtcgtcactcggcaacgtgtttgctcgtcaccacgttatcttcagcaacatggctctgctggactctgtgcactcgtcgacacccggttgtcgatctccgccacgtcgtgcccccgctctttggcctcgtcgtcacccttttcttttgtgtcgcaggcgtccacggattggcgagttgatttatgattttttctagttggttaatgaatggattagctagatggattagtcgcgatgatgttgtgattatattaagtgttgtttcgattctatttggttgtggaaatacttgaattagaacttgctattgatgctatagtttcgagtgaatttactattagtgcgcgatttcaccattcctactagtcgaggtatcaaatgaatgggataaatgtgatggtcacgatgattattccgttttaagtttaagtgacgtagttatatttgtcgtacgacgaaaagtctaaaccagagtttgtcgtcgtgtccatggatgtggactgacttaatatggtgagctctttcactaccctagctagtcaatttgattgatggattgattagaattacgaccaatgattatcttgtttgtatcataggcgcgctgtggttatattatgtttgatgaaatatcttcatgtgtgtagtgtagtaattactttcacgattagaaaataaacgtgatcaggtgaggtgttttatttagcttctggtagtgtattaataagtgctaaggctatgttttgtatttgactgaactggggccatcatcgttcttgcgatttcaggtaaattggttcttggtaagctaaattatcatctatgttagttgggtcgatgaatggttgggctagatttcttagttgcgtacataatcttcaaatagacgtatgttgcgtgtcgggtcaaattaataatatgaaggttaagtctagagtttccagtgtttagatgatagatgatgaggacattacctgcaacatgagtacgactacaccagcagcacctccacatcaagcgccacttccttcattagctgggccaatcactcgggcccgtgccaaagatcttaactttgtcatgctactgaagaatgagggcccagaagaatagacgaccagcccaactatggcccatagtggacaacctagggttggccgccactaggggctgcgccccctctctatatttatccaggagctgcgcctcctttgttctgggagttttgttttacgttagctttagctactctcgagcacgcgcaaatcagcgctgtcttcatgtattcagaactccaccctcgagtaatagattagattgctcgcatctttttcttgttcgttctttgattgcgcacaggaaacgatcttcgtgatcaggccgatctcgcatcagcaaggtcggtaaccacagggagttggttcagcgattgcattggtgcctcgggcttgctcgtcatagtcggatcgcaagggtcatcttccgccaaatcgaaattatctccactcgccgaaagatcgggcaccttagctatatcaatagacgttgtcaatgcaacatataatgaatttttgcttatctatatggcgttgatgccct

SEQ ID NO: 46705 - DNA, 376 bp, Zea Mays
gttagctcggcgtcagttgcgccccgtccgaatcctgcgctgaggtgggagaagaagctgctgataaggggggctcgcggatcagcgaccgagtcgtgagggagtggcgatgagcggctgtcatggacgggcccgcatgacagcgagactaagttcctgttcaagcgcgcgtgagagcgggatgacaagggtggcccacctgtcagcaccaccaccaggtggctggacgggccacacagtaggttttggttactaggccgaattgggtggagttggcccatgaagcctttttattcttttctgttttatgccctaatttcttttctccatttccaagttcaatttgaattttgaatttgaattcaaacttgtgcca

SEQ ID NO: 46706 - DNA, 364 bp, Zea Mays
ccgagatgaaacaaccgctttgtatcctttctcctttctttttttgtttgttctctggttctatcctttctctttctttttctttttttcttttcttttttttgtttctgtttttttacgtaatcgaaggagaaaaacaaggaagcggcgttgactcggtttgtggcgtgatcaaacgggagatggtggcggcgcgctagggtttgaatggtggaagaaagaaggatggtgagaaaaaacacaatgcgaccaacaacaaatgacacgaaagcacacaaattcaacaatgcagattattgaaagaaagtgtgaggctcaacagggtgttgggataaggtctaacctggatttttatgtggttttg

SEQ ID NO: 46707 - DNA, 251 bp, Zea Mays
attcaggttagaccttatgccagcacccttttgagcctcgcactttctttcaataatctgcattgttgaatttgtgtgcttgcgcgtcatttgttgtttgttgcattgtgttttttaccatccttcattcttccaccattcaaaccctagcgcaccgccaccatctcccgtttgatcatgccacaaaccgagtcaacgccgcttccttgtttttctccttcggttacgtaaaaaaaacagaaacaaaaaaa

SEQ ID NO: 46708 - DNA, 203 bp, Zea Mays
tttttttatgatttttagagttctttaaaaatgaatttcggaattaaaaaaaaagaaaaaaaaacctaaaactactccaaaccggccggcccacgaggggcccatgatctaccctaatgcacgccgcgctcctggcatttcacagccgccgccgcctcccagacttcctctctccctcacgtccctctctccctcacgtctcc

SEQ ID NO: 46709 - DNA, 2422 bp, Zea Mays
aaacataactggagtttcataattcatatgaatgcactctttaacaatctggaaagcttataaaattatctacatcttttcttacaaacccaaggtttaattctgttgataaaattgcctaaatcgtaagagaacaggttctgtacagaattaagagactgaaaaactgctataatcaaactgcaataactctctgatctgatgtccgattgaggtgttcttcacggccacggaaatatctacaaattatctacgactcatatatagactttttatttttttgaggtcactaagaccacagaaaactggcatgaacagaaactatcgaatcggccattctacagagaactaaattcgagatcaaaacctaaccccacatctaatccaacctctaatcctttaattcccatgatccacaacctccaaaagcacataattacaaggaggaacaaggatctcatccatacctagggtttccccaaaaaattctacaagaagagatggggaagaacatctccttgatcctctcttccccttcaattcaacgtgctcctcctcttctcgatccttgctgcacggggggagatctagagggaggtggaagccgtggagaggtgctgccatgggaggagatgacggccagcccaagggaaaggagggaggggcggccaagtgtgggaggggggaaaggggtggcggccaagtaggggcaaaagggggaaaaggctaccactagggttttctttgcgggagaaaagaagcgacgccacatatgacttcgacttagcatccaatggcccacaaccctttttcccacatccacgcaccgaagatcaacctttggcaacatttttttgggatattacactctaccccccttaaaaagaattcatcctcgaattcgtccactccaaataaaacatccaaggtaccccatatagcaccaccattccaaaacatgggtccattattggtcttaattaacacaagaacttctacctctgactaaatgtctaacgaaactacaccacctgacatcaagcatgaaccaacatgtaatgaagctcaaaccaagtcatagatgaaatcaacactacgatttcacaacatcgaatctggatgcagccatacatccgcatcgatgtcttaaaacgacactcttctatgaaggggtaatatgcactaagcacaacctttaccaacttcaacaattcattttaatttaatggtgaaacatccacaccagatgaatgtataataagatctaacacctcacctcacatcaccatgaaacaagtagttctattgaaacaaaactcctaatcttcctaaaccttgttcttgccataataaaaagataatcatgtaatctaacattctttgcaccccaccgaaagggagaaaatctacagaactaatggagcaataaaactgacaagaagccaataacattctgcgcggcacaattcatcgaagaaatgccaaaaactccacatagagcactgacagcccaacgacaacacaatacttgcttaacccatgtcactatacttcatccaacaactcaactaagaaaatatccaaactagtaaggttaacctacacataatataagtcttcatctactgtagttcagaaacttacatttcattctatcatatgatgcactcagagtaccagacataaaaggtcaatactaaccccgtaatccttcacacatttggcaaacatcccaagctgatgtaaaaaccacatcatttaggaataggtgactaaccacacacaaccaactctaggctaggcaatgacttcattcaaaccaatagataagtggtccgacaatggctccacaaacatgcatcgggaagagaaccatcaaatcctcaacgtattaatacataatcaatggatcaagaaaaatcaaagatttattctacaattagcatgactaacatgcaaccactttaaaccacatctaggctttgtggctactaaaacacacgatagaagagacatgtaagccattctggctatgtaaagacttccccaaaaatccatataaaagtaccaatattcatttctttcagaactggtttctcaacataaacaatcattctttgcaaagatagttggagctatccaccaaccgctcaacaacttaaattcaaattgatgattaccttgtacctcaaaacacacaattcacactcctcttagaaacatcctcaatcaagcatatataacaatattattgtagtaaaactcaacccatgaaaaacatggtgaaaacaacataggaatacttgtatatcacaagcataataacaacttcattctcacaaatgaccagcgatatctaccgcattaataaaacaatatcaaaatttcagaaataaattatatcaagcattaagccataaac

SEQ ID NO: 46710 - DNA, 2501 bp, Zea Mays
taacaccccgggatccacaaacacccagaatgctactaaactacacatctaacattcatatataaaatttcgacagcatcacctttgaaaattgcataaacggggaagcaacaaagtataaatagatatcatgaaaagaaaacataatggacattaataatctgctatcaatggaaagacaaccataacgacatgaactaaatcaaccagtgcgcacaactagttagaaacaacatcctttgacaagaagtttctaattaaatcatgactgtgcctaagcagcgttattatgagagtgaaggtggatgtgctgctacttcccacttcccttgatgagcaacaagctcctgcattgagtaatgcaagagtgagatgaaacatctcagcaagcgaattgttttgacaagatatttaaaccacaagttgaattaatcaacattttaaaagaatcacaattaagatcagacatacttgtagatacagaactcagtagtctcaatataaccaataccatctcatttccttgaacaaccacaatagtttgtataacacttccctgcgtcaacaatacctgcaaatatcacttcaatgtatgcataggaacacaaagtgtaggtaccctatcttcataatctgagggtataaaaccacatcatctgcaaatatcacttcaatgaatgcatatgaatgcaatgcatatgtcctctgccttcatacctctaagggtatgaagccgcattgtacccctcctcgggcaacgtacgatgctatgttgtaccggtacggtcggaccataggtcacgacccaacttcagatgcaagtgaatcatgcaatgtatatggcatgctacatttatcaatatacttcacttccttcacatacagtacaacctcaaataatacttcatttacctttagatacaataccaacctcaaataatccctcatttacctttaggggtgtgaattaatctcatgagtcatactcgaatcataatcatcatcaatatatgattgagcatcaatataatgcaaggaagtaaagcatcaccatagagtccaattatgaaagaatccaatacttctgaatattagagtgtaggcaatagaaataacaggtcagaacggaagcaaccaccgctacattcacttgccttcatcgaagaagaaaaatgtgctaggcatgatctggagtgtagccacctgctagcgggcataaaacatagtacaaatatttcacaaaaatttgccaacaatcaacaaatcgctcctacacatgaaaccaattcctggtggaaaacctcccactgtgaaccacatgtcatacagcagcaaagctgtttgttaattttgtatctttaaaattataacagtggtgatatcaaacaaatactctatgagtatctacacaatatactctacaacttcggtattcaatggataattaaactctgccatctataagttctaaaacatctgacaagataactgactgaatctgttttagacagcagcatagttaacattcaaaattcgatatctcacaaactactcaaccaaaaatcatgaaattctgctggaggtaagaacttatatccctctacaaaagtctccatagctgggagagccaattcggccatttacctgatgaaacctaccagtgaacagacccgctcatttctgtcagaccaacagaaacagccacagtaaaacaaacataactggagtttcataattcatatgaatgcactctttaacaatctggaaagcttataaaattatctacatcttttcttacaaacccaaggtttaattctgttgataaaattgcctaaatcgtaagagaacacattctgtacagaattaagagactgaaaaactgctataatcaaactgcaataactctctgatctgatgtccgattgaggtgttcttctcggccacggaaagatctacaaattatctacgactcatatatagactttttatttttttgaggtcaccaagaccacataaaactggcatgaacagaaactgtcgaatctgtcattctacggaaaactaaatttgagatcaaaacctaacaccacatctaatccaacctctaatcctttaattcccatgatccacaacctccaaaaacacataattacaaggaggaacaaggatctcatccatacctagggtttccccaaaaaattctacaagaagagatggggaagaacatctccttgatcctctcttccccttcaattcaacgtgctcctcctcttctcgatccttgctgcgcggggggagatctagagggaggtggaagccgtggagaggtgctgtcatgggaggagatgacggccagcccaaggggaaaggagggaggggcggccaagtgtgggaggggggaaaggggtggcggccaagtaggggcaaaagggggaaaaggctaccactagggttttctttgcgggagaaaagaagcggcgccacagatgactccgacttag

SEQ ID NO: 46711 - DNA, 352 bp, Zea Mays
gcacgcggagcagagcttggcaggtagtgggccgagctggctcaaatcggcctaggcacagttttttcctttttttcttttttctgttttcttttactttttatttttagagttcaaatttgaatgcaaagttttgaacttcgcaattccaaatataattttaatataaataatgcttctcctggccataacaatatttataataattactattacccctttgtttctatgtgtacaacttcttttctagagccaaattctcatgtcaaaattaagtttgtttcaactatgaactttgggttttgatgcacaaacaacaaaattccagcatgatgcatgagttcaagtgttt

SEQ ID NO: 46712 - DNA, 385 bp, Zea Mays
ctccaaactaagatttgagattttgaagcaggaattggaaacaagaaacaaaaatagaaaagagaaggaaattgtactaaatccatttactattgctagaattaaatagtgggaaggagaataaataataaataaataaaattacaagatgtaaaaatattagtcagatgagaattgtggattcaaagttcaaacataaaattaaatttagtttggagtttgaaaataggagaaagaaaataaaaaaaagagaaaaaaaacaaaagctcacctgttgcttgggccattttccctggccggcccaccaaacctaatcccgcacggcccaccaacacgatcgcgcgtgcgcttgtctcgtcgctgtcgcgtgggcccaggacgccag

SEQ ID NO: 46713 - DNA, 334 bp, Zea Mays
cccccttcccctttgcagcctccctccactgcttcctcctccctctagatctccccccacgcagcaaggatcgagaagaggaggagcaagatggattgaagaggaagagaggattaaggagatgttctacccccatctcttgcagattttcttggggaaaccctaggtaaggatgggatccttgtttctacctataattatgtgcttttggaggttgtggatcatggggtttgaaggattagaggttggattagatgtggggttagattttgatctcgaatttagtttctgcagaatggcagattcgacagtttctgttcatgccagttttccg

SEQ ID NO: 46714 - DNA, 605 bp, Zea Mays
agcaagaacaccgtggtattcaagttgatcattggatcacttgagaggagttgagtgcaactctcgtccgttgggatgccacaacgtggagtaggcaagttttgtacttggccgaaccacgggataaccaccgtgtcatctctgtgattgatttcttgtggttattttgttttgactcctctctagccacttggccataattgtgctaacacttaacaagtttttgtggcttaagttttgaagttttacaggatcacctattcacccccccctctaggtgctctcagggatgcctttacaaattaggcccgtaacgcgcagcggccacgcagggcctgttacaatggaccggatcacacgcgggcctccatgctggacgaggtcgcaatgatgggacgacctcgtcacaggtcttcgtccgatgacgtgtgggacaaagggtgagcctgcctgttgtcttgtctctgttgatccgacgattacggcgaaggcatcgagcgaagggtggcgtcttcgccttcgccccaacaggaaccctgcctcaataggtgatgaccaggaggagtgatggatcaggcttcaccacactctttatttatcgttag

SEQ ID NO: 46715 - DNA, 267 bp, Zea Mays
tctacgtttcgtattccgcactttgatcacattgatgactatgttatgttaatgactttgtggatgtcttggacatcttgatgtaataaagtaccctttctgctatttactttgagcaatgtgtgatgatgtccaactatgtaatcactatgtacgtgagtttctgatcctggcacatacatggttcgcattcggtttaccttccaaaatcgggtgtgacataagtggtatcaaagccaggctgactataggaccgctaaccttgac

SEQ ID NO: 46716 - DNA, 209 bp, Zea Mays
ggagaatagggttgggccaaaaatgtttccggcgacccacgatggtaatcttctttttttttctttttcttttcctttcttttcttttcttttctatttttagatttcaaatttaaattcaaattttgttgtggagttcatatttggatcaaatagacaaattcacctaccagtatgaacaggtgcatttatttatttatatatgtttc

SEQ ID NO: 46717 - DNA, 467 bp, Zea Mays
ctgagtcagagtttgcgtatgaccaagggcgccgacatcaggaccgcaccggtcagtggaagacgcgcgcaacgaggccgatccgagtaggcgggtgtagtgggtcggaagtggcattacggcccaggtgttgttttattattttcttttctttttccttttttttgttttgttttcctttttatttttgaatcccaattttgaattcaaattttgtagtgaagctcatgcttagatggactgctccaattcaaataccagtctgtccaggtgcatttatttatatatattttcttttatatttacatggtatttctctcattctttacctcatttgtctcttttattttctaagtggtaagttgggtattaaatcccaatttgggcactaacatattttcattaatattattattactaatagatgcacaaacacataaactccaatatgatgcatagagtatttt

SEQ ID NO: 46718 - DNA, 406 bp, Zea Mays
ataaaatatgcatcatgctgggatttattgtgtgtgttcatttggtgacataaataaattaacattcaaatgaggatttaatacctactttgaataaatagaatagaaggagagaaataccataaaacacaaaataaaacttattaataaaaattcatattggcaagttcaaattcaatatctaactcagggacaaatttgccacaaaaggaatttcttttagagttgaagttttgaatttggaaatgaataaaaaaaataataataaaaaaaacagttttcggccaagtggggcctctattccctccattcacccatcctcggatccttccgcgcaacccactactcttttcccttttcgctcgtaccgaccgactggtgggtccctgttgtagtcgctcgtccc

SEQ ID NO: 46719 - DNA, 760 bp, Zea Mays
ctcctcttaaaaacatcctcaatcaagcatatataacaatattattgtaataaaactcaaccatgaaaaacatgttgaaaacaacataggcatacatgtatatcaccagcataatagcaacttcaatctcacaaaagaccagcgatatcaatcgcatcaataaaacaatatcaaaatttagaaatgaattgtatcaggcattaagtcataaacaacttaccatatcaccgtaaaggattagggagggtgaaataatttcatctgcactataaagacattaacatatatcaaagatatttgaacccatacccttcctatatgtgcaagtgtgtcaaatttatcttcaaattgccaagaatctaaagcctatgctttgataccaactgtaacaccccgggatccacaaacaccccagaatgctactaaactacacctctaacattcgtatataaaattttgacagcatctcctttgaaaattgtataaactgggaagcaacaaagtataaatagatatcatgataagaaaacataatcgacattaataatctgctagcaatgggaagacaaccataaccgcatgaactaaattaaccagtgcgcacaactagttagaaacaaacatcctttgtcaaaaagcttctaattaaatcatgactgtgcctaagcagcgttattatgagagtgaaggtggatgtgctgctacttcccacttcccttgacgagcaacaagcacctgcattgagtaatgcaagagtgag

SEQ ID NO: 46720 - DNA, 613 bp, Zea Mays
cgcttgcatgtactcctcatggtcttgcatgcattgaaacaaggcctaagcagtgactggcttcgtttgaaagccttggaagctagtgactagcatgtccttcagcttttgccatgatgtgattgtcactggccgaagggaggaataccatgtctgggccacacttcttactaccatgacaaaggactttgccatgacaacagcgttgcccccatacgaggatattgttgcctcgtggctcatcagaaattgctttggatccgaatgcccatcatacatgggtaactaaggtggcttgtaagactgtggccacggggtagccagcaattctgctgccagaggagaagcatcatcaaaagtaaagttaccatgatggaagtcatcataccattcatcttcgttgaatgggctttcctgatgaagctccctgtgttgaggcattcggtcctggtcatcttgagtaagatgatgcatctcttcaactacttcgtcaatcttcttctaaagatcggccaaccggagcattttctcctttttcctttgaacttactgatggattgcttctaaatccctgatctcctagtcaagctgctcctcatgaagagtcgggctg

SEQ ID NO: 46721 - DNA, 347 bp, Zea Mays
ctagcttttcctgtatctccactttggaaaaagatgctcaaaccctagaccgccccttgaaccattgaagccccaagattggattagtggaagagctaagtagatggccaaatcatgacttaaaccttttgcaaaagttgtagcacatttaaatatttacaaaaaatagtaagggagttattccaaaaaggtcccacaaaaactccaaattaagcacccaagtgaaaagcactcaagggcaacctattttatgtaagtcaaaaatcagccctcttctaaagatcagacatgttcaattagttgtaggtgccaaatcaacatggtccaattgacaaaatggcgccaaa

SEQ ID NO: 46722 - DNA, 219 bp, Zea Mays
tcgccggagttcgctctgcgcacggcgtgccagcggccacccgagccccgaccatcgtggaccggccactccggcccacctccatccaatccaaccccttagctagcctccctggagctccgtgaagctccctgagccttcagactgagcactacttcgccggaggtgccggattgacatcgccggacttcatccgaccgttgtcgcacgtagaccgag

SEQ ID NO: 46723 - DNA, 361 bp, Zea Mays
tgttagaacatgcatttcataaactatccagcaaaaatgataaacaccatgattcctgtaacccgttttgtagtttggatttatttaagcaaactgctgaaaccttgataactagaggaaaaataaaaatacttttggactagggctgagaaaaattgcagacatacttagctagtatctacactgtttaaaaatattaaactccccagtatactaggttaaggaaagattatccattaaaacttgtgttagcccaaaccttaagaaaatgaaaaatgcgatttaaaatgaggaccagagggcaaccatatttttcctcacttgcttaggtgatgtagttcataagaaaattttgttgaac

SEQ ID NO: 46724 - DNA, 2005 bp, Zea Mays
aagtggaatgaggtgacattcaaaagatgttgattgcaataatgtttgataccatgtatgaatagctaggtactcatctagtctaaaggattacactaaaacttgaaaagctaaaatttgtttttatactcagctagtgcttttgccaaaccaaaccccacagccaaacagctgcatggtctagaggtagaggctagactcctcacaccgggtaagtctagctgagtattagtatactcagccttgcttgtggcacaattttacaggtactctggaggatatggttgctggagcgacttggccgtccaccctgccatcgggttggacagtcgagtgggaccccacctcagcgggagaggagcatgaggagtgattggccaggcttccccatcctcccttttatttttaccgttagttaatttccgctgcatcgagaacaatggttacttcttttgaaactccggcgatgatgtaataaccttaagtacttctttaaattatggtttttatgctttattgtatttttctctgtgcctcacctttgattgagtatgtggtacttgatcctgttagtggccttgtcggactagatccgaggaactgacggtttattcctatttaagtgcggccttgcctttaaggcgggacttggacacttaagttggaataattcgggcggttccgccacagctggtatcggagttgtaccacttcagagaaatcaataaatcaaaattaccgacttttcaaaaagtaaaacttgcctagaaaccagtatcggtttggttgtcaaagacgatctggatagccttaggacgtgaagccttaggatactagatgggtagctaggtggctatttgagtatgccgtacaggctactatgatatagatgggggatttctatatccctatacttgatgtgaggacgcttaggacgagcatgcatgcattctttttctatcttcttagtaagatatcattattaataagaagctacataaacaaggagtcacccgtaataaaattttaaatctataacggggatctccactttaccctagaaaggctagattcttagaaatttatttttctagtcttttgcactagcaccatctatttttggttttctttctttttcgcttacacttacccttgcatagatgacttcccatgtgcccactgacggagggtttgcactttcccacacgaacagtctcacacgagagggttttcccctcatcttgtgggaggtactgcagggagcaggttacaccatgcctccccagcacgaggtgcagttgtttgaggagcaccgggtacctcgctgtagggtgaggatgaccttggagcctcatcccctacagccaggatggcgttcgctggactcatagtctttcggtttctgggccgacgacactatagaatccacgaccatgcacgtgctgacgactttctgtggatttcaccctctggagatgtcaacccaccccatcgtcttgttctccgctaaaaaggaggatgacccgatgtggaaggatcgggttgaccatgccaaggatgtgtgggctctctaccctggacacaccgctcacttgacagttcggtgcatgaatgccctgtatcgtctgcaggccttgagaggcgaggcgatgtcccagcttatgggcctggtggtgttggggacttgttctcaaatgctatgaattaagaacaaggcaacacagaatgttaaatgctagtgcccttcgtcctacgaagcattatttcccttaggatataatgatcttcagacgaaggttatggaggacataccttcacgatcgcagtatatgttaataaaagaagaagcatatgaaatataagggacaatataaacaatcattatcaactcatctttatattactattatggaaaaatagaaatgatatcaaattacaaatgtaccttcggcttaaaagaaggtaagagtacaagcgtgacgcaaaagcaaatgcccagtcagcg

SEQ ID NO: 46725 - DNA, 395 bp, Zea Mays
tcggaagccgaaggcccccagcagtagcccctcgcaatattaatttgttagaatgataaatttagattgcggcatggacgaaggccttaagccgaaggtccgaaaaaacaccttccctttgctagaatagcaatcattcactgacaagcggggtcttccaattttcaatgcactgagcgtataaataagagcataccgcgagctcatttggtacggtctcttgccatctgctcttgcttactcaatttttagctcttgcgcaccaagacttgcttagcttttaaagtttttaagcttcggatttgaaaacagttttttagcgttttcgacgatgtctgaagacaagaaggctgctgccgagatgaagctgagtctctctgaagagaaaaacctgg

SEQ ID NO: 46726 - DNA, 2663 bp, Zea Mays
tttagaaggtttatctgaagatactgatgatagcgacagctatgatgcagatagtggtggccaagactccgaagatcgaccttggcgaccaagccatgcggttttcggcaaatcaagtattaaagaaagtcatcttgtcaatatgaggggaagatatttccgggacttatccattgtgagggccgacgaaggagagaagacttgcccgtcccctgaggaaaatgaagtcgtagtgttccgaagctttttgaaagctgggctacgatttcccctgagcagctttgtcgtagaggtgctgaagatatttgaaatttatcttcaccagcttatccccgaagcgatcataaggatgaatattttcgtgtgggctgtaaggagccaaggcttggaacctgatgcaaagagcttctgcaatatacacgaattgttatacaagacaaaaccctggggtaaggaacaatatcacaacaactttggctgctatagcttcggctctcgctctgggtcaagctgcccagtgccgacctttcggaagagatggcccggcgactggatgacagaatggttttatgtgaagaatgaccttaaaacacgggaagatattaaaggtataattatgcaccctatttggcaaagcttcggcctacggaggccgaaggttgaaatgaatgaagctgccaaagaatgccagagagccttcggagttatttgctcttttattgaaacgagggatttggtccaagagcatatagccttcagagtgtggcctcttgcggataattgggaaatgtcgcaagaaattattaaagaaactgacgaaagtgggctagtccggctgaagtacacattcaagtatggagacaaattcgttgaaccagatgatgattggttaaagagcattgagactgtaagtgatgaattgcttggggcatactcgaaggccgaagacactgcattgtcagcggccttcggaggccgaaaaaggaaaagactcaaccgggtatttgatgcaatcgggttcgtctaccctgactatcgttatcccattcgagggcagaaaagaaaagtcacgacttctgcgaaagaagaagctgtggctgctcctagtgagccagcaccgaaaagaaaaaggataaaggtcctcacacatcggccacgttatattgaaccagcctcggtgcctgagttcaccggagagacctcttcggccaccgaggctgaagagccaaccttgctgccagaagtcgcagaaatggccgaagcaccaataacaacagaattggaggaaccaaagattttattaccagaaaccaaagaggtggccgaagcgccatcgacagaaaaaatggaagaagcaaaaggatcaactgagggatcaaaaatatcagaaattttaagtccttcagtagaaattgaagcagcaagaattaaaaaggggccaacagtgaccccaaaaagaaaaagaatggtcaatgtgctagatgttctggagacaattaaatcctcaagcacaactccgaagaagactgttgaaacttccgaagcggaaactgaaatttttgatactaaagctccaaagcaacaagctgaagttgaagctgggccttcagagcccacgaaggtaaaatccttggaaaccgaggaagaaaaaatgacggagccaaatcttgttgaagaaatcagtgctgttgcccccgaagcatcccccaaagtccttgattatattattcgacatgcttcggggaaaaagttgtctgaaaaagaaaagcaagaggcccagttttacgcccaaaaactgaaatatccaaagggggcgttgatattcaacggcagcggagaagaagacttcttgtattgtctccctgacagcaaggagatttctgtctgtcgagagatgagcaaaagcttcggtttcccgacactagaagacgagctctcggtgttgtcgaaaaacgagctggccgacagcttggcgtacaatagcttaaatgtgcaaaaaatgaagtctttgtattttttcttgaaaccaaaatttttcgtttgcttaaatttattgacgcacacacatttatctttgcagggccttatacttagcaatgccctcagggcccaaaaagatgccgaagacgaagggtgtgttatggccctgagcaaccttcgttcggaagtaattgaactaaggaacgaaggtctcgaaaaagataaaatattacattcattgataaatataataaaagaagacgaagctacttttaaaggtcaagctgaggctcagaagcgtgaaattgaagatcttcgaaaacaactagccagagctaaagaggaacgcatacttgaagaaacgaagcgagaactcagcgaccaatgggcgaatcatttagaaggaactgttgaagagcttcgttcgtccaagaaaagatgctatgtcaaatctatggagtgtgttaagaaaatgaaaactagcttcgccagcgttggcgcattctcgagcgaagaaaactttacaagaggcaaccccgaaggtcccatcgaatggatcaatcacgaagctgaggcctttgaggaaattttaaatagccgtggagacatatgtgcttttttgggtgccaggggaattgccaccattttggagaaaaagggctgcgagcatgtaaagattttag

SEQ ID NO: 46727 - DNA, 2314 bp, Zea Mays
caaccccccttttccccacccttggccgcccctcccccttccccttgcagccgccctccactgcttcctcctccctctagatctccccccacgcagcaaggatcgagatgaggaggagcaagatggattgaagaggaagagaggatcaaggagatgttctacccccatctcttgcagattttcttggggaaaccctaggtaaggatgggatccttgttcctccctataattatgtgcttttgaaggttgtggatcatgtggattgaaggattagaggttggattagatgtggggttaggttttgatctcgaatttaatttctgcagaatggcagattcgacagtttctgttcatgccagttttccgtggtcttagtggcctcacaaaaataaaaagtatatatatgagtcgtagataatttgtagatctttccgtggccatgaagaacacctcaatcggacatcagaacagaaagttattgcagtttgattatagcagttttttagtctcataattctgtgcagaatctgttctcttaagagttaggcaattttatcaacagaattaaaatgtgggttggtaaaagaagttgtagataatttcataagttttccagattgttaaagagtgcattcatatgatttgtgaaacaccagttatgtttgttttactgtggctgttgctgtttgcgtgacaaaaataagcgggtctgttcactggtgggtttcatctagtaaatggccgaattggctcttccaactatggagacttttgtagagggataaaagttcttaccgtcagcagaatttcataatttttggttcagtagtttgggagatatcaaattttgaagttaactaggctgttgtctaaaacagattcagtcacttatcttgtcagatttttagaacttattgatggcagagtttaattatccattgaataccgaagttgtaaagtgttttgtgtagatactcctagagtatttttttgatatcaccactattttaattttaaagatacaaaattaacaaacagtgttgctgctgtatggcatgtggttcagggtgggagtctttccactgggtcttggtttcaagtgtaggagtgttttgttgatcgttggcaaatgtttgtgaaatatttgtactaagttttatgcccactagcaggtggctacactcgagatcatgcctagtacatttttcttcttcgatgaaggcaagtgaatgtagcggtggttgcttccgttctgacctgttatttctattgcctacactctaatatttagaagtattggattatttcataattggactctatggtgatgctttacttgcttgcattatactgatgctcaatcataaattgatgatgattatgattcgagtatgactcatgagattaattcacacccctgaaggtaaatgaagtattatttgaggttggtattgtatctaaaggtaaatgaagtattatttgaggttgtattgtatgtgaaggaagtgaagtatattgataaatgcagcatgccatatacattgcatgattcacttgcatatgaagttgggtcgtgacctatggtccgaccgtaccggtacaacttagcatcgtacgttgcccgaggaggggtacgatgcggcttcatacccttagaggtatgaaggcagaggacatatgcattgcattcatatgcattcattgaagtgatatttgcagatgatgtggttttataccctcagaggtatgaagacagagtacctacactttgcactcctatgcatacattgaagtgatatttgcaggttttgttgacgcagggaagtgttatagaacctattgtggttgttcgaggaaatgagatggtattggttatattgggactactaagttctatatctacaagtatttctgatcttaattgtgattcttttaaaatgttgattaattcaatttgtggtttaaatatctcgtcaaaacaattcgcttgctgagatgtttcatctcactcttgcattactcaatgcaggtgcttgttgcacatccagggaagtgggaagtagcaacacatccaccttcactatcataataacgctgcttaggcgcagtcatgatttaattagaagcttcttgtcaaaggatgtttgtttctaactagttgtgcgcactggttaatttagttcatgctgttatggttgtcttcccattgctagcagattattaatgtcgattatgttttcttatcatgatatctatttatactttgttgcttccccgtttatgcaattttcaaaggagatgttgttgaaatttt

SEQ ID NO: 46728 - DNA, 313 bp, Zea Mays
aaaatgtgcaatgtgtgcaatacttcaatccacattccgagagttttattttatttcctttttgtggagcccaacttatttaaataatagaatttacctcaaaataatttattttgtcgatatgtattttatttatgttactattatttttgaatttattatattttttaataaataaataaatatatacatctactttaagaaaaaaagaaaaaaaataaaaaagaatgctcggcctttttctagggcgatgttgtcttctctcttcactggaaacacgacgaccaccacctgtttttatcgtgcagtgccc

SEQ ID NO: 46729 - DNA, 376 bp, Zea Mays
gccccccccacttctcttcccccttggccgcccccctgcccatctcctcctctctcaattcttgcagccaccaaaccctagccgcccccctctcaattccctcctcccaaggtgccaatccttgccgctcggatcatcatcgtcgtggtgcgagtcttcaatcgttttggtggagggaagaagggaggaaggaaagggggagaatccaaggtgatttttgtgttcatcccttgttcatttgcgctgcaatttaattgattagaggttgcgtttgcgattggggtagaggggggctgtccagaattttaggtggtgggtgaacagcagtagtctagcagtttctgtgtttttttcgtgaggaattaagggaaatcag

SEQ ID NO: 46730 - DNA, 506 bp, Zea Mays
cagaattcgaggtcgaattctttttaagaggggtagagtgtgatacccggtttgcaaagaagagaagttgggggttgttctttttgttttttttcctcatccggttgttgttttggggatttgggattttgtggaaaacattcacaactagggcagtggaatttatttggtttgacgcttgcgttgcggtcgggagctgtcgcgtgggttagttgggccgcaattggagtttcgggccattaaccctcccaaaccctagccgcctccctcctaaccccgtccccccatgtgcagccgcccccccacttctcttcccccttggccgcctcccctgcccatctcctcctctctcaattcttgcagccaccaaaccctagccgcccccctctcaattccctcctcccaaggtgccaatccttgccgctcggatcatcgtcgtcgtggtgcgagtcttcaatcgttttggtggagggaagaagggaggaaggaaagggggagaatccaag

SEQ ID NO: 46731 - DNA, 1018 bp, Zea Mays
attgtggatgatcataatttggtaatgatatatgtggttgattcccatctggatgaagttgaagtgtctttttgaatcatgttatatgaagtgttgtaggcatgacatgcacatcgcatcatccatcttgcattttgaagttatgtcgtgatcttatggtccgaccgtaccgatacatttttagcatcgtacgttgcccgatgaggggtacgatgcggcttcatatccttagaggtatgaaggcagaagtcatccttgcatttgcagacatttgcactcatgaggtatatatgaagtgtgacattactatgttactattgtggtttctacctgcgaggtgtggtgactaggtgtgttgtacgttgtatacgtgctgcacctttcgtaataagaaggttgtggaatcaagtggtggtaaaacaatgttcttatgtggttaaacagtttgatattattttacttgctgagatgtgtcatctcactcttgcattactcaatgcaggtacttgatacatgttgggaatgaggggagtagcagcacgtccactttcactctcacaataacgctgcccatgcgcagccatgatttaattagaaacttattgtcaaaggaagtttgttttttaactagtcgtgcgcactagttaattcgcttcatgtcgtatgtttaacttctctttgctagctgattaataatacttagtatgttttgtcatgatatatgtttatacactgttgccccctcatttatgcaattttgcaagggggatgctgccgaaattttatatatagatgtcagaagtgttgtttagtagcattccggggtgttggtggaccccggggtgttacaacatggcattcattcttatatatatacctatatggttatatttagaaaacgaagaagagatcaaagtgaccgaagagaagacaccaccaccttcggaatctcaggccggaaattgtttctacttcgatatctgcgggtccgagcctgactcacctactaacgaaggca

SEQ ID NO: 46732 - DNA, 643 bp, Zea Mays
gctacatatgtcgtgtgatcagagatccccagctgggtattaatcgatccggatcgctgttacttctcggacatgaagacttggtcactgacctacatgtagcaatccagtgaactgaagggatgataaaaagacggctagtataggccaagtgcttgaactagggtagaaagaactctagatgcaggtaaccttacttagcctgacaagtaaaactggatttttaaggatccactcatagtaagcttttctgcaaaatagagtctttgattcttgagaagccataccttgaatccctctagccagcacacccttgagagtcttttctttagtcgggtaagtcttgctgagtaattccatgctcaaggttttattccctattgtttttcaggttatagttttgtgctgctgatgatggtgttaagtgccggtgggctcggccttcttataagtctaagtacttcttctatacttcttattgaggatggtcacttgagctagcatatatttcaaacttacaaataatttataacatttcaaagtttattcctttgaaccacttttgtaaccactccgataaatacaatgtaaacttgatgtaacttgtaaaatttggtaataagatttccgctgcaaaatgttg

SEQ ID NO: 46733 - DNA, 255 bp, Zea Mays
cttttgagcctcgcactttctttcaataatctgcattgttgaatttaagtgttgtcgcgtcatttgttgctggttacattgtgttttagttcggattccttctttcttccacttgtcaaaccctagcgtgtcgtcacaatcttctgtttgatcatgtcacccaccgagtcaacaccgtgtccttgtttttcttctttggttacaaaaaaacagaaaaaagcagaaagaaaaaagaaaaaaggaaaataaaaagaa

SEQ ID NO: 46734 - DNA, 193 bp, Zea Mays
ggattctccccctttccttcctcccttcttccctccaccaaaacgattgaagactcgcaccacgacgacgatgatccgagcggcaaggattggcaccttgggaggaggggattgagagggggggctagggtttggtggctgcaagaatttagagaggaggagatgggtaggggggcggcggccaagggggaag

SEQ ID NO: 46735 - DNA, 730 bp, Zea Mays
attgaattaaaatgaattgttgaagttggtaaaggttgtgcttagtgcatattaccccttcataaaagagtgtcgttttaagacattgatgttgatgtatggctgcattcaaattcgatgttgtgaaatcgtagtgttgattgcatctatggcttggtttgagcttcattacatgttggttcatccttgatgtcaggttgtgtagtttccttagacaattagtccaaggtagaagttcttgtgttaattaagaccaataatggacccatgtttcgaatggtggtgctatatggggtaccttgggtgttttgcttggagtggtcgaattcgaggacgaattctttttaaggggggtagagtgtaatatcccaaaaaaaaatgttgccaaaggtttatcttcggtgcgtggatgtggggaaagagttgtgggccgttggatgcaaagtcaagagacatctgaggcgtcgtttctttctcccacaaaaccctagtggtcgcccccctatttttcccttttcttggctgccaaccccccccttttccccacccttggccgcccctcccccttccccttgcagccaccctccactacttcctcctccctctagatctccccccacgcaacaaggatcgagaagaggaggagcaagatggattgaagaggaagagaggatcaaggagatgttctacccccatctcttgcagattttcttggaaaaaccctaggtaa

SEQ ID NO: 46736 - DNA, 2046 bp, Zea Mays
cttagtggcctcaaaaaaataaaaagtctatatatgagtcatagataatttgtagatctttctgtggccacgaagaacacctcaatcggacatcagaacagaaagttattgcagtttgattatagcagtttttcagtctcataattctgtgcagaatctgttctattaagagttaggcaattttatcaacagaattaaactgtgggttggtaaaagaagttgtagataatttcataagctttccagattgttaaagagtgtattcatatgatttataaaactccagttatgtttgttttactgtggctgttcctgtttgcctgacaaaaatgagtgggtctgttcactggtgggtttcatctagtaaatggccgaattggctcttcccactgtggagacttttgtagagggataaaagttcttactgccagcagaattttataatttttggttcagtagtttgggagatatcgaattttgaagttaactaggctgctgtctaaaacagattcagtcagttatcttgtcagatgttttagaatatattgatggcagaatttaattatccatagaataccgaagttgtagattgttttgtgtacatactcttagagtatttgtttgatatcaccaatgttttaattttaaagatacaaaattaacaaacagcgctgctgctgtatagcatgtggttcagggtgggagtctttccactatgtcttggtttcaagtgtaggaatgttttgttgattgttggcaaatgtttgtgaaatatttgtactaagttttatgcccgctagcaggtggctacactccagatcatgcctagtacatttttcttcttcgatgaaggcaagtgaatgtagtggtggttgctatcgttttgacctgttatttctatcacctacactttaatatgcagaattattggattctttcataattgaactctatgatgatgttttacttgattgtattatgttgatgctctatcatatattgatgattattatggttcaagtatgacccatgagattaattcacacccctgaaggcagatgaagtcttatttgaggtttgcattgtatctaaaggcatacgaagtattatttgaggattgcattgtatctgaagacagataaagtattatttgaggtttgtattgtatctaaaggaagtgaaatttattgataaatgcaacatgccatatacattgcatgactcatttgcatctgaagttttgtcgtgacctatggtccgaccgtaccggtacaacttagcatcgtacgttgcccgagaaggggtacgatgcagcttcatacccttagaggtatgaaggcagaggacatatgcattgcattcatatgcatacattgaagtgatatttgcagatgatgtggttttataccctcagaggtatgaagatagatgacctacacattgcattcctatgcatatattgaagtgatatttgcaggtattgttgatgcagggaagtgttatacaacctattgtggttgttcgaggaaatgagatggtattggttatattgtgactactgagttctatatctacaagtatttctgatcttgattgtgattcttttaaaatgttgattaattcaatgtggtttaaatatctcgtcaaaacaattagcttgctgagatgtttcatctcactcttgcattactcaatgcaggtgcttgttgctcatcaaggggagtgggaagtagcagcacatacaccttcactctcataataacgctgcccaggcgcagtcatgatttaattagaaacttcttgtcaaaggatgtttgtttttaactagtcgtgcacactggttaattcagttcatgtcattatggtcgtcttcccattgctagcagattattaatgtctattatgttttcttatcatgatatctatttatactttgttgcttccccgtttatgcaattttcaaaggagacactgtcgaaattttatatatgaatgttagatgtgtagtttagtagcattctggggtgtttgtggatcccggggtgt

SEQ ID NO: 46737 - DNA, 653 bp, Zea Mays
tcagtctcataattctgtgcagaatctgttctcttaagatttaggcaattttatcaacagaattaaactgtgggttggtaaaagaagttgtagataattttataagctttccagattgttaaagagtgcattcatatgatttgtgaaactccagttatgtttgttttactgtggttgttcctgtttacctgacaaaaatgagtgggtctgttcactggtgggtttcatctagtaaatggccgaattggctcttccaactatggagacttttgtagagggataaaagttcttacttccagcagaatttcatagtttttggttcagcagttttggagatatcgaattttaaagttaaccatactgctgtctaaaacagattcagtcagttatcttgtcagatgttttagaacttgtagacggcagaatttaattatctattgaatactgaagttgtagagtattttgtgtagatactcctagagtatttgtttgatatcaccgttgttttaattttaaagatacaaaattaacaaacagcgttgctgctatatggcatgtggttcagggtgggagtctttccactgggtcttggtttcaagtgtaggagtgttttgttgattgatggcaaatgtttgtgaaatatttgtactaag

SEQ ID NO: 46738 - DNA, 123 bp, Zea Mays
gactaatcaagtattggaagatatattgagagcttgtacccttcagcatggtagtagttggacaagagtctaccttatgctgaattctcatataataatagttatcaggccagtctgaagatg

SEQ ID NO: 46739 - DNA, 1496 bp, Zea Mays
tctaaaatttctgtcacgccaatagaagttgccgaaggggtctctgcagaatgcttcggcggagaagatctttcttcttcgcggctcgatgatataatatttcttttcttagatgctgaaggttctggtgttaacttcgatctttttgttaaccttttcttcttgtccttacgactcttttctttttcactcccccgcctcttcgctaagtctatcatagtcaggatactcaaaggcaagggcatccatcacttgatttagcatttgtttctctcgtgtgccgaaggcaacagtcattagttggtcctctttgtcagtataatttccaagtatttcattacacattgtctcaatgacctccaacaattcggcacaagggccgctgaaggttttctgaaatttaaagcgatatggaagtctaacaatctcaaatttctttccttcgtctttcttcttcggcattcccctcccacctaataaaattttgtacgtcgagtattcttgaactaggtcccgagtactgatatgctcggcccataaccctaaattctactttggctagttggcatggggagccaagttgcatgttgcataatggccttgtcatgccgaagttcggtttcaagggactcatcaccatactcataagcttctcccttctcttctcatcagctttcacataaaaccattcacttgtctagccagtgggccacttggtgcggtatccttttggtatgcaaaattgtagcatccaaagttcttttgcagaccgtctgctctcgccttggtctagtaatggagttctggactctacagaatccttcaacattagcactccttccttggcttcagagagcccatatgtacacactaagcttgactatagcatttggagtcagttgatgaagatagatttcaaatttcttcaaaacttcacccatcatttcatacagagggaactgaagccctgctctgaagaagctcttaaaaacaacaacttcatcatatcttggctttggaaccacttcgtctctggcgaaccttatcaactcatcatcatttttccaaaatatccaagcttcttcattaaaactaaatcttctaccttcatagtggatttcccaaattcaatttggctaggcttgctcggactctatgccatcatcctcttcatcatcactagcaacttccgcattagtatgttcagcttcggcaataacgtcatccttctcgggaatagactcttctccctcttgaacaaccaacccaaagtgcctcattacttctgagattggggctatcacagttgcctcagtctcttcaccttcatttgtcagcctagcagtatacctgatcctagccatttcaattcttaagacgaagctaacttttaactaactcgacgattgtttgaagattaaacaacaagtgcacagacaacaaaagcttcgactttagtaaaaattttcaatagcacaacgatgcaatagcaatga

SEQ ID NO: 46740 - DNA, 794 bp, Zea Mays
ccgcattgctcatactgactgatcggtggaccggtacaggccgtaactttttattcggtttttaataacaagcccagagaaggtgtttttcggaccttcggcattcagaagccttcgtgtgtttcgttgatcgagctcgttatgaaaaaacgacctagcaccgccaaggagctactgttggggatctccttctccgttgaatgtcctcatgacgtaggaatcgtctacaactaaatgggctgaacgccaaagctgcaacagacatgtgtaaaatgccgaaggttcatagcttcgtcccaagacgattacaaaggtcaaaagcgatgttgagccaaagagtaaaagacccgttaatccctgatgtttgtattaggataatatgtacgtatcatggtcataaatatatgtaacacctaaaaatcttattttgatatttataaaagtttctcaaaaaattcgatttaaaacatcttttaataatagatttctttctttataaaggatatctctctaaaataaataagtgatagatactatatttttttggttatgctttaattggatcatacatttaaggaattattccctttcactcgtatttgttttttattcccctagccggagatgtcatggctgacttcacccatgtatcaatgacgcgtgaagaccgcacaacaggactgttatctccttcatccatgcaacaaaattttgttgagaaaaatctgattccttcagtgctccgactgggtatcctcttagggaacatatctggtgctcaaaggggtatggtg

SEQ ID NO: 46741 - DNA, 737 bp, Zea Mays
cccacggcctccataaatagactgccatattctttctccggtttacagaagcgagcccagtcgtcgttcccaattgcgcgcagagagagagagagagagagagccgcgagagttggagcgaaacatcaacgtttggatctaggggcacgagcaagcaagagggtagggatgccggcgtcaatatatcacatacgagtaactgagtaaggtaaaagatgaccacacatagatcatatatataatatttatttaactcataattctttatgtaaccttgttctaatcaattagatcgcgtcatgtcacctatttttttgcagccctactaatttattaaacatgtgataattttgtactagacgttagatttattccattcaagttgcattagtttcatagtaattttgtgtacgtagtaatgacatggtattgatcatgccacatgttttaattaattaattgtttaattaatgttaattagctaagcaatatagttaatctaatttatagttctatcttacacattttataaataattattaaagtgattaataccaactcaaatatttaaatttaatacatttagtttaaatgcaatatatgttagatcatgtctgttagatcaattgcgcccaaaaaacttgttttatccataagttcttcgttttaaccctgattttagtggttctcgaacctacgatctcatagcatcgcgtagaatatttttacgttgttcg

SEQ ID NO: 46742 - DNA, 1242 bp, Zea Mays
ccaaagaccaatttggtgaaagcacctgggaatctcaagtcacaggcaagttatgcccttgatcacttttctctttacccaataatattctggttaatcattgtgacatgctcaggttaatttgatgggccctaataggattacctagatttgtttatcctacaccatgtttaccactgaacttttggatagttagttttgctatttctctacctggttttgggaaattaatgttacattatgatcatgttccgttatgttgttgttttaattattgttcatgacaagatcattgtgtcaattggaacatggagcttaacttgagatatccgtgctaccacaagggtggaatgggacgcctttggctgactaattagaaaagctagtggaggactaccttacccgaaaggggcaagggcggtagaggagctacgtttagggaggttctcaggtcgatcatgttgtgatagcttttcgaacgagggattcctatattgcccttcttagaaaccatagcgggttttctgaagctagtggaactttataaaggcctcgtagtggatccctagccattcacgttagaagtgtctaagggccttccaaaccctggctagacgggatacacgactagtgggtaaagggcacaacctctgcagagtgtaaaactggtatatcggtcgtgctcacggtcaagagcgactcatgactctcgcatgattaatttatggacttaaatttaatctagtatatgcattgcattgtgggatttattgataattgtgatctattatttaattgggttggtatctacttattcttagtaactgctaataaaattttgaccaactctaaaagcaatgctcagctttaaccatctcctttgtaagccttacacttcacatgagctcccacctttggtgagttcatgcacattattccacacaacttgttgagcgatgaacgtatgtgagctcatccttgttgtactcacaacccctaggacaagaacatgtatcgcaggatgaggcgcatgaaggatgctgtgatgagttcatgagtggtctaggccgtcgtctcccagtcaactatggttgctggatcgttgtcttcgtatgatgtaattatttatctattttgtacagaaccctgttatatattaatgttgtgacattcatttctgtactatgagtcatcatatgtgtgagacttgatcctagcacacttggtgaagttcgcgcccgg

SEQ ID NO: 46743 - DNA, 202 bp, Zea Mays
cggaaaggtacttttattacatcaagatgtccaagacatccacagagtctataacatagtttaacattatcaaagtgcggaatacgaaacgtagaagataatgccttcacaggcagctgactaggggtttgccactatgataactagaactcgtcgtagtcctgaaactcctcaaagtccttcatgttgccagcatctcctc

SEQ ID NO: 46744 - DNA, 178 bp, Zea Mays
agcggcggcgttctcctgtaacgtaaacgtgagagccacggagaggcggagagcaggcagagcataggacggtcctgggccgtggacgtgcgtgtctcgtgtgtgtgttttttttgttttttctttttttatttacttttctaatttcaaaaacatattttaaataaccctaaaaatc

SEQ ID NO: 46745 - DNA, 108 bp, Zea Mays
taggaatcaaggaaaggcttgagcaaaaatcaacttagatacttttgcataaatagcttactaaagtgagtccttactttcaatattttaatgccgaattaaatatta

SEQ ID NO: 46746 - DNA, 77 bp, Zea Mays
gtcccatctggctcgccccggtaaacaagtaatgatggcacccacgtgctcccatgacgacggcggttctcagcccc

SEQ ID NO: 46747 - DNA, 308 bp, Zea Mays
aaaatgggccaggagggaaacggaccaaacgcaggtaggtaagacttttatcttttcagatttcattttctatttttctatttttattttccatttttaaattcctaattcgaatttgtaattcaaacttagggtcaaagttatcatgcacaatcaaaatatccagcatgatgcaaagtttttttatttttatttttatttttattttatttatatattcattgctttattcattttaagcaactacttccaagtgtatattttatacccaccaaatatatgttttaatgaaataatttatattgcac

SEQ ID NO: 46748 - DNA, 339 bp, Zea Mays
attacatcaatgggaattaagacttggtttacaatttagaattttgaaataataaagaaagagaggaaagatgccatgaaggaaatacatacataaacaattataccttgttcatcactagatttgaattcgtacaattgaaatatgaatgagtcaaaaccaaaattaaaagtcaaaatttgaaattcaaaatgagaaaaaggaaaaagaaaaaaaaaataataaaaaggaataggcgcgattgggcccaatcacgctcgggcagcccactttctctcccctccgtgcagcccagttacttacacgcgccattgcgccgataggtgggctccagtcgcc

SEQ ID NO: 46749 - DNA, 232 bp, Zea Mays
cctagaataaggcatgtatacgttaaaccgcctgaaatcagctgttttgcaaaattagttgagtgaacagtcatgtacctggtgtcagtaggtctctagttgtgaaaacatcgtctgccttgaatgtctcattcctatgcaaccaatcgctatcatcatcttgattcacatttacatcttcgtttccatctaaaaaacaatgcacacgttactttctaagtgtaggtttgtg

SEQ ID NO: 46750 - DNA, 146 bp, Zea Mays
gtgctacagccatctgaaagactaactatgaaacacaatgaaaaccaaaaataagattaatagatattcactaatccacaagaggatctattaaaataattgtttcaatgatcatatacctgaaccaagatgatcatatacctctg

SEQ ID NO: 46751 - DNA, 463 bp, Zea Mays
aacagagaagcgtgagtctgcggcttccaggaaaaggggtagtgactggcttgcgggccccacgcgccatacacacagccagcgcgcgagatggagctggatagatgggttgcgcaagggaaaagaaaatggggttgggccggcagggaaggaaatggcccaggtgggttcttttctatttttctttttttattttttgaattacctttttttttctaaattcaaacatactatttgaattccaaaatgatttgcagatttcacaggtcatgtgcacaaaatagatattccactataaagatatatttatgtttttttatttatttttatattcctcccctttttctcattattattatattttaattcatattattgttattcttattaagtgcaccaacaaacaaaactcatcgtgatgcacaattaatgacatgtcctttattaagtatttgtttttttt

SEQ ID NO: 46752 - DNA, 510 bp, Zea Mays
cctgacgaagggggtccacaacagagaagcgtgagtctgcggcttccaggaaaagaggcagtgactggcttgcgggccccacgctccatacacacagccagcgcgcgagatggagctggatagatgggttgcgcaagggaaaagaaaatggggttgggccggcagggaaggaaatggcccaggtgggttcttttctatttttctttttttattttttgaattaccttttttttctaaattcaaacatactatttgaattccaaaatgatttgcagatttcacaggtcatgtgcacaaaatagatattccactataaagatatatttatgtttttttatttatttttatattcctcccctttttctcattattattatattttaattcatattattgttattcttattaagtgcacaaacaaacaaaactcatcgtgatgcacaattaatgacatgtcctttattaagtatttgttttttttaaatgaggtgttcacatgaagtaataaat

SEQ ID NO: 46753 - DNA, 306 bp, Zea Mays
cgttattctacgtttcgttttcgcactttgatttattgtaaagactatgtggatgtctcatacatatgatgtaatcgactatttttttccctttttaatactatttgagcactgtgtgatgatgtccatgttatgtaactgttgtgtacgtgaattgctgatcctgacacgtacatggttcgcattcggtttgccttctaaaaccgggtgtgacattgggtcgggccacttcgcggatcgaaacccacgacacgcacgaccctcaaacgggctccaatcgcgaatcgaaatccgagacggaacgag

SEQ ID NO: 46754 - DNA, 395 bp, Zea Mays
gttaggactcttttctctttggctttttaggttatagagcgaacaaaatgaatctaaaggtaggattatacctcacgagcaacctgaatcttgataccacttgctagaaggcaagtgcacaaaaagccgcacaaaacaaagaaaaaaatagaaaaatagaaaaaagaaaaaaaaatgtgcacataagcaggaacaccattgatctgtgcagctctatgattcatcttatttccatcatgtttcctggttgtacctagatccttgttatcttatttgtgtcttcctccaactgttctaatacattctctaggcccaacagctaggacgagtattttggacacttattcagcatttctatctgttactgacttgtgtgccacaaatatatattagtg

SEQ ID NO: 46755 - DNA, 449 bp, Zea Mays
tgacttcctgcttcaagatttttagcaaacacccaacgatagcgaagggcggaccggcgaggcaaggacacagatactgctccggcgtcctgctaatgcaccacaacgatgcaatatctgagacaacaacgaggttgatgcaggagcaagctcgtgcgtcaagctagggagtcatcggtgagcgaggcgactagcaccagcacggccgaccgacgagcaaggtcaaaatccgagcgccatgggagatggggttcggcgattcaacgttggttgcgaagagatgaaccagagcgcgagcttgagggatgcgacaggggaagacggagcacagccatggagaggaacctcgagggagctgtgcgcgtccatgacgagctaggcgtcgagcacagggaggactgggagcaagggtgcgacggccagttgccatgaccaagcagagaatggcg

SEQ ID NO: 46756 - DNA, 367 bp, Zea Mays
aacgaccgggatgaaacaaccgtatcctttctccttcgttgttttttgtttctgttttttttttgacgtaaccgaaggagaaaaacaaggaaacgatgttgactcggtttgtttttttttctgttttttttttgtaaccgaaggagaaaatcaaggaaacggccgttgactcggtttgttttttctgttttttttgacgtaaccgaaggagaaaaacaaggaaacaatgttgactcggtttgtggcgtgatcaaaggggagatggtggcggcgctagggtttgaatggtggaagaacacaatgcaaccagcaacaaatgacgcgaaagcacacaaattcaacaatgcagattattgaaagaaagtgc

SEQ ID NO: 46757 - DNA, 388 bp, Zea Mays
gttagttacaaaagcaagctgaataatcgttcaacggtggtaccgtgctggtcctaggctaaaccatgctagagacgtgagcctaggcacaaagctagtcactgaaaaagaacaactagcacatcacaaagagaaacaatagatttagagattcagcccccttctttcttcttcttttcctttctttcctttttttttcttttttttcttcttctttttttgctagggcttgaacccttttttttactatgacaacccaaacaataaggatattgctaacaacccctttgaaatcagatttaacaaatcttgttaatatagatggtctagaaatctctatgatgattgcggagcgctcagaatgaattttgaggcaaggtcagatccg

SEQ ID NO: 46758 - DNA, 307 bp, Zea Mays
taagccctagcctcataagcattcatattactcacatgcataaactaagcttgctagtggcacctcacatatgtagtctaacctagcatcttttttgcactaggaacatcttatatatatgtatatataagaagaaaagggaaataggaaaagaaatgataaaaaataaaaataaaaaataaaaagggaaaaccctccctcccctcggccaggccggcttcggcccatgcccgcgcgcccgctctctcccgctctcaccccgctctcctccctcacggtccatctctagcccattctctgcaccgag

SEQ ID NO: 46759 - DNA, 420 bp, Zea Mays
gtttttgccaccacggatacatctcatgtcggatttggaagtttaaatacaatctggaaagcttatcttatattctttccaacggatctaaccttgcctccgaattcattctgagcgctctgcaatcatcgtagagatttctagactttctatattaacaagatttgttaaatctgatttaaaggggctgttagcaatatccttattgtttgggttgtcatagtaaaaaaaagggtttaggcccctgcaaaaaaaataagaaaaaaaagaaaagaaaataaaaaaaggaaaagaagaagaaagaagggggttgaatctctaaatctattgtttctctttgtgttgtgctagttgttctttttcattgactacctttgtgcctaggctcacgtctctagcatggtttagcctaggaccagc

SEQ ID NO: 46760 - DNA, 104 bp, Zea Mays
gtgtaaacatgctaaaacgtcttaacaacctttagatccagaatcaaaggctaatcttaatcccacctgataatcttgtgttttttctaaagaaccccctcctg

SEQ ID NO: 46761 - DNA, 1819 bp, Zea Mays
gtccacgcctggcttcactcaggtactaggcttaccggttaccatatttcccgacatgtgtttagtactttcaaacgcttgactcatgtatccacacattaatccttaattccatttccgtcacatggacaaggcatccatcctggatccaagtccatagaccatcataaaatcccattatcaagatgtatacaatcaatgtctgacatcgcacgagttctagaaaaatcactcgacttctaccgacatcctgattagcaagcagctactcaacctagcatactagtatgcatctcaaaaaggaatcctgagggtttcaagcaactcctacacttaagtgcacattgcaagcctacaaatattaagtgtagtaaagtagcatatataaatggttatgcataaaaccggtgcttgcgttcaaatgctggggctatgggaagatcctctgtggcaggctcgggagcgggctcctggacttcctcttgggaagctccttgctctggaatgagcacgtaatctccgtcagcgaggttaaaatctaatgaatgcaatgagtgagatatatgtattccatgatatgcaatgtagtagtaggaaaaatgatcaaattgaaaaggtaaagtttaatcttactaccggaattctagtggtatacttagccaattagggtcaagtatggtcaagttttaaatggtcagattatttgagtgtcccactggttttcttttagtgtcttagtgcaagtctatcatgatccttgctgaattcattggaggtgagatttattattattcttactaattctctctttaccttttttctattatgctttttaaagtgggtttgaactacaacatagctttataaatttccaaaaattttgtaaaacttacagtagtttctcactggtgtataactcttagtctaaaaaattgaggcttacaatgttaagggttcactctgtacaaaaatattaagttttagggcagagggggtgttttgaactacaactctcttctaacagtggattattccctaaagctaattttttgtggcagaacctcccaagttattgggcccacatgcacctgcccttgtcccaaagacctcaaacggctatgcatgtgcaccagataaattaacaggatatgtccgagtgtcccaacgaccccggataaaccacttataacccggatcacaagattaagtaacacaaatcacacaccaacaatatttttgcagcagaaatcttattactaaatttttacaagttacatcaagttttacaatgtacatgatcggagtgattacaaaagtgattcaaagaagttactttgaactgttataaattattggtagttttgaaatatattctagctcaagtgaccatcctcaataagaagtatagaagagttacttagacttataagaaggccgagcccaccggcgcttaacaccatcaacagcaccacaaaactataacctgaaaacaacagggaataaaatcctgagtacgaaattacacagcaagacttacccgactaaagaaaagacactcaagggtatgctggctagagggattcaaggtatggctgttcaagaagcaaagactctattttgcagaaaagcttactatgagtggatccttaaaatccatttttaattgtcgggttaagtaaagttacctgcatctagaattctttctaccctagttcaagcacttagcctataatagccgtctttttatcatcccttcagttcactggattgctacctgtagggcagtgaccaagtcttcatgtccgagaagtaacggcga

SEQ ID NO: 46762 - DNA, 316 bp, Zea Mays
gcagtaacaccaggggtgttacaaattcatctgactccggaatattcaccaaatcaaattccatccaactattattgtcgatctcatttttgttcgacccttttatacattttagacccaaatttcataacccaaaatatctacattttgtttttgtaaaaaaagaaaaataaaaaaatcctcctctcaaatatctctctgttgtatctctcaaatatctcttcacacctagaaatatggcactctgctcctccccttcgcctgtgagccgatgtactcatccagaattcccccctcatcttctcagctcggccac

SEQ ID NO: 46763 - DNA, 76 bp, Zea Mays
aagtaaatgcatggtgattgcgatttggagattagtggtttacgattcgtatagattggtcgatgtgcgaaattac

SEQ ID NO: 46764 - DNA, 107 bp, Zea Mays
gggctatgtcgttgctctagttagccgaattgttagatggttcggttaagctcgtaatcatgatgaattgcttgttgtggtctaaatgcgtatggttatgttcgcgg

SEQ ID NO: 46765 - DNA, 194 bp, Zea Mays
gttctcccactttccttcctcccttcttccctccaccaaaacggttggagaaacgcaccatgagacgacgatccgagcggcaaggattggcaccttgggaggaggggattgagggggggggctagggtttggtggctgcaaaaattgagagaggaggtgatggacaggggggcggcggccaaggggaggaggag

SEQ ID NO: 46766 - DNA, 364 bp, Zea Mays
gttttgagttctaccacgttttggtcaccacgagatccaccatcaccaaaaacatctctggttcgtttttgccaccacggatacatatcatatccgatttggaagtttaaatacaatctggaaagcttatcttatcttctttccaacggatctgaccttatctcaaaattcgttctgagcgctccgcaatcatcgtagagatttctggactttctatattaacaagatttgttaaatctgatttaaaggggctgttagcaatatctttattgtttgggttgtcatagtgaaaaaaagggtttaggcccctgcaaaaaaaaacagaagaagaagaaaaaaaaaagaatagaaaagaaaaaaaaag

SEQ ID NO: 46767 - DNA, 281 bp, Zea Mays
cccctgcccatctcctactctctcaattcttgcagccaccaaaccctagccgccccccctctcaatcccctcctcccaaggtgccaatccttgccgctcggatcatcgtcgtcgtggtgcgagtcttcaatcgttttggtggagggaagaagggaggaaggaaagggggagaatccaaggtggtgggcttccggatcgtacttgggatttgcccgaacttccggtaaaggcaagtaaatacagtggtggttgctaccgtttggtttgcatcctattccctg

SEQ ID NO: 46768 - DNA, 257 bp, Zea Mays
cgggcctccaccatcttccttgtttttctccttcggttacgtcaaaccgagtcaacgccacaaaccgagtcaacgccgcttccttatttttctccttcggttacgtaaaaaaaacagaaaacaaaagaaaaaaaagaaaaaaagaaaacaaaagagaaaggatagaaccagagaacaaacaaaaaaaagaaaggaacttgttgactcatctcgggcgttttaagcataacttgaggtacctttcttaaactgggcat

SEQ ID NO: 46769 - DNA, 751 bp, Zea Mays
ccacagcctggcttctgctcctccctgcgccgcggcttcatcccccagctccctctgctcggtctcaagctcctaggcacgccaactccctgctcggccccctgctcctccaagttggtcgagcctctctctctccctgggccgagtttccatctccctgccctctgctcgacgtttccccgacgccggattttttctgcggcctctgctttgctccaccgtcgacctcgccttggctccctgtccctgttgtgctcctctcttggcgtccctccccatagccgagcgcatcccatggctggccactgctgctaggcttcgctgatgcgcgcaatttgccggccatgtcccttcaccggtggtcttctcgccgtgtgtgctggtcgccttgtgtgctcggccgcgggcgccgtcgtgccttggccatgcttggtttcctcggcctcacggcgctcacctttgcgtctgcctcaacgtcctcgcagtgcaaaactatcacagtcgctttctcctccgctccgactcgcgtccacgccctatatcatgctcgcctctactcgaacgaatcgtcgtgccatcgtcttcatcgtatggagatcgccgtgctagccacgcgtcaccagctcgacaaaataaatcctatgggtatctgatcaagaatagaaattgtatgcatcgctcgccagatgtgtgtggtcatgggcatcaagcgaaaaccatcgtagtttttccgactatcgcgtcggatttg

SEQ ID NO: 46770 - DNA, 2555 bp, Zea Mays
ggtccgcgctacacgggagcacaatactcctccatcaagcctctagctaggagggtacacgctactcccaccatctcccacgtccagtgcgcggttgtctttttcacgtatggaatagccaggtttaggcttagcggagcatgtggatagttgcaaagtctccaccataataggcctacatcgaatggtccttaatcgacacagacgggcgaccatgtccgcttagcgtctggtatagatgtattcaaaccattttcccatttttggtacccgacaggggtactcttttccgaatgatgaacccactccggctgaagtggaatcatcaccataagtttgctttgatttttgaaacgaaaggcccataaccaatgttccacaatcattctttttgaaaacaaatgatttttcagtttctaagcagggctaagcattatcagttctttttataaaaccgggattaaggagtttccaaggaatagtaatgcatcaattgtttatcacacaacttctatcacctaatgcatcagttagggtgaaaaagcatttaaaacacaaggggcaaatgcaccggggcttgcctggaataaacactacgttagtgtttgttagacgacatccgcttgaggagtatccctcgaccgagcacttgcttaatttaactatcttcaggttggtccatcagcttcatcctgcggattagcccgcgcttggggtcgacttggctcgtcttccgcatcacgcgattatttattgtacctcatgagatgcacgatgcacatgtatgagcacgagtataacgagtataatatagataatctacactaaaaggatgaaacacttaaaaccaagcattaagcatcatggatatcacagcagggcatcgactacatccattaaccaaattgacataataacactagaacatctatttttattcctagctttttattaactctttaaactgtgcatcttaattacttgatttatcgatttatctaaatcgatcatcacaatatacgcatgctaaattaataacctttattgtgaccaacaattctatttaatctatttatagacctagttgactggaatacgaatcaacttacccttatgacatccgacttgaaacctcgaaatcgacgacgcctttcagctccacatttcaccgaaaatagggtgagtgctgcgtcaaatcgtgcttcatctttatccgcatcgagtattctccgaccgtgtactgatttattttcttctgcgcatcttctcaaagcttggcgtagacgaggatgacgatcgacgacttgttcgagcttttgtcgagcaattggtgaatatcaccctgctagcttcgtcttcacccgattcttagggatgcccgaacgacgatgaccttcgattgaagtcttagactgagcacttgataagcgatgcatagggaccttgcttatttttgcctaacgtctaggattcgaggttcgacgaggtcgggcagggaagaacgaggttcgacgggatcgacgacgatacaagagggtgacgtatatagagctgcaggtctggcgagctgacgcaagtgacgaagacagccgtgtatggcagcagtgtgtcgacaatctatggattcaggtgtttttatcgaataggcgggatgcgaggagccgagcaatcacttgaacatggtcgacggcgaggtctgccgggagagaatatcggcacatgacgcggcacaacgaacgcgcagagcttcaaaaccacgcgcgcgagatccaactactgcgtgatgcgtcttaggaacaagtgcacgtggcagcggacaaggtcgacgagccaaacgacactaggtcaagcgacgaacgcatttggcgaggtcgcgaccatggatgacggcgttgggggttctgtgacaagacaacggtggctgacgagcttgcaacggcacgcacagggagctagagaccgagcgcggcgaaatggacacggccgagctcagcaggagcgtgcgcgcgcaagggagcagggacgcgcataggctaatcccgacgagcacaacgtcgacaagaacaccgtgtgcggccatgagtgacttgggcgagctgagctgaatccgagctggagcgtcgcaagggctgaccggcagccatggcaagcagggacacgcagaccagcgaaccagggaggaagtcatggatgagatctggagcttagacgtgggaagagacgcagttggcgctccacaggacggctagagatggtggcttgggaagaggctggacaggagaagctgtgcgtagggaggcttgataccgagcaacctgggacctgggggcgccatccgagccagaggcgagcagagggggcgtgatgcaagcttccacggagagggcgcgctgtgagatggagcttgggcgcgccagcagaggagctttgtgcgcggccatggaaacaggggagggagagggcaaggacgttcattgcttgtagtggagaccgagctatggtcctggcgaccggtagagggagctggaggaagggagcggctgggctgggcttgc

SEQ ID NO: 46771 - DNA, 240 bp, Zea Mays
gttcttgagcacgcaaccacccttgttcaccaaggcagaggaccttctggacgcagatgtgtggctatgggttatggagtcaaagtttccactcctcacaggagattgccttgacgacgcaaagacccactttgctgcacagcagcttcgtggacctgttaggacatggtgggaccatttccgtgccatgttaaccgctgaccatgtggtgacatgggaggagttcaagactgcttttag

SEQ ID NO: 46772 - DNA, 414 bp, Zea Mays
ggtacctcaagtaatgtttaaaacgaccgagatgagtcaacaagtttctttctttttttttgtttgttctctggttctatcctttctcttttgatttcttttttttcttttctttttttttgtttctgtttttttgacgtaaccgaaggagaaaaataaggaagcggtgttgactcggtttgtggcgtgatcaaacgggagatggtggcggcgcgctagggtttgaatggtggaagaaagatggtgtgaaaaaacacaatgcgaccagcaacaaatgatgcgaaagcacacaaattcaacaatgcagattattgaaagaaggtgcgaggctcaaaagggtgctgggataaggtctaacctgaatttttatgtggttttgtggactgtaggagaaaaaacactcgataaactcac

SEQ ID NO: 46773 - DNA, 125 bp, Zea Mays
aattcagaggactgaaactgtgttttagtgatgtgtggccaacttcagagccacataacttgtgatctacatattttgggtcctggatttttatagtaaacctgaagagccatggttggggaaca

SEQ ID NO: 46774 - DNA, 363 bp, Zea Mays
cgaaaccaaacaggccataggctagttcggctagcctcagaatggtgtcaacaagctcctgtaaaaatttcagattgtttgaacaatcgagcgaaaagttatgctcgttttaaggaaggtacctcaagttatgtttaaaacgaccgagatgagtcaacaagttcctttcttttttttgtttgttctctggttctatcctttctcttttgttttcttttttcttttgtttctgttttttttttgacgtaaccgaaggagaaaacaaggaagtggcgttgactcggtttgtgacgtgatcaaacgggagatggtggtggcgcgctagggtttgaatggtgaaagaaagaaggatggtgaaaaaac

SEQ ID NO: 46775 - DNA, 266 bp, Zea Mays
tttatttagtgactagccccttgctactcgcccaaatgacctatctggtaacaaaacaaactttttgtaccaagaaataaaaatagagctttctccagttttattttacctgagaacataaaataaaatttcgattcttaaatacggcttttatcaaattgacacacattttcatcacaaaccatgcataagcattacaagttatattattttaaagtgaatgcaacacatgattaacctttttagaataatcacatgggatgctg

SEQ ID NO: 46776 - DNA, 2181 bp, Zea Mays
cttaggttaggaggagaagaagaagatagtattcacaaccacttcgaaattctttacacaccaaccggatgatgtaccaagttgcacttgctggctagcgattacattacaatactgtaagttttttaaaccaaagcaagaaaatctggaaaattctccacaagaaaatcttcagattcccaagtagcttcgtctttagaatgtttgttccattgcaccttataaaacttgattgttctccttcgagtgatgcgatccttctaatctaatactcgaattggatattctgaataagtcagatccggttcgagattggcctctgagacatccatagcttgctctggcactcgaagacatttcttcaattgtgatacatggcacacgttatgaactgcggacatatgctctggcaactgaaggcgataagctactggtccacactgttgaataattccgaagggaccaatatagcgaggtgcgagttttcctttgacgccaaagcgattaacacctttcattagtgatacctttagatagatataatcaccaaccttgaacaccaagggtcgatgctttcggttagcataactcttatgacgagactgtgctatcttcaggttgcgttggataagttgaaccttttcctcagcttcatttaccaggtcgggtcgaaagaaacatctttctccaggtccagaccagtttaaaggagtcctgcatcttctaccatacagagcttcaaagggtaacatcttgatactctcttgatgattgttattataaaaaaatttggcaagagggagacattcatcccatttttctgaaaagaccagaacacatgccctcaacatgtcttccagtatctgatctttctgtttgcccactcgtttgagatgataggttcaactgtgaatcagtttagtgcccaatgacttatgcaactcctcccaaaacttggagacaaactgtggacctctatctgacacaattgtcttaggtactccatgcagacttacgacacgggcgatgtacagttgagcacaagtgagaacaggacaattgctcttggcggggatgaaatgggctgacttggtaagaagatccacgatgacccaaatagaatcatacccactcgatgtcttgggcaaaccgacgatgaagtccatactgatgtcttcccacttccaagctggaataggcaatggttgtagtcgtccggcagattttaagtgcacaaccttcaccctttgacaaatatcgcacttggcgacatagagagcaatttcaatcttcattttggtccaccaaaacctttgtttcagatcctgatacatcttgttacttcctgggtgaatggagtatcgggataagtgagcttcatcaagtatctgttgacgtaactcaggaacttttgggactaccaaatggttttggaaccaaagaacaccattttcatcaattctaaaacatgtagccattcctgctacaactcgctccttgatatgagctattcccttgttgacattttgagcatcaacaatttgactttggatagttgattcaagaatgagattagctatggttccttgatgaactatttccaaattcaacctttccatttcctggcacaaggtaacaattaaaggttttgccgaaagacagttacactgagacttacggctaagagcatctgccacaacattagcgttgccaggatgataatgaacttcaagatcataatctttaatcaactctagccaccttctctgtctcatgttcaatttggactgggtaaaaatgtgcttctgactcttatggtcagtgtaaatgtgacatgtattacctagcaaataatgtcgccaaatcttgagcgcatgaacaacagcagccacctcaatatcatgggttggataattcgcttcatgacgcttgagttgtcgagaagcataggcaatcacgcggccttcttgcatcactacacatccaatgccaatgccagaagcatcacaatacacatgaaatggctttgcaatatctggttgagcaagcactggtgatgtaatcaatagctccttcagcttctcaaaagctttgtcacactcaggtgaccaaacaaatttgacatggtttttgagcaattcggtgataggcttggctattctagagaaatctagaataaag

SEQ ID NO: 46777 - DNA, 787 bp, Zea Mays
agtggtatgcatgttcttccttgctcttggagtatatcaggatatcatcaataaacacaaccacaaacttgttgagcttcggcatgaacacagagttcattaaatacatgaagtgagctggagcattagtcagaccaaaggacataaccaaatattcgtaaagaccatatcgagtagtgaaagcggtcttgggaacatcttcaggacggattcttatctggtgataacctcacctaaggtcaatcttggagaacacttttgctcctatgagctggtcaaacagcagatcaatgcgagggagaggatatttgttttttatagtcatctcattgagcggtcggtaatcaacacacaacctgagtgtttgatctttcttcttcacaaatatggcaggacaaccccaaggtgatgaacttggtcgaatgaaacctttatcaagcaagtcttgcaactgagtcttcagctctgctaactccttaggtggcattctgtacgaccttctagatatgggtgtggtacctggctgcaattcgattacaaattccacatctctttctagaggtaaactaggcaaatcttcgggaaacacatccggaaactctctaactaccggtatatcctttacatctttaatagttgcagcatatactctttctactgctctcttaggagttgacaactggattagtaatttagaactaccattgggtgaatccaactgaactgtctgttgcaatgtatcaataatagccccatgttgatgtaaccagttcatgccaaggatcac

SEQ ID NO: 46778 - DNA, 341 bp, Zea Mays
gggcgctcggctgggcggtgtgcgggcggccaagttcctgggaaatagatgcgaggggagagaggaatggaagggagagagaaaaggcagggggcgggggcggccacaggaaggaagaggaggcgcggctggaatgcagggagcgatggctgagggtgttgggccctggtgggccggctagattagggtttttggtttttttttctttttttcctttttctaatttcgaaatacatatttaaataactctaaacttataataattaaactaaaattatttataaatataatatttatatttgactaataattatattattttttgtgaattttcattcaag

SEQ ID NO: 46779 - DNA, 1247 bp, Zea Mays
tacagttcatttatttataggcttgggacgtagcccaagtaaaagtacattcatgacctttgatacatacatattatcttaatataattaataggaactaattggtcttttcctcttcaactcgacaccatgctcaatcttcataacctctttgagccaaagttgtcatcctttagcgctttacgtgtagtagcttcggcatttaatattcgttgcttataggcaacttctccatcatgaagacctccggtagagaaggagacccccaacaatcaccgcttctcaagcttgacgatggggacgacatcccctgctgcagcgagtgaagacgcatggatttgcccactgctacgcatttcattgagcaggtagcacaagcggaggagcggcacacgcagagcagggacaggcgtgggcctaggtcgcttgtagccccgacgtggggtcgagccagaatggtgtggggctacgcacaggggcaagcgaggatacaaaatcgatagtgtagggaaagctccatgggcgtggtcaaggttgatgatggacgcttctggcccacacaacttgggtgcagccgcgcaggggcttgcaggcgtccgtcactaaccaacggtgggggagagcccagggactgggcgcgcgacgaagggtggcttgtgtgcactgccgagtagcctggactaggaggggacgaagaagatccatgtgccctaggaagaagggggcgccatgggatgggaggggagctcgacagtctgagaaaaagcaaactagtgagggagatggcggggaggtggccgtggatgagcttggggaagtagaagagacggcgagaaaaggaagcctacgctgcacagatatgatgggggcaggggcgtccggtcctaggctccacggattttgctagagtggagggaggagcagagggaggcggccttatgctccagctctagggacgaacaggaggtgcgtccagggcctaggcctaggtgagcagggcgctgagcgctgttggggaagggcaccggcatccatccatgtaagcattgagccgaggtgctggaggagtccctgcgccatagaagctcttgttcctgcgaatcccacccaaggggcggcactttagggctttggagaggagcaccttcgcgcgcccaccatgggagccgagaggaggcaggaaaagcttcatgaggaaggtaccgagtggctagaagaaaagagaaaggggtggcggctagaaaaag

SEQ ID NO: 46780 - DNA, 394 bp, Zea Mays
cgaatatttattgtccgctgtttatttttaaactaaaatacgacaaatagaaaatagagtacttgtcgagtacttaggttgcgggtacccgaaataggccctttaaaacgtcccactccgcctactaactctgcaagacggaccggatgaccaactctcggatgactgagcacctagaggggcgtgaataggtgatcctacaaaatttaactcaaaccacacaaacttgttctaaaatgtgagttagaaaaaaatgaaaaccaagtttgagaatagagaaaagagagattttcctttcacttgattgctctattaagatttaatttaaacttagagcaatatcgcaagtgaataattggaacgatgaagagatagaaattacaaagaagtaaat

SEQ ID NO: 46781 - DNA, 255 bp, Zea Mays
acaccaacatttgcagcggaatttcttttttacaaaaagttacaagttacaacaaatttacatttatttatcagagtgattacaaaagtgattcaaagaaatatactttgaaatgttataaattatttataagtttgaaatatatcctagctcaatgacaatcctcaataagaagtatagaagagctactttaacctataacaaggccatgcccaccggcgcttagcaccatccacatcagcacaaatctagaac

SEQ ID NO: 46782 - DNA, 1304 bp, Zea Mays
ggacaaaccatttctcattcaaataaaatagtcaatatacagagtagcacaacataaaataatcaccactttatgcgtgtacaaatattattgaagatagataaaacatatgactcattctaaacaatcctgaacttcatcctacataaattagaaaagtttttttggtagcatagtcttcacattctaaagaaatcttgcagctctgaaattgaaaacaaaatagaatgaagtgtggattcatagagtagctctaaaaacggaatttgcaactctaaaactgaaatctggcagctctaatactgaaaatctgcaactctaaaactgaaatcagctgatagctctgaaacttcatcctaggtactgaaactgatgaacaacaagaagatatttcagaaaaataattgtggtggattcatcatgctgatgcacaaataaatgagaatgcatcttcaatgaagaatgtgtctccattgaagaatgacccacaatatgacaaaggaaataattagttaggttgacacttaatattttaaagatatatgcttaggtagaagggaataatggtagataaaatataacttgtgaaagaaaaaacttaaggtcttataaaacacttataccttcgtcttaggtcacacaaccctcattgaaacttctgttgttgttttggcagcaacaagaacatcagctgattggcccatttgcaattacatgtgtatgtgccatcatagcaataaaggcatcaatatgacccactatttcagtcccaggaagttcatgagtagacgagatgtcacatagtacctttcttattgttttaaaaaatcagattattgaacttatgtatatcaataggaagtaatcacaatttcacatgaaaacaaatgcactttagaggaaaaggtgtttatgggtcactcattaagatattctattaatataaaacaaatgcaacccaagaaagttttctattagtgaggaccgggcatgaaagaagtacatgtagatctcttccccagtcaacaggatcactaacaacaaataatctgttaactcgctctacataaacatcatatgatgggtgcactttggtagacatgtaattgtctgtttgcccaactttctaagtcttgaaaggagccagggggtctatatctttataatatgatgcatattcatctatggccagaacttttctgtagatacaaatgactcacgaggaattcagaacaataaatttgaccaacgattgtaatagcaacatgaagaattacctaaatccatatttaggtaatgctaac

SEQ ID NO: 46783 - DNA, 306 bp, Zea Mays
accttatttggattagaggcgacggatgcacccctcccaacgtggtgacgacgcggcgtggggcaggtggggcagctctatacacagctggtgtagtggaggcggaacccacggaagagggagaggtcgatggtacaaaggggatagtggaaggtggagatggaagcgagggtggcatcggggacgcgcgtgcagagggactatggttgtgggtgctgcgaggccatggcagtgtgagaggccgagatccacctgctgcgactagacctagggtttggagcgcaggaagggtggtcgtttagctcg

SEQ ID NO: 46784 - DNA, 390 bp, Zea Mays
gagagaatagaggaaagagagggagcttgcaggggcgctcgcacgcgagagcagggaatgggagagagagaagttaggggagagaagagagatagggagagagaggtacaggggcggcggcggcttgcttcagggacgcgcgcgcgtaggaatagggtttgggaactgggcctctaggtgggccggttaggatagaaagttttgtttttttttctatttttttttcaattccgaaattcatttttaaagaactctaaaaatcataaaaaaattaccaaaaatatttataaatgaagtacttatttttagactaataattactatattttcttaattattatttaattactagtatctctttttaaaatgaattgatattaaacatcccgt

SEQ ID NO: 46785 - DNA, 148 bp, Zea Mays
atcgcatacatctaccaaaaatccatagcgcacatacgcgtgaatttcgaatctccacatgctcatattacaacacaataattatagaattcacaaactgaaacaaaaatgatttcaaaaatacataaattaatttggatcgtcttca

SEQ ID NO: 46786 - DNA, 252 bp, Zea Mays
aggcgaaaaacgcgtccacgcccgcgaccatgtggattttgcagaaaagaccttggtttatggaataactggaagcgggttcctatactgtttccttaggtcgctgactacttacaagaagaccctcgagcttctaattcttcgcaggatggggtccccgacggtaaacagtgctcggccgatctccgacgagcctattccagccgaatgctgccacggctggagctcccgtgcgacagagaccaattagac

SEQ ID NO: 46787 - DNA, 342 bp, Zea Mays
ctttgtttttgctcgcgacgacgatgtcgtccacataggtgaaaatgttgtggcctacttggctttcgagcacccttttggtgaggcgagaaaaggttgacccaacatttttgagtccctctggcatcttgatgaaacagtacgtgctgaagggtgtgataaagcttgtgctggccttgtcttcctctttcatgtatatctggtggtagccggagaagcagtcgaggaggaacatgacttcgcatcctactacgctatcgactattttgtcgatccatggcagcgggaaattgtccttaggacaggccttattaaggctggtgaagtcgatacacatgtgcc

SEQ ID NO: 46788 - DNA, 525 bp, Zea Mays
cttcggcacccgtccgaagcgaaggttaaaccgagtaatggatgctctgggctttgaatatattgattacgagcggctagacaagggtgccgaaggacaaaaaaaggaaaagagtggctgatgttctgaataaagacgatgaagaacaaccaaagaagaaaaagttggaacctgagccaaaaacaggtgtttcaaagaagagaaaagctttgactccaaagcaaaaagcaattgacgaagaagaaaaaactgctgcatcaccctctaccaccgatgtggaggaaattttgaaggtaatgtctaaatccttgcctgtcaagctgagtccattagggccatatctgacgaagctttttcagaaggacaaggagctcgcgaaaacgaagaaggcggctagaccaaagaagcaaagaatcattacagtgacagaagccatcgaagggacaccaccagaagcttcagctccgaaggccccagctattgagagcacaacaactactgaagctacaaatgccgaagctgccg

SEQ ID NO: 46789 - DNA, 516 bp, Zea Mays
aaacaacttttctctaacttttattgtttgtaataacgaatatgttttctaacgaaggttgtttgcgcgcagagtatgctgctaagcaaagctttgaaaatgcagcaggacttggaagataaaaaacacgaagttataattggaaatttggagagcaagataaaagagcaatcagctgttattgagaagaaagtcttcgagcttcagacaaccgaaggcttactggcggaagctgaaactaagataacagaattaaatacgaaacttctctcacaatcagaaaactttgatcaagaaaagcagaagcttaacgcaaaacttgaggctgaagtccaaaaaagttcagatttgaaaaaatcattgacaagccttcagaataaatgtctggagttcagcaatcgatgcgttcaacggctgaagcatgtgttctattttgttggagccagcagcgagaaatttactccttcggctgaagacctgccaggtgccttcgagcatatcgaaggtgaaattgat

SEQ ID NO: 46790 - DNA, 119 bp, Zea Mays
aagatgaggagcatgaaggaggtcgtgatgatgttcgtgagaggtctaggtcatcgtctcccagacaactatggctgctggatcgttgtctccttatgatgtaattatttaactatttt

SEQ ID NO: 46791 - DNA, 508 bp, Zea Mays
ctcacaccttctttcaataatctgcattgttgaatttgtgtgctttcgcgtcatttgttgctggtcgtattgtattttttttctcaccatccttcttcttccttatttttctccttcggttacatcaaaccctagcgcgccgcaaccatcttccttgtttttctccttcgattacatcaaaccctagcgcgtcgcaaccaacttccttatttctctcctttggttacatcaaaccgattcaacgccacaaaccgagtcaacgctacttccttgtttttctccttcggttacgtaaaaaaaaacagaaacaaaaaaaagaaaagaaaaaaaaagaaaaagaaagagaaaggatagaaccagagaacaaaaaaaatagggaaaggaaacaaagcggtttgtctcatctcggtcggtttaaacataacttgaggtaccttccttaaaccgtgcataacttttcgctcggttgtccaaaaaatctgaaatttttacaggagctagttgacac

SEQ ID NO: 46792 - DNA, 946 bp, Zea Mays
gtacgttgcccgaggaggggtacgatgcggcttcatatccttagaggtatgaaggcagaagtcatccttgcattcgcagacatttgcactcatgaggtatatatgaagtgtgacattactatgttactattgtggtttctacctgcgaggtgtggtgactaggtgtgttgtacgttgtatacgtgctgcaccttcgtaataagaaggttgtggaatcaagtggtggtaaaacaatgttcttatgtggttaaaaagtttgatattattttacttcctgagatgtgtcatctcactcttgcattactcaatgcaggtacttgatacatgttgggaatgaggggagtagcagcacgtccactttcactctcacaataacgctgcccaggcgcaaccatgatttaattagaaacttattgtcaaaggaagtttattttttttaactagtcgtgcgcactagttaattcacttcatgtcgtatgtttaacttctctttgctagccgattaataatacttagtatgtttttgtcatgatatatgtttatacactgttgccccctcatttatgcaattttgcaagggggatgctgccgaaattttatatatagatgtcagaagtgttgtttagtagcattccggggtgttggtggaccccggggtgttacagttggtatcaaaggataggctttagattctacgcaatttgaagataaatttgacacacttgcacatataggaagggtatgggttcgtatctctttcatattagtattttattgtatagatgactagaacttccttactccaaatccctttatggtttgatggggtatgtcgttaacgacgtaatgcttgatatgatatgttacttctatttagtattggtttcttgatgtggttgttattgaagatattatgcaagtgaagctactaatgtacttgttttat

SEQ ID NO: 46793 - DNA, 411 bp, Zea Mays
ctcactcccccacccctttggccgcccctcccctctctcttccactcttgcagccgccccaatccctctccttcttccccaagtgattgcagcgccacccctcaaccctagccccccccccacctcttcctctccaaggtggagcctccccacttggtgtccgtcgtgtgggtgcaagtcttccatgggagtttggagggaggaagaaggaagaaaagaaggaggaaaggaggaacccaaggtgattttcgtgatcattttgttgtatttgtgctgcaatccaattggttacatgtttacctatgcgatttggtagaggtgctgtccagaaatttagtgggtggacgaacagcagtagttctagtgatttctgggaatttttcgtgggcaattagtagggatcagtgggag

SEQ ID NO: 46794 - DNA, 1369 bp, Zea Mays
attagatgttggaatttaattataaattgtatacaaaacttgtggggaatttcatgtatatgcctctagagtttttgtttgttaccactgctgtcataattttaaagttatgaaattattaagcagcgccgctgcagtttggtgggtgtggggagagatgtaacccgcgacggggtttgagtttgtgcgtaggtgcggcgtcatttatgagcctgattatgtgaaattggtgcactaagttgtttgtcaaaaacaggtggtggacttccggatcatacttagggatttgcccgaacttccggtaaagtcaagtaaatacagtggtggttgctactgtttgggttgcatcctattccctgacattgagtatgcgtaagttttaattatgttaatcattgaattctatgataaagtttatttgtttggaagtattaactctcaattgtctaatattgtggatgatcataatttggtaatgatatatgtggttgattcccatcttggatgaagttgaagtatttttttgaatcacgttatatgaagtgttgtaggcatgacatgctcatcgcatcatccatcttgcattttgaagttatgtcgtgatcttatggtccgaccgtaccggtacatttttagcattgtacgttgcccgaggaggggtacaatgcggcttcatatccttagaggtatgaaggcagaagtcatccttgcatttgcagacatttgcactcatgaggtatatatgaagtgtgacattactatgttactattgtggtttctacctgcgaggtgtggtgactaggtgtgttgtacgttgtatacgtgctgcaccttcgtaataagaaggttgtggaatcaagtggtggtaaaacaatgttcttatgtggttaaacagtttgatattattttacttcctgagatgtgtcatctcactcttgcattactcaatgcaggtacttgatacatgttgggaatgaggggagtagcagcacgtccactttcactctcacaataacgctgcccaggcgcaaccatgatttaattagaaacttattgtcaaaggaagtttgttttttttaactagtcgtgcgcactagttaattcacttcatgtcgtatgtttaacttctctttgctagccgattaataatacttagtatgtttttgtcatgatatatgtttatacactgttgccccctcatttatgcaattttgcaagggggatgctgccgaaattttatatatagatgtcagaagtgttgtttagtagcattccggggtgttggtggaccccggggtgttacatatgggcaaccgatccggtatcaaatacccaagaattaatataagaatcagcaagaaaaattttc

SEQ ID NO: 46795 - DNA, 704 bp, Zea Mays
tctcttttctttcatgttctgtggcattggggtttggagtttcaggaggcattcctcagaaaacagtagatcttttggcattttttcgctggggtcgggagctcaaaggaaagagcgagtttgggccattgatctcgatccggtggatgggagccccccctccctctcctccccaaccctagccgcccctccccttatccccaatggattgcagccgcccccctggtagagtgtaatatcctaaaaaatgttgccaaaggttgatcttcggtgcgtggatgtaggaaaagggttgtggaccgttggatgctatgtcggagtcatctgtggcgtcgcttcttttctcccgcaaagaaaaccctagtggtggtcttttcccccttttgcccctacttggccgccacccctttccccccctcccacacttggccgcccctctcttcttttcccttgggctggctgtcctctcctcccatggcagcccctctccacggcttcctcctccctctagatctccccctgcgcagcaaggatcgagaagaggaggagcacattgagttgaagggtaagaaaggatcaggagatgttcttccccatctcttcttgcaaaatttcttggggaaaccctaggtatggatgagatccttgttcctccctgtaattatgtgcttttggaggttgtggatcatgagaattaaaggatt

SEQ ID NO: 46796 - DNA, 1373 bp, Zea Mays
gccgcgaagaacacctcaatcggacatcagatgagagagttattgcagtttgattatagcagtttttcagtctcttaattctgtacagaatctgttctcttaagatttagacaattttatcaacagaattaaaccttgggtttgtaagaaaagatgtagataatttcataagctttccagattgttaaagagtgcattcatatgaattatgaaacttcagttatgtttgttttactgtggctgtttctgttagcctgacagaaatgagcgggtctgttcactggtaggtttcatcaagtaaatggccgaattggctctcccagctatggagacttttgtagagggataaaagttcttactttaagcagaatttcatgatttttggttgagcagtttatgagatatcgaattttgaaagttaactatgctgctgtctaaaacagattcagtcagttatcttgttagatgttttagaacttatagatggcataatttaattatccatcgaataccgaagttgtagaatattttgtgtagatactcatggagtatttgtttgatatcacaactgttataattttaaagatacaaaattaacaaacaacattgttgttgtatggcatgtggttcagagtgggaggttttccaccaggtcttggtttcaggtgtaggatcgatttgttgattgttggcaaatgtttgtgaaatatttgtactaagttttatgcccgctagcaggtggctacactctagatcatgcctagtacatttttcttcttcgatgaaggcaagtgaatgtagcggtggttgcttccgttctgacctgttatttctattgcctacactctaatattcagaagtattggattctttcataattggactctatggtgatgctttacttgcttgcattatactgatgctcaatcatatattgatgatgattatgattcgagtatgactcatgattaattcacacccctgaaggtaaatgaagtattatttgaggttggtattgtatctgaaggtaaatgaagtattatttgaggttggtattgtatctgaaggtaaatgaagtattatttgaggttgtattgtatgtgaaggaagtgaagtatattgataaatgcagcatgccatatacattgcatgattcacttgcatctgaagttgggtcgtgacctatggtccgaccgtaccggtacaacttagcatcgtacgttgcccgaggaggggtacaatgcggcttcatacccttagaggtatgaaggcagaggacatatgcattgcattcatatgcattcattgaagtgatatttgcatatgatgtggttttataccctcagaggtatgaagacagagtacctacactt

SEQ ID NO: 46797 - DNA, 51 bp, Zea Mays
gaggtgctgacgcaatgtgatttctgcccagtgctctgaatgtcaaagtga

SEQ ID NO: 46798 - DNA, 136 bp, Zea Mays
ccttcttccttccaccaaaacgattggagattcgcaccaaaagacgatgatccgagcggcacggagtagcacctagggaggaggggattggggggggctagggttttggtggctgcaacaatggagggaggaggag

SEQ ID NO: 46799 - DNA, 953 bp, Zea Mays
gggtaggaaccattcggagcacgtattggtcacgggggaggacagctcgactggcgccgatgagatcgccaccacgcctggcagacggcgtagctcgggttggctcgggatagaagaagacacaccagccgtcagatgtagaacttgcatctgggattagttggcacatacctattcgatgcattaaatccttgacgtcatccagcgatcggacggttttggggtcacctgatgctctgaccatggatcctagatccaagggctgatagcgcataccggttcaatgaatgtggcatctaatctggacgactatttttttatcggacggctcagatcccttcatacctctttgatgcggcactatttcataagagcccttgctctttttgtgaatcaacccgccgtccatatgggggttagcctgtgactgggaacttttgcagagtagccctggccttttgtttattcatgcgcccagtccagaagcttaggaaattcaggaaatggtttttatgtataaaaatatatccagaacttatttaattcatagaaattccatttttactcctttttaacccattccagttgcaataatcttgtattaatattgtctaccaactagtaacactttttagccatgaaactagaattaaaattgttcattaggattaatctattctaagcactaaataattccggaaattcataacttaataatcgtagctctgaatttagtggttcttgtttctacgatttcgttacgcagcgtagaatattattatgtagtttattcatatgtttggtgtgatgtttattttgcctataccatgtttatctatattgctacaactagcagcgaggttacgagtcagccaaagagcatgttggtacctagaatctcaagtaccaggaaagttgtgcccttgatcactttcgttttacccagtcctgtt

SEQ ID NO: 46800 - DNA, 397 bp, Zea Mays
atagtaaagatgtgacatttgatcttgtgccatgattcatcatatgtgtgagacttggtcctagcacacctcgtgattatgttcgcgtcgggtcttggtgccccgaaacccgggtgtgacataccctttacccataagtcatattacccttctgccaaggggtcatgaatcccatacacctctactaaggaagcaaggcagggtaacactacgaggcctttacaaagttccactagcttcagaaaactcgttacagtttctagggagcgcaatgcaggaatcccccatctgaaaagccatcgcagcaaaatcaacccgagaacctccctacaccgacaactctcctacttcccttgccccttttgggtaaggtagacctccactagctttcctaatt

SEQ ID NO: 46801 - DNA, 2036 bp, Zea Mays
aggactatgagtatagtggtatgtgtttactggcagcagatgaacctgctagtgttgaagcagctcttgaagaaggttgttggagggatgcaatgatagctgaactgaagtctatagaacagaacaagacttgggcttatgctgatttgcccaaggatcataaggctataggccttaaatgggtgtttaaggtgaagaaagatccatctggcaagattgtcaaacacaaagctagattggtggtgaaaggatatgctcaagttcagggagttgactatgatgaggtgtttgctccagttgcaaggatggaaacagttaggctgttgttggctcttgcagcacagggtgaatggcaggtgcatcatatggatgtaaagtcggctttcttgaatgacaatctggaagaagaggtgtatgttcacccaccgcctggattctctgatcccaaacatttagggaaggttctgagactcaagaaagcattgtatggcctcaaacaggccccccgagcctggaatgcaagacttgatcaagagttgaagtttttgggtttcaataggagtgttgaagagcatgctgtgtacagaagaggtacaggcaactctctgatcctagttggagtctatgttgatgacctgatcatctgtgggccagacagcaagaacattgttgtatttaagcagcagatgaagaaaagttttgacatgagtgaccttgggctgtttacctactatttgggtttagaggtgaagcagaaaccaggggaaatcactgtgtgtcagagtgcttatgctgaaaagattgttgagatctcaggaatgaaaggttgtaaccctgctgacacaccaatggaacagcatatcaagctgttgccgggcaagtcagagctggtagctaatgcaacaaagtacaggagcctagttgggagtttgagatatctggtgaactcaaggcctgatctagcttattctgtgggcatgattagcagattcatggagacaccgaactcagaacattggggggcaatgaagagaatcattagatatgttgcaggtaccaccaagcttggttgcaagtatgtcaaaggagcactttcagacttggttggtttcactgacagtgatcacgcaggtgatctggagaagaggaagagtacatcaggggtgttgttcttctatggtggcaatgcagtttcttggagttcacagaagcaaaaggtggtgtctttatcatcttgtgaatctgagtacatagctgcagctacaggagcctgtcagggagtgtggcttagcagattggtggcagacataacctgtagtgacgtgaagaagttcaagcttttcatcgacaacaggtctgccgaggagctgagtaagaatccagtgtttcatgagagatcaaagcacatagataccaggtaccactacatcagggaatgtgtggctgatggggtgctggaggtgcagcatgtaagcactgaagatcagctcgccgacatactgacaaaaccacttgcaaggattcgctttgcagagatgcggaggcagctaggggtggttaacatttgacagattaagggggtgaaatgttgcattaatctctttgtaatcgtgtcaaatgaacacgtatctcattttgatgcatgtaggtagtttgttttagtaacaaatcatgcatatttggcgtagaatcgcgggtgagctggagactgcccaatctcacgccgtgaccgcatttttgtcaggaaagaaccaccgcagcagatttgccgtgcatgtcgcactgggcgttccggaaataacggcgcaccgtgcagcgatctgttgcggtggggaacacgggggaatccctctataaaaggaacaaggattgcattggtgctgattgcacgcatttgcagagaaatctcgtgtcctctcttgtactctcgttcctaggtctgtagcgtccgcggtcaccaccggccggcgtcgcggactcgccggcgtcgatcttcgacgggtggttccaacagcgagcagaggggcacggctgcg

SEQ ID NO: 46802 - DNA, 1575 bp, Zea Mays
aaaacgagaataattagtattgtattgtgtttaatgaaagaagaaacaaagaaaacaacttcttgtaatgaagccaattagctgaactacctcaatgaaatacacaactacaaagaaactaataggaaccgatacaaattactaaattggtacacgggtgaagactgaagagagaaatttagatgtaccatggaaaactaagcacaaatgcttgtatttgtttgttcattaatggtacataattcctaaaacctaatctgctctactacttacaaacataagagcacaagtgatgagaaccagatgtagtacctcgctaaagtggggaaccagatctatgtactaaaacagtgtataagtgctcggatttggttcttgacaactggtgcacacataaatggaacaagaacttggattcgaaccgtgaaaggatttaggcgtgggtgatttactgcatcgattgaagaaatcatggatcggagggggcgacaaatgtgacaaaggtcagaacaaacggtgacaaactcggggaagatcgacgacgacgatgacgcctaaccttctccttgctgcgagttgaacgactaacccacttcaaaactggtggcctgttcgccgtgacttcatcaccgaggacgactaacgactatgaatcgaccttccgacggtgtcaagctcgggagatggcaggaattctacgtgactcctcacttccgcccaagccaacgggagcggaagatgatgtttccacccgcgcgcgcgagtggttgcgtacgcgagaagccaccgttgggggactcaaagggtagctcttcatctagggagagagaagctcacaacaccgtaggggtggacgaagggggcgacgatgcgagcgatagagtgacactgtatcccctatcgtacctacagtattaggggaggagactgatagcgggcaccgttgccactaatcttagaaccacccaaatcagcagggcagggcacaatcgttttctagtggcaagcttgtagaagaggaggagaagtgtgaccgtgcatgtgtatcgtgttacatagctggtgggcaaaggcgcaaagctcgtgatcgatcctagcttgtgtctccatgtgcatgcgatagactaggagtaggtttcaaatggacgtggatcgcgcgctttacgtacgtctgtgtagcttagtttattggcctagtactctagtagtgctagagatgataatggattaagttccaagtgttttttatagtttattaatatcttaaataaaatttagtttaaaaataaataaaaatatagctcgatcttaacttgatttaatcattaaattttatagtataaaatgcagagcggatgccaataggcgttaatctcaacagatattcccagatttgtctggcccgctgcgttgtgggctctcgccgtgtcagggaccaaggtgaagggcgtgcgtcgcctggcctggcgttgagccgagccagttgagtggagccgagccttggcgcccagcccgcatggagtcccgccgtggtagagaagtggtaatgccgtaactgtactccaaggattccca

SEQ ID NO: 46803 - DNA, 755 bp, Zea Mays
tggagtatgaaactcatctcatatgccttagcatttttttccatcctccttagtatcaaacttgtttataaacatacttttgactccttgacacaaggtggcacgaaggttcttcgaaggctaactaacacaaagctatgaccctcgaaaaaggtgaatttatgtatggtactgttcacctatttatagggaacgtgaacaacttcatgaaaaaatacaaacatgcccataaagtttacacacatgtattacaaatgacacagtgatattgatgacttttctctttctttctttcttgctgcacaagtcatgaacttttatcctcggtatctttgcgtccgaggcctcatccatgccgaagttagtgcctttggctcgcatcttcgccatgcacactttagtcgaacctcctcctcacgccactttgccttttcttggcaatctcccaaccaaaggccggcttcgtccgttgttagttcatgtacctaaaacacgtttgtttttatgccaaagtgaaggtataatgaggacctttggcagagtaggccaccaacagtagccccttgccgaatgagttcgtttcttcataacgaggttatatcacagtcaatgaaattgggaggccttctgctgaaggtccgaaaaacaccttctcgaagctcgttaggagaaggtagaacgatttagtaaaaggagctaaactggaagttaaacagacgaggagaaaattgaacgtgttgcgcgggaactctttt

SEQ ID NO: 46804 - DNA, 1139 bp, Zea Mays
gtcagttatcttgtcagatgttttagaacttgtagatggcagaatttaattatctattgaatactgaagttgtagagtattttgtgtagatactcctagagtatttgttcgatatcaccgctgttttaattttaaagatacaaaattaacaaacagcgttgctgctgtatggcatgtggttcagggtgagagtctttccactgggtcttggtttcaagtgtaggagtgttttgttgattgatggcaaatgtttgtgaaatatttgtactaagttttatgcccactagcaggtggctacactccagatcatgtctagtacatttcttcttcttcgatgaaggcaagtgaatgtagcggtggttgcttccgttctgacctgttatttctatcgcctacactctaatattcagaagtatcagattctttcataattggactctatggtgatgctttacttgcttgcattatactgatgctcaatcatatattgatgatgattatgatttgagtatgactcatgagattaattcacacccttgaaggtaaatgaagtattatttgaggttggtattgtatctgaaggtaaatgaagtattatttgaggtttgtgttgtatctgaaggaagtgaagtttattgataaatgtagcatgccatatacattgcatgactcatttgcatatgaagttttgtcgtgacctatggtccgaccgtaccggtacaacttagcatcgtacgttgcccgagaaggggtacgatgcggctttatacccttagaggtatgaaggcagaggacatatgcattcattgaagtgatatttgcagatgatgtggttttgtacccccagaggtatgaagatagagtacctacacattgcattcctatgcatacattgaagtgatatttgcaggtattgttgacgcagggaagtgttatagaacctattgtggttgttcgaggaaatgagatggtattggttatagtgggactactgagttctatatctacaagcatttctgatttttaattgtgactcttttaaaatgttgatgaattcaatttgtggtttaaatatctcgtcagaacaattagcttgctgagatgtttcatctcactcttgcattactcaatgcaggtgc

SEQ ID NO: 46805 - DNA, 1194 bp, Zea Mays
cagaaacaacccagtaaatcaaacataactggagtttcataattcatatgaatgcactatttaacaatctggaaagcttatgaaattatctacgtcttctcttacaaaccaaggtttaattctgttgataaaattgactaaatcttaagagaacagattctgcacagaaataagagactgaaaaactgctataatcaaactgcaataactctctgatatgatgtccgattgaggtgttcttcgcggacacggaacgatctacaaattatctacgtctcatatatatactttttatttttttgaggccactaagaccacagaaaactggcatgaacagaaactgtcgaatctgccattctgcagaaaactaaattcgagatcaaaacccaaccccacatctaatccaacctctaatcctttaattcccatgatccacaacctccaaaagcacataattacagggaggaacaaggatctcatccatacctagagtttccccaagaaattctgtaagaatagatggggaagaacatctccttgatcctctcttccccttcaattcaacgtgctcctcctcttctcgatccttgctgcgtgggggagatctagagggaggaggaagccgtgaagaggggctgccatgggaggagaggatggtcagcccaaggggaaagtggggaggggcggccaagtgtgggaggggggggggaagggtggcggccaagtaggggcaaaagggggaaaaggccaccactagggtttctttgcgggagaaaagaagcgacaccacagatgactctgacttagcatccaacggcccacaacccttttcccatatccacacaccgaagattacctttggcaacatttattttgggatattacactctaccccccttaaaaagaattcgtcctcgaattcgtccactccaaacaaaacttccaaggtaccccatattgcaccaccattccaaaacatgggtccattattggtcttaattaacacaagaacttctacctcggactaaatgtctaaggaaactacaccacctgacatcaagcatgaactaacatgtaatgaagctcaaaccaagtcatagatgcaatcaacactacgatttcacaacatcgaatttggatgcagccatacatctgcataggcctgggcaaaaaaaaaccggaaccgaggaaccg

SEQ ID NO: 46806 - DNA, 2185 bp, Zea Mays
aattggaccaacgaagatgacttcctatactacctcccagacaacaaagaattatccgtctgtcgggagatggctagaagtatggggtttcctgtaacaccccgggatccacaaacaccccagaatgctagtaaactacacatctaacattcatatataaaattttgacagcattccctttgaaaattgcataaatgaggaagccacaaagtataaatagatatcatgataagaaaacataatagacattaataatctgctagcaatgggaagacaaccataacgacatgaactaaatcaaccagtgcacacaactagttagaaacaacatcctttaacaagaagtttctaattaaatcatgactgcgcctaagcagcattattatgagagtgaaggtggatgtgctactacttcccacttcccttgatgagcaagaagcacctgcattgagtaatgcaagagtgagatgaaacatctcagcaaacgaattgttttgacaagatatttaaaccacaaattgaattactcaacattttaaaagaatcacaattaagatcagaaatacttgtagatatagaactcagtagtctcagtataaccaatatcatctcattttctcgaacaaccacaatagtttgtataacacttccctgcgtcaacgatacctgcaaatatcacttcaatgtatgcataggaacgcagtgtgtaggtactctgtctttatacctctgagggtataaaaccacatcatctgcaaatatcacttcaatgaatgcatatgaatgcaatgcatatgtcctctgccttcatacctctaagggtatgaagccgcatcgtacccctcctcgggcaacgtacgatgctaagttgtaccggtacggtcggaccataggtcacgacccaacttcagatgcaagtgaatcatgctgcatttatcaatatacttcacttccttcacatgcaatacaaacctccaataatacttcatttacctttagatacaatacaaacctcaaataatacttcatttaccttcacgggtggtgaattaatctcatgagtcatactcgaatcataatcatcatcaatatatgattgagcattaggataatgccagcaagtaaagcatcaccatggagtccaattatgaaagaatccaataattctgaatactagagtgtaggcgatagaaataaccggtcagaacgaaaacaaccacccctacattcacttgccttcatcgaagaagaaaaatgtactaggcatgatctggagtgtagccacctgctagaggacataaaacttagtacaaatatttcacaaacatttgccaacaatcaacaaatcgctcctacacctgaaaccaagacctggtggaaaacctcccactctgaaccacatgtcatacagcagcatcgctgtttgttaattttgtatctttaaaattataatagtggtgatatcaaacaaatactctagtagtatctacacaaaatactctacaacttcggcatttcgatggataattaaattctgctatctataagttctaaaacatctgacaagataactgactgaatctgttttagacagcagcatagttaacttttaaaattcgatatctcacaaactactcaaccaaaaatcatgaaattctgctggaagtaagaacttttatccctctaaaaaagtctccatagctgggagagccaatttggccatttacctgatgaaacctaccagtgaacaggcccgctcatttttgtcaggcaaacagaaacaaccacagtaaatcaaaaataactggagtttcataattcatatgaatgcactctttaacaatctggaaagcttatgaaattatctacgtcttctcttacaaacccaaggtttaattctgttgataaaattgactaaatcttaagagaacagattctgcacagaatttagagactgaaaaactgctataatctaactgcaataactctctgatatgatgtccgattgaggtgttcttcgcggacacagaaacatctacaacttatctacgactcatatatagactttttatttttttgaggccactaagaccacagaaaactggcatgaacagaaactgtcaaatctgccattctgcagaaaactaaattcgagatcaaaacccaaccccacatctaatccaac

SEQ ID NO: 46807 - DNA, 635 bp, Zea Mays
aagaaaggaagttccttaatatttgaagagtttaatatgaactaagaacctacaaataaccatgtatctcctttgcttttgtgctagccttccttaatctcgaggacgagattcttttaagaggggtaggtttgtaacactataaaaaccattaaataaaaataatgcatttagttattaatggtaattatggcaataaatttttcattcaagtgtttgttatttatttgcatttggaataatttttgattgctcatgattgattttggatattgaatagcatttcttcttaaatgaaaatccaaataaatattataataattattagtttaaaaataaatattttatttataaataattttggtataattattatgaattttagggttatttaaaaaatatttttaatttagaaaagaaaaaaagaaaaaaaaagagaaaaccctaaccgtaagactcactaggggtccaacatcccaatcagccacgcgtccccctgcctcccctggcgatcgccgttaggcttcttccttctccctccctcttctctctcttgcgcgggccccacccatctctctcccacgcccttccctctctctgcttccctgaccgagccgccaggtagccgatcccgc

SEQ ID NO: 46808 - DNA, 169 bp, Zea Mays
aaaacttatcgaccaaatgaccctctaccattcctccacagggaccctaggcttaaatcccttggatcaatcacaaacaaactccaaagtccatagaaagacactggaccaaaactaaaattactgcatcagacctgcacttcacatgtctgacaaaggcagtttgaac

SEQ ID NO: 46809 - DNA, 384 bp, Zea Mays
ctttcttccttgtttttctccttcggttacatcaaaccctagcgcgccgcaaccattttccttatttttctccttcggttacatcaaaccctagcgcgccgcaaccatcttcctcgtttctctccttcggttacatcaaaccgagtcaacgccgcttccttatttttctccttcggttacgtcaaaaaaaaacagaaaaaaaacctagtcaacgccgcttccttatttttctccttcggttacgtcaaaaaaaaacagaaacaaaaaaaaagaaaacgaaggagaaaggatacaaagcggttgtctcatctcggtcgttttaaacataccttccttaaaccaggcataacttttcgctcggttgttcaaaaaatctgaaatttt

SEQ ID NO: 46810 - DNA, 147 bp, Zea Mays
caatcctcaacgaggcaattcccagaagtcgccgcgccaccctagaccgcggcggttcttcctcggcgtatgcagaacggcggctagggtcttgcctttctggtagtcacggagggggcagggtttggcaccaatgtaggcctccca

SEQ ID NO: 46811 - DNA, 992 bp, Zea Mays
ctcccactcagccgccgccagggactccctctccctcctctctcctctagcttctctctcttctcccctccctgctctctcacccaggcgcgacgccctgctccaccgcgtccccgaccgcgcagagccccatcccgagcagcaccgaccgcgcgcagctcccacaccaatcgaccgacgcgcccaggcgaccccggctggacccgaagcaccgcgccctatgtgcccctgcacccgacgcgccgccagggccaagcgcccgatgcctcgccagggagagcagcggaccgcgcccagcgcctagcccgagccgaccccgacgccgccgagccacaaaccgttccgtgccggccgttcctccgcgttaatggagtttactgcagccgtaactcctccctccattgatgccgacaccattattggccatgaagcacctccagccgacccttcatctctctcccatcctctataaaagggcagccgagctcctctcttctccctcccacaactgagctctcttcctccccgagctccctctctctcccactcacccacgccatcgccggagttcgtccacgccgctcgccgtcgtacctcgctgtcagaatgctcaccgacgaccgtgcccgttctttgcccgccaagaccgccgtttatcccaaggttgaagacaaccccaaattgttgacgtattttctaaatcatgttttgaatttatggatcttgtgaattgtccttgtaatattgatgcgatcttggcaattcgtgtatgattttagagatttgcgatatatacgtgaaagcaaaatcaaaccccgcgacaatattttaaatatgcgtatgattttataattctaaaaatgaacacgatcactattcactaccttagtgattttcatactagaaatgtttataattaattttgttttattgtgtggaacaataattgttaatagtattttaagtgtaaatttagttgtatgaagaaattg

SEQ ID NO: 46812 - DNA, 297 bp, Zea Mays
caactcttgaatgtacaaggcctttatgccaagaaacatacgtcgctgatttctggcagattctggacatcatcttgttatgatgattcccattagatcggagcatattttgacgtgggactagatgggttggaaatcttatcttcttagctttccaacgatatctaaaacatcgaaaaaagagtccgtatgtggcatgagcgttcattttcgtgagacccactcctatagtccgaactaaattcacgaataaactacacttcaagttctcttgagcttggcaatctatgattgatt

SEQ ID NO: 46813 - DNA, 374 bp, Zea Mays
cgagggccttctgtgtgtgcgcacacacggttgtgctgctcggcacgcgccggtatcatggttagtagttgtaatccattatgagactatgtcaatgcgttatcttggcacaatctatttttgctacgtgagattcattattggtgtcagttcggtagtggtgtcacgattaaggacttatggtgccgcagcgaaactgagagcctcctgtgaatgcgcacacaggattgtgctactcgtcggatgctggtatcaaggtctctagtcatgatccattgtggaactacactgatgtgtgatcttccgtagatatcttccttgaaacaatttcggtgttgtttgtcgaagtgatcaagcaacatatgtcatctttg

SEQ ID NO: 46814 - DNA, 244 bp, Zea Mays
ctgggacacaatgcctgccacgtccctagcggcggcggccaacgagatcttgccgctagcgcagaatttggaccatgggtcctgcgaagtgcccttcgctccaaccgccgccacaggcgaaggggccaccaccggagatgggacaatagccagctgctccgcatccaaccctgcaccataatcttgttcaagacccagttaaaaaaaacaaaaacaaaaaaaaactcaccaacgaggtaatcat

SEQ ID NO: 46815 - DNA, 148 bp, Zea Mays
atatcttccgatgtgcatgagctggctaggcgtcagcgggagactgacgacaacctccgtcgtcaagcttcttccatgggtatgccatttgctccccgctcgcctgatgtgcctcttcatcctcctcctccagaaatcaatgaatggc

SEQ ID NO: 46816 - DNA, 905 bp, Zea Mays
cgcccttctgcctccttgctctgcgcgacacctgctccttcccttggtgcccggcgaccttccatggccggctgccagaccctgctccactccatcgccggttggtcgcgtgcccctggcctcaacctctttgctcgctgcgcgcgctactccctggggtcgtgccctcctgcttccctgctagtgctgtccggccagccgaggtccctgtccatggccgagctcatactacgcgcgtccctcagccttgcgcgcgagctcagcgtctccctgcgtaccgcagcatcgcctctccctggtcgcagttcctccaagctccttgctgttcgcccatccacgcgccacttcgtccatggccgccgtccatcgtcgagtccatacgtgcgcacctctgctcggatttcgtcaggcccgcgagctcccctgccgcgcccctgtccaccgcgcctctctctctctggtgctctgcgctggccgcaaatcggagcttcgcgcgcatcttgctcgctactcgcccagctctctattcgccgtcgaatcacctactcgctgtccgcgccgtcgaaattccctcgccgtgcgctcttgcgtcggctgccgctgattctgccattgaactttcgtgctctccaacgctccagctcgttgttgttgccaagtccgaatatcatagctcattctcgtagccgtgagttcttccctgtgcacgcgcgagctcctctgcttggtccgtcgtcattctccagctccttaccgcactcggctgttcgtcgtcatcgctcggtcgcgcgacaggctgactgcgtgtcatgtgtcacacatcctaggccctcgtccacgcgtcgttcgtcttcgcactgtgtgcgacagtatcgtctttttccctgtcctgtgctcgcgcggtt

SEQ ID NO: 46817 - DNA, 287 bp, Zea Mays
cttagttcgtccggcgtgctggtcgctgtcccatactgtgccttttagctcggattctgccctagctcgtcgttgcgtcgttcacagtcgagtcgtcgaacccgtcatcccctgctcgacccccacctcaccagcttgctccagactcaatcgaaggtcatcgtcgatccgtgcgtcatcaagaaatcccaagaatcaggtgaagacgaagctagcagcgctatattccccaagcgctcgacaaattggctggatcagaaaatcgctactgatctcgcggattcgag

SEQ ID NO: 46818 - DNA, 342 bp, Zea Mays
ctcaaatcaagacatggcatcaagtcatcctgctactacacgcgagaaaatagacaacaaggtatgcttcccagggatgaaccacaaagtttttttggtcagacaattaaatatatgacgcaacaccatttcagattttcaggaagccctatgacaagaatatccttgtccttgcagagatattagaaccttgggtatttaatttctaaaggaatttcccctagccaagtatatttccaaaagaaggtcccgtccccattgttatgttgagatgaatttatctgctctagggaggaggattaacaaatctggaaggagaacgcatggcataccttggtcgag

SEQ ID NO: 46819 - DNA, 1364 bp, Zea Mays
ttcctcgttcagttttctgctatccttttagatagaacttgccaagcataccccaaagtccaaacaatatgataataaactatgactgctagtgaaccacagaacttcgacagtgtattctcaaaaacttcattgcaaaatcattttgagtaccaaataagcaatgaaagaagggaagaaacagaagaaaatgacacatgaaatgaatcattatagcctgaatctgaacatgcaaaatggtaatgtggttatttgtcaatctgtgcataaaagaacacgcaaagccaaacttaataaagaaaatatatctttgcagatatctgttcaaataaagcagttttacgtaagtcaagcatctattaattaatacatattccatgtgttctttttttcggttaagctttgtgcgcaggcattaagaaaagctatagcatatcattattccccaagagtagcactcaatagggtaggagaatcacatgtctcttcaaccacacatgataccgacttaccgagtgaccaaaggaattgcatattggaaaatgtagcaagcaagcaatatggtaagggaatgtaactatgtctcttgaaatcatataacgacaaacaaaaaacacactttgacaagataaaatgacaaagaaaatgaacagagctagtaaagtatatcctgatagagtgagcaataatacaacagtgcacagtgcactgccagttagataacagaggcagtgttatgaataaaacacataaaaaaggaaaaggcttcaggtcagtttggttcctcggctagcctctcctcacatcgtgaagccgaactagacttaccttgccaggtggatcgactagcaagtcggccgacttgaaatcattgttttcatgacactgcatgacttgctaatctctagttacagcttaacatcaaataataatgtatcatcgatggagtcactagcaacgtttttgtggatcgttggaggaccacaatcattttcacaagctgaaaataattttacccgatcacagacaattcacaccaaatttcatgaagtactgaattgtttgtgcaagttagcgaaagacaatattaaaccaagagatcctactttcaatattgagcatgataggatcaaggaggaacgtttctggccctatttccaaggagctattggagctactgacagttcgcatgttctagtaacagtgccaacagatgaagtggttaaccatacatatcgacatgggtatacatctcataatgtgctagctatttgtgattttgacatgagatttatctttgtggtcgttgggtggccgggttctgcagtctgcacatgatacacggatcctgaatcatgctttag

SEQ ID NO: 46820 - DNA, 68 bp, Zea Mays
gtggatttggggtagactccctcccactggaagttccagctgtatcctgtgatcgggtcttggacggc

SEQ ID NO: 46821 - DNA, 1085 bp, Zea Mays
tgctgctgtatggcatgtggttcagggtgggagtctttccactgggtcttggtttcaagtgtaggagtgttttgttgattgatggcaaatgtttgtgaaatatttgtactaagttttatgcccactagcaggtggctacactccagatcatgtctagtacatttcttcttcttcgatgaaggcaagtgaatgtagcggtggttgcttccgttctgacctgttatttctatcgcctacactctaatattcagaagtatcagattctttcataattggactctatggtgatgctttacttgcttgcattatactgatgctcaatcatatattgatgatgattatgatttgagtacgactcatgagattaattcacacccctgaaggtaaatgaagtattatttgaggttggtattgtatctgaaggtaaatgaagtattatttgaggtttgtgttgtatctgaaggaagtgaagtttattgataaatgtagcatgccatatacattgcatgactcatttgcatatgaagttttgtcgtgacctatggtccgaccgtaccggtacaacttagcatcgtacgttgcccgagaaggggtacgatgcggcttcatacccttagaggtatgaaggcagaggacatatgcattgcattcatatgcattcattgaagtgatatttgcagatgatgtggttttataccccagaggtatgaagatagagtacctacacattgcattcctatgcatacattgaagtgatatttgcaggtattgttgacgcagggaagtgttatagaacctattgtggttgttcgaggaaatgagatggtattggttatagtgggactactgagttctatatctacaagcatttctgatttttaattgtgactcttttaaaatgttgatgaattcaatttgtggtttaaatatctcgtcagaataattagcttgctgagatgtttcatctcactcttgcattactcaatgcaggtgcttgttgctcatcaaggggagtgggaagtagcagcacatccaccttcattctcataataatgctgcccagacacagccatgatttaattaga

SEQ ID NO: 46822 - DNA, 277 bp, Zea Mays
cttgcgtacttagggttttattcccattgttgctgcaggttacgagtcactttgattgtgattgatgttaagtgccggtgggctcggccttcttatataagtatatcccatctttagcttctttattgaggattgtcattgagctagcatatatttcaaagttttaaataatttataacatttcgaagtatatttctttgaatcacttttgtaatcactccgataaatataatgtaaatttgatgtaacttgtaactttttgtaataaagaaattcc

SEQ ID NO: 46823 - DNA, 2290 bp, Zea Mays
gcaaccctgcctccgcgtgtagaaattgtaatacccccatttgtgtggtgaaaaggtaactggcacttggcactaaatttggtactgataaaactgtgtgatgcaccagaatcaaaaagaatgattgcaggataattcaaaactgaaaagataccagtcaagacgggtgctccctctggaatatcatccatggtggtgaagttcagcctgccttgcctcacttgcaccttctgcctcttgccttggttctgattggaattctgtccctgcctctgctgatttctggggcaatttttggcatagtgtctagtgttaccacaagtgaaacacatgttgtcattggcctgacggtactgctgttgtggctgattgttgttcctctgcactgggagctgagagcggttgggtgtctgctgctgctgctgctgtggtcggatcacccaacatccttgctgctgctgaggtcccctgttctgagtgtcagatacaatcctgaagcactgaggctgagctgaaggtcctgccacaggggtctttctcttcttttctgcctgacgagctgtaatgcagtcctcctcggaaatggccatgttgactaactcattgtaactgttggccctgacggtgttgagacagtcgcggagcttagtgctgagccccctcctgaacctatccctcttcttctcatcagtgtctgcatgatatctgacatactgacacaggtcattgaaggcctgtgcatactgcaacacagtgcgatttccctgagtaagtgccagaaactcattaagctttcggtccatgatgcctgctggtatatgatgccctctgaaagcggccttgaactctctccattccaccacatggtcaacaggctgcatagcaaggaagtggtcccaccatgtctgcacgggtccgcgaagctactgggtggtgaacctgaccttagacacatctgagcaaactccattgagtagtgggaattgggattccactaccctgagccatacatcagcatcaagcggatcctttaaccgagtgaacaacggcggctgcgtactgaggaattcctgataagtggctgctgctgggggacgctgatggtgatcaccaccaccataaggctggggtggcggctgatgctgagccaaatgtcgcagaatctcaatctgctgagccatcagttcttgcatggtaggaggcggtggcgatggtggaggaatgcgttcattctgtccacgacgcgctcttcctgccatatgaaaaattaaggatgctctcaatatcatacttctgatgtcaggtttcatatgcggtgaaagatttgaaggggtatgtggcagaacctccaagttattgggcccacatgcacccgtccttgtcccaaagacctcatacggctatgcatgtgcaccagataacttaacaggatctgtctgattgccccaaggacatcggataaaccacttacaaccagaaccgcgggattaagtatcacaaatcacacacaccaatattgttgcagcggaaatcttactaccaaattttacattttacaaaaattttacattagtttatcggagtgattacaaaagtataagtttgaaatatatgctagctcaagggatcatcctcaataagaagtatagaagggttacttagactaataagaaggccgagtccaccggcacttaacaccatcaacaacagcacaaagttagaacctgaaaaacaacagggaataaaaccctgagtatggaattactcagcaagtcttaccctactaaagaaaagactctcaagggtatgctggttataagggagtcaaggtaaggtttctcaatgatcaaagactctgttttgcataaatgcttactaaaagtggatccttaaaaatccaattttattgtcaagttaggtaaaattacctgcaactagagttctttctaccctagttcaatcacttgacctacactagccaatttgttaacaaacccttcatctttactggagttctacgtataagtcagtgaccaagtcttcataaccgcgaaggtacggcgatccgaatcgattatactcagctgaggatctccaatcacacgacatatgtagcacttaacccttgcatatgtcaactcgccactggggttcttaagaccagatcaggttcacgccaaccaagagcacagatacagcactgtccagcctcttgccacagagggtacacgctactctcgccaccgctccacgcccattcagtgttatcttattctggccttagtttgca

SEQ ID NO: 46824 - DNA, 2647 bp, Zea Mays
cagaggtacatcttttccgatgttgaacccatcaaggcctttgacagatccaccatcaagttttattttcgaaaacatcccacccacttttgccacatcatcttttgtaaaacaaaacattttgttttttctaaagcaaggctaagcatcaaaaatcttttgtaaaacgggtgatcaaggaaggtaatcaaattcaaggaaggtaatgcaggaattgtttaatcaatcaactcctatcacctaatgcatcaagcaagtgagaaagattttaaaacatcaatgaaggtggcaaatgcaccggggcttgcctgagtaacactaggttagtgttgttagacgacgttcgcttgacgagcagcctttgtcttggtacttgatcgggttatccatctgcatcatcctgtgggttagcccgtgcttggggtcgacttggctcttcttctgcatcacgcgattatttatcgtacctcatgagatgcatgatgcacatgtatgagcacgagtatacgagtatattatagataatctacactaaaaaggatgaaacacttaaaaaccaagcgttaagcaccatggatatcacagcagggcatcgactacatccattaaccaaattgacatattacactagaaaatctatttttattcctagctttttattaactctttaaactatgtatcttaattacttgatttaccgatttatctaaatcgatcatcataatatacgcatgctaaattaataacatttattgagaccaataattctattcactctatttatagactcagttaacgggaatacgaatcaacttaccctaactaattcgacgcgataatcgcaagcacgacgacggttccggttgacgccatctaggggccttcttttcttcggtaatcaattgctaaagatcttttcctcgactgaataattctgacgagtcgaacttgagtcgcgtaggatatccgagcttttgtcacgcacttggtgaataccacgctgctaatttcgtcttcacccgattttggggatttttttgatgactcgcggaacgacgacgagatcgtttttggagcgagctggtgaggtgggggtcgagcaagggatgatgggttcgacgactcgacggaagagtgacttagagctgcatagatctggggctgctgcatacacgacgctacgatgaacgacggcaaccagcgaggttgacgacgcgttgggaattaaggccgagtgagccgagagggcacgctggcgagcaggaaactgctcgtgcacagcacgaaacaatgccctgtctggccgagctgaaggaagcgcggaccagagacagagtgggcacctggggcgagttcacggcaacagacacacttgacaactaccgacgcagccggataactaaaaatactgtgacagccaagaatcggctcggagacgatgaccggcacgcaagagaggagctcgacgcggaaactcgacacgccattgcgagcagagaattttcgtgtgcgcggcaaacaaagaaagagcgagttgtgcgtgcgcagagagctcgacaacccgcagcaggggctagtagggcgcgagctacgcgcaggcgcgcgacgaccacggggagcaactgagaacggctcgaccacgacgagcaactgagaacggctcgaccacggcgagcaactgagaacggctccccagcgcacgaatcagccgacatgtactagggagttacggatccgggcgaaaagagttggtggctaggacgggcgctgtctggtggagaagctcggccatgagagaccgagagagagtgctccgcgagctgaaggctgggcgcgacgcagagaattcgaccggtgagcagagagcgcagggcgagcagcaaggcgacggcgcggcgagctgagggagcgacgcggctgggctgagaggagggacacgcgcaggagctgggagctgagcgtcggcctgctggatgtcgctaggggaaaaaggtgcggtggccatggcgacgagctggagaccgagcatgagcaggggagagaaaggtccgcgtggcacaccgagctggagcagacagaacgcgcgtgcaggggacaggaagccagcacgccagcagtgaagctccggctgggcggttcagccggcgaacagggagaggaagaaggggagcagagaagctgggctaggcagccgggcggccaagcgccatgggagggagctcagccaggggcgccagagaagagagctggacgagccggagcttggaccggcgccaaaccgaagagccgcggctgggagggatccgagctagggagctatcatgggaggggcagggacgcgccatgagctaaagcaaggcgcaggaagatggacgctgagcagccgggctggagcaccacgacgcgcagggaggcaggccgggcgcggctggggcagggaggagtagcgcgcgtaggagagcttgccggggagcagagaggcaagggaaggagcgcgcgcgtaggagctctacagcaggggaagggagatgacctcgcgggggataaatagcctgcgtgcgcagagataaggatcagggagaggggcttgagcgcggggaggagggagggagaagcctgcgcgcggcgctggagcggggagatcgac

SEQ ID NO: 46825 - DNA, 136 bp, Zea Mays
aataaactaacgataaataaacggagggatggggaagcctgtcccatcactcctcatgctcctcctcagccgaggtagggtcccactcgactgtccagcctggtggcaagatggacggccaagtcactccagcaac

SEQ ID NO: 46826 - DNA, 1751 bp, Zea Mays
ccgacgatcctgctcgcatggccgaagcttttccttggatggggctatataattagggtcccatgtatctccctccagccacccaaaccgcggagacccagggcggggaccaagccacccgaaagccttgtgttgtgccatgggcaccatcgagcagagcagagccgtgcgcatacaccaacaacggggtctccaaggcaagctcggtagcttcacctagactccaggagggcgtccgagcactcgctgggcgcgtgtggtgcacggtgcaactggcgatttctcgccggagttgagaaactgcgccacatcgtggccagggtctacgactacatgagagctggtaagaacgccactgttcacctcgctaccttcggtgcatcgtgtaggaccatctggtcggtaggttggagccttttcgcttggacaaccatctccggcgtgctcatcgacggattagtgggcggcgccaccgtgctctggatcctgggagggagaagaaccgatggtcgctgatcagtattcaacggtcgtgatcatgacgcacgcaacccttccggtggggaaatctgaaccgtggatctggcaagtagcggctcagattaaaacccggtgtaccagttcgggggtcacgttgtggccattggatctcgtttgggcgatcgagattacaacgtatagtaccccccttcgtccgtcgatctgagccattgatcgtgtgggtaccgattcgtaaagcactcaatctaatccacgtcacagactggtaatctaacgactcatatccatcaataccccttcacctcagaacaattgtaaaagagcccctacacttatttataaataacccgtcgtccatcgaaagcataagattatcacggttaggtctagatttttacagaataagccctgaagacttaagaaatagcatccgcagttcatacggttcagaaataataaaagaaatatggaaattaattttcgagtataaaagtaattcccaaatcttagaaaattcataactttcacattttaactccgatttggcccgttcaaattgtgttagattcgtaataaaatattctacatagcgaaaaacattattttgtcaaatcaaatacttttataattagatatttatttaacttatgttagttgattaatcattctaatcaaagttagtctgtctatgactataatttaactaaaatatgatttctactatggtataatgtagattaaagttatttctttaatatcgttatcacatgatttataaactcaatataaagacctagatctaattggttaatcacatagatcttccagaaaaccatctctcttcatccataactccgattttagtcgttgtcgaacccacgacctcgtaggatcacgtagaatattcttatgctatttgttttcatatttagtgtactgatattttttgtgatccttgtatatttgtatgtattgctacgaataggggtgaggtcacaagaatctgaataccatcttggtacatgggatctcgagtctaagtcaagttgtgcccttgatcacttttctctacctaataatgttcctgttaatcattatgacatgtttaggttaatttgatgggacctaataggtttcctttgtattgtttatcccacacctttcaaacaaaagaactatttggtagatttgctattgctctacctcgtttcaagaaattaatgttatattatgatcatgttctaattttg

SEQ ID NO: 46827 - DNA, 463 bp, Zea Mays
cccagaccgagaatcctccagtggagaacaacttttattttgacatctgcagtgtggaaacataaactcttacaacacaaggcaagccccggtgcattatctcttttccttgttgttttaaaatctttatcaccttatatgatacattaggtgataggaattatgtgttaaagagttaatgcatttccttccttggaaaatttggttacagtccttgttacatgttttatttaaacaagttttctgatgcttagttttgctatagaaaacaaaatgttttgttttgaaaaagatgatgcttcacattggatgtggatttttacaaagaaaatacttaagatggtggatccatcacggccgtgatgggttcaacatctgaaaagagtacctcttccaggtaccaaactttggggttttaagtaataaatatgagaccgggtgggtgacttgcacgagaggggag

SEQ ID NO: 46828 - DNA, 350 bp, Zea Mays
aattacttaacctgaagagaaaaaatgaatttttaaggatccactcatagtaaggttttcagcaaaaagagtctttgaaacttgttaagctttaccttgattcccaaagacaagcatatacttgagagtctttttccttagacgggtaagacttgcgaaagtacactccgtactcagggttttcaagcccatgttgttgtaggtgatgaaactgttgagttttgctatttctgctccaaggttgtcccgaaacaggaggaggagaactaagaccttcctggggaaggtggtttgccttcctataatgtaataagtttaagcactcagtactcggttatgtaataatcaac

SEQ ID NO: 46829 - DNA, 166 bp, Zea Mays
cccaacttcatatgcatgtgaatcatgcaatgtatatggcatgctgcatttatcaatatacttcactttcttcacatacaatacaacctcaaataatacttcatttaccttcagatacaatacaaacctcaaatagtacttcatttaccttcagatacaataccaa

SEQ ID NO: 46830 - DNA, 1671 bp, Zea Mays
ttcaaattgatgattaccttgtaccccaaaacacacaattcacactcctcttagaaacatcctcaatcaagcatatataacaatattattgtaataaaactcaaccatgaaaaacatggtgaaaacatcataggcatacttgtatatcacaagcatagtaacaacttcaatctcacaaatgaccagcgatatcaaccgcattaataaaacaatatcaaattttcagaaataaattatatcaagcattaagccataaacaacttaccacatcatcgtaaaggaatcaggaggggtgaaattattgtcatctgcacttcaaagtcactaatatatatcaaagatacttgaacccatacccttcctatatgtgcaagtgtgtcaaatttatcttcaaattgccaagaatctaaagcctaagctttgataccaactgtaacaccccgggatccacaaacaccacagaatgctactaaactacacttctaacattcgtatataaaatttcgacaacatctcctttgaaaattgcatagacgggaagcaacaaagtataaatagatatcatgataagaaaacataatcaacattaataatctgctagcaatgggaagacaaccataacagcatgaactaaattaaccagtgcgcacaactagttagaaacaaacatcctttgacaaaaagcttctaattaaatcatgactgcgcctaagcaacgttattatgagagtgaaggtggatgtgcttctacttcccacttccctggatgagcaacgagcacctgcattgagtaatgcaagagtgagatgcaacatctcagcaagcgaattgttttgacgagatatttaaaccacaaattgaattaatcaacatttcaaaataatcacaattaagataagaaatacttgtagatatagaactcagtagtcccaatataaccaataccatctcatttcctcaaacaaccacaataggttctataacacttccctgcgtcaacaaaacctgcaaatatcacttcaatgtatgcataggagtgcaaagtgtaggtcctctgtcttcatacctctgagtgtataaaaccacatcatctgcaaatatcacttcaatgaatgcatatgaatgcaatgcatatgtcctctgccttcatacatctaagggtatgaagccgcatcgtacccctcctcgggcaacgtacgatgctaagttgtaccggtacggtcggaccataggtcacgacccaacttcatatgcaagtgaatcatgcaatgtatatggcatgctgcatttatcaatatacttcactttcttcacatacaatacaacctcaaataatacttcatttaccttcagatacaatacaaacctcaaataatacttcatttaccttcagatacaataccaacctcaaataatacttcatttaccttcaggggtgtgaattaatctcatgagtcatactcgaatcataatcatcatcaatatatgattgagaatcattataatgcaagcaagtaaagcatcaccatatagtccaattatgaaagaatccaatacttctaaatattagagtgtaggcaatagaaataacaggtcagaacggaagcaaccactgctacattcacttgccttcgttgaagaagaaaaatgtactaggcatgatctggagtg

SEQ ID NO: 46831 - DNA, 486 bp, Zea Mays
accacggaaaactggaaagaacagaaactgtcgaatctaccattctgcagaaattaaattcgagatcaaaacctaaccccacatctaatccaacctctaatccttcaatccacatgatccaaaacctccaaaagcacataattatagggaggaacaagcatcccatccttacctagggtttccccaagaaaatctgcaagagatgagggtagaacatctccttgatcatctcatcctcttcaatccatcttgctcctcctcttctcgatccttgctgcgtgggggggagatctagagggaggaggaagcagtggagggcggctgcaaggggaaggggggggcggccaagggtggggaaaatggggggttggcggccaagaaaagggaaaaagggagggggcgaccactagggttttgtgggagaaagaaacgacgcctcagatgtctcctgactttgcatccaacggcccacaactctttccctca

SEQ ID NO: 46832 - DNA, 50 bp, Zea Mays
aataaagctgcctgaacgaactagctctgctgctgcgcggtctctccgtg

SEQ ID NO: 46833 - DNA, 837 bp, Zea Mays
gtcgggagctgtcgcatgggttagttgggccgcaattggagtttcggcccattaaccctcccaaaccctagccgcctccctcctaaccccctccccccatgtgcagccgcccccccccccacttctcttcccccttggccgccgcccccctgcccatctcctcctctctcaattcttgcaaccaccaaaccctagccgccccccctctcaatcccctcctcccaaggtgccaatacttgccgctcggatcatcgtcgtcgtggtgcgagtcttcaatcattttggtggagggaagaagggaggaaggaaagggggagaatccaaggtgatttttgtgttcatgccttgttcatttgcgctgcaatttaattgattagaggttgcgtttgcgattgggtagaggggggctgtccagaattttaggtggtgggtgaacagaagtagtctagcagtttctgtgtttttttcgtgaggaattaagggaaatcagtttggggatcatgtagaactttaccttacctttccaacgagtatttatgcgctcaatttggagttataaattgaaagttatcaccgtttgaatccgggtatgtggctgtccaaaaaaacagatttttcaggggaatgaacagcagcagtattagcagtttctggggatttttcgggagtaattagtgttaatcagtatgagaatcatgtagggctttatgttatctttccaacaagtacttacgcgctcgattcggagttataattcaggagatatcgttgtttgaatccggttatgttgctgtccaaaaaaaacagatttttcaggtgggtgaacagcagtggtat

SEQ ID NO: 46834 - DNA, 937 bp, Zea Mays
gaagttgaagtgtctttttgaatcatgttatatgaagtgttgtaggcatgacatgcacatcgcatcatccatcttgcattttgaagttatgtcgtgatcttatggtccgaccgtaccggtacatttttagcatcgtacgttgcccgaggaggggtacgatgcggcttcatatccctagaggtatgaaggcagaagtcatccttgcatttgcagacatttgcactcatgaggaatatatgaagtgtgacattactatgttactattgtggtttctacctgcgaggtgtggtaactaggtgcgttgtacgttgtatatgtgctgcaccttcgtaataagaaggttgtggaattaagtggtggtaaaacaatgttcttatgtggttaaactgtttgatattattttacttgctgagatgtgtcatctcactcttgcattactcaatgcaggtacttgatacatgttgggaatgaggggagtagcagcacgtccactttcactctcacaataacgttgtccaggcacagccatgatttaattagaaacctattgtcaaaggaagtttgtttattttttttatatggtcgtgcgcactggttaattcagttcaggtcgtatgtttatctttccttgctagccgagtaataatacttagtatgttttagtcatgatatatgtttatactttgttgctcccttttttatgcaatcttgcaaaggggatgctgccgaaattttatatatggacgtcggaagtgtagtacagtagcataccgtgttgtttgtggaacctggagtgttacaatgggacaccctcaagatatcgcatgaggggaacgacgccaccatgatcaccaaaatggagttggtggaaggagagctaggaaggtttgccatgatcaagggagaggagctgacggaaacgtacaacagactcaag

SEQ ID NO: 46835 - DNA, 408 bp, Zea Mays
ctttcactgttattgaccctcatcttgtgaacctcatacatgaaaatctcaggtacacaaagatgacgcccgaggagatactcggaaagtttgttagcgggcgtatgatggtcaaggaagcaagatatgttgatgatgcattaaacagccccatacccgcctatgagcctcaacccgttgctctcaaagcaacaagtagcagagaggtgctaccaagcaaggtggcacaagttgaggcggccgggctaaatgaagatgagatggctctcatcatcaagcgcttcaagactgcattgaaaggacgcaaggattactccaacaagagtaaagcaaagggaaaagcgctcctacttcaaatgtggtaagacaggtcattttattgcccaatgtcctgataatgaaaatgac

SEQ ID NO: 46836 - DNA, 174 bp, Zea Mays
ctcttctagctttacacggtgaaaaacttaggttgggaatgagagtgaaacacaatcaagagcacaagaacttctcgcaaggagataactcttttctagctcaaatcacattaatatggcgcttggaggctattgaatgcttgcgagtagttgcactaagtgtagagatatttg

SEQ ID NO: 46837 - DNA, 1532 bp, Zea Mays
aaagaacgctgtgttctgcatcctcatgcaagcgccatcgcatgggagatagaagagagagagagagggcgtacgctgtggctcccgttctgctgccgttcgtgggagatgtccatggaacaatcgacgcgtcgcactgggagccgaagaaccaaacaggtgatggcgccggcagtgtcttccctgcgctacggcaacaacctctcggtggtgggaatcttcgcgcgcgacggccgtgctctacgggggcatctaccgtaccatcgtcatgctaccctgcgcgaccatcccgctcgtccagcgaatgggccatcgcagactgctcgggaacgaccccatcgactgctccatgatcttccgctacttcctctcctccatgaccatccgaaccaacctccagaaactgctcgacttcgccccgccagcaccgttcccacgcgttgaaccttcatggtgctcctcgaccgggcccgagcaaacaagctcaccggcgggcgggacgctggcggcatccaccaaggccggctctagactagcctctccacgtgcctccttgtctgctggtgctacggtggcggcgccaatgagcttttccccgtgctggagtctgctcccaggtgtcgggcggatgggaggatgacagtggctggatcgtggattctgggttgtgcggctgtgatgagaacacgcatacccctttcgcgtatcctgatctggtctgtcggattgggatcggacgggatagagtgcatcatcggcgtggacgatttttaaccatggatctcggatccggtggcccgtattcaatactggttcatcagtgaggtaaatctaatccgagcactcggattgtaaatccaacggctacaagatgacccataccccttcagccgacccgttttacaaaagagtccttacactatccagaaaacaacccgcagttccgcggcagtatagtttgagtctgggccacttttgcgttattgcccctggactcttgtgatatcttgtgcgcagttcagaaattagtaaaaatgaataaatgattaggaaattgattttttattatataaataatcccagaaactcgtttaattcatataaaatccatattaagtccaaattaacccattccagttcctataattttgtaatattattgtttatcaaatagttccactgttttgacatgaaagccacattaaaatttatctcttaattaatcctgtatcaaccacatgaaacctttggaaattcataacttaaaatccataactccaaaattaataattcatgttccagtgatctcattttaatatgtagattattaatatgtattttgttcttatgtttggtgtgatgttaattttgcctataccatgtatgtttgtattgctacgtttagcggtgaggacacgtgtcatctaaagagcaagttggtacctggaatctcaagtctcaggcaagttgtgcccttgatcacttcttttacctactcatgttcggattaatcataatgatctgcataggtt

SEQ ID NO: 46838 - DNA, 389 bp, Zea Mays
ctttagcacgcgctccttttcgtattgcaatgggcaaatcataagtgccataatcttcagtttctccatgagacgtcaaaggtacatttatagcctctaatgtgtttggagagaactgctcagtacttgatgctgaattggtttcaggagcctgagattgcacatgggactttcttcttgtatatacttcgcccttatatcgtaagtcgtctccacaagatttattattctcgtgactaggatgtgtctccaattcacttggcattacttgcatcttttgagaagcaccaatcaccacttccattttatttggttgttgttccattgaatcaaccattctgttctccccctctcgactagcttcatctgtgctagtagagacagaatca

SEQ ID NO: 46839 - DNA, 415 bp, Zea Mays
aggttggtcgctatagagacaggtggacatccgacggttggtcgctattgattgacatgtgactattttaattactcaatgatttaactacttaatgattttttatttctcttaattgattttggatatcgaatatcatttcttgttaagtaaaaatccaaataaataatataataagtactagtccaaaaataactattttatttataaataattttggtttcatcattatgaattttagggttatttaaaaatatatttcgaatttagaaaaggaaatagaaaaaaaagaaaaagaaaaaaactaaaacctaacctaactaacggcccaaggcccaacaagcagccgcccctaaccctaacctagccacgcgcgcctccttcctctggccgccgccacctgcttctcccaccc

SEQ ID NO: 46840 - DNA, 1039 bp, Zea Mays
ttggactccaaaccatcaaaccgacttgacttgatctagattgtaatctatgagctttaacaccctgtaatggtcacatagaacatatccaaacataggaacaacccaaactaaagctcaaggcaaatttagctcttttgggttgcattcaggttctggctttgacacaactcctagtgaccttgctcatttcttgagcttgatcttgagccttatgacttacaccacataaccataggtattacactattggttgtaagtcacatccttaagtcgggatcctcgatgcaccatagctcttctcaactcgatcaaccttgactttgcaagtcttcttattcacccctggctttgggtacctcgatcttcttgaccttctcccgtgcactcagtacctcgaagctcttcttgcctccatggcttgaccagttgtctccaagttatgcacacggagtctcacataagcaatgtacattcttcacttagcttgtgatgtctattgtccatagtcatctcagcctttggaccatcacacttgtttacttgtgttgaaccctgtaagctttaacctaagcacatgttcaacacttagcaacacatattagtcctttaattaggttgtcatccaaaccaccaaaacccacaagggagctttcataggttcatacaatacttgatgtatatgtcttatatatgtgtctatattcatcatcacctagttgaatatatacataaaaattaaaagctaaaatgtataataatttggaacggaggtagtatcaaacagagaggagtgtgatagagatgggcttgtatattcaaaaaaacttaacaaggtattttgcttcagttgtaaagtatttgcaaacgaacattgaaaaggtctactagcgaatgatgggttcattgattggggcatcttagcaaaaagacttaaaagaacatgaaacaattagaaatcatttcataaatatgaccatttggtatgaattgcataacagattacaaaaagattagacaattgacaaaactgttcaac

SEQ ID NO: 46841 - DNA, 640 bp, Zea Mays
ctaagtcggagtcatctgtggcgtcgcttcttttctcccgcaaagaaaaccctagtggtggccttttcccccttttgcccctacttggccgccacccctttccccccctcccacacttggccgcccctccctcctttccccttgggctggacgtcctctcctcccatggcagcccctctccacggcttcctcctccctctagatctcccccgcgcagcaaggatcgagaagaggaggagcacgttgaattgaaggggaagagaggatcaaggagatgttcttccccgtctcttcttgcagaatttcttggggaaaccctaggtatggatgagatccttgttcctccctgtaattatgtgcttttggaggttgtggatcatgggaattaaagaataagaggttggattagatgtggggttaggttttgatctcgaatttagttttctgcagaatggcagattcgatagtttctgttcatgccagttttccatggtcttagtggcatcaaaaaaataaaaagtctatatatgagtcatagatagtttgtagatatttccgtggccgcgaagaacacctcaatcggacatcagatcagagagttattgcagtttgattatagcagtttttcagtctcttaatt

SEQ ID NO: 46842 - DNA, 646 bp, Zea Mays
cttagaggtatgaaggcagaggacatatgcattgcattcatatgcattcattgaagtgatatttgcagatgatgtggttttataccctcagaggtatgaagacagagtacctacactttgcgttcctatgcatacattgaagtgatatttgcaggtattgttgacgcagggaagtgttatacaaactattgtggttgtttaaggaaatgagatggtattggttatattgagactactgagttctatatctacaagtatttctgatcttaattgtgattcttttaaaatgttgattaattcaatttgtggtttaaatatcttgtcaaaacaattcgcttgctgagatgtttcatctcactcttgcattactcaatgcaggtgcttgttgctcatcaagggaagtgggaagtagcagcacatccaccttcactctgataataacgctgcttaggcgcagtcatgatttaattagaaacttcttgtcaaaggatgttgtttctaactagttgtgcgcactggttgatttagttcatgccgttatggttgtctttccattgctagcagattattaatgtctattatgttttcttatcatgatatctatttatactttgttgcttccccgtttgtgcaattttcaaagggg

SEQ ID NO: 46843 - DNA, 1490 bp, Zea Mays
gcctcggctccctctgttagagtagccatggacgccgctctttcttcctgctgtacgcctgcgacatctccaactcggctggccgggcgccctgattttctagcccaagcgcctctccctggtgctcggactcgccagccgcggcgccactcctagctctctgctcgctggaccgcgccctgggtcaccgtcgtgggctcaacctcgtcaagccgttgtctcggatgtgcaggagtagtgtaggtgcttgcagttggtggatcctcgacatcgagctggggatagtgaagacagtgctgtttcgtgcgtcgcttatccgatgctcgacggaatgcccaacagggaggtgatagcttcgtgtgtcattgagtccgtcgttttttctcgtccagtgctcgcacggtcgtgcccgaaccatactgtcgtctcctaaccgcttgcccttgccccctgcacgtgcttgtcgcgcttatcagccccgcgccggtcatcgtcgtcgatactacacttgccggtggccgaagctcgcgtccccctctccctccccggactcagtgtccgcgctctcactacagcttgtgaccttgctgtcgccagaatccttactggattcgtgtcctcaccagagctcgcgctaacctgctcaaccatacctcgctagctcgctccagaatcgatctcgtcgtcgtttcatgcatcctcaagaaatgccaagcgtcggataaagatgaagcgcgatttgacgcaacacttaccttatttttcggtgaaatgctgagctgaaaagcgtcgttgatttcatggtttcaagtcgaatttaattgatggtaagttaaatcggtaaccgttctatagttcactatttttattaattgatttagtcgatggattgaatagatatattaatcgcgaacgattaaatatcgtatttaactcgtaggctatacaagttaatccgataaaatggcttagaaaactagttaagttagttttaagtatggttatggccggttgtggttagcaccattgacctgtattttatgcgtcttaatttacaaaatggaaacatatgtctggtataattggattgatctaatgttggggtgtgcttgtgtgcaatggtgaattaatcatattgtataataattgtcgatgggtaggtcaggtgagtagtgccttgataggtgtatatgttaaatataattaaataggttccacgtatgtatgagtagtggtcttaaatattggtaaaatgttttgttataagtgtttcattctcttcgatatagatatctatcttatacttgtgctcatacatatgcatcgtgcatctcatgaggtacgataaataatcgcgcgatgtggaagacgagccaagtcgaccccaagcgcaggctactccgcatgatgatgctgatggacaaacctgcctgaacaagtatcagaacaaaagatggtcgtcaagcggatgtcgtctaacaacactaacc

SEQ ID NO: 46844 - DNA, 324 bp, Zea Mays
cggcggcggctgctaggggcagtgagcggcggtttagggttagggaaagcaggggcgcgcggctggctcttcatgggcctaatgggccaaggttaggttagggttagttaggttttgttttttttcttttttttaaatttcgaaatacatatttaaatactcctaaaatttataataattacaacaaaactatttataaataaaatatttatttttggactaataattattatattacttatttggatttttttaacaagaagtgctattcggtatccaaaatcaattatgagaaatcaaagatcattccaaaggcagataaat

SEQ ID NO: 46845 - DNA, 252 bp, Zea Mays
cccctttgcaagattgcataaatgagggggcaacagggtataaacatatatcatgacaaaaacatactaagtattattaatcggctagcaagggaagataaacatacgacctgaactgaattaaccagtgcgcacgactatataaaaaaacaaacttcctttgacaataagtttctaattaaattatggctgcgcctgggcagcgttattgtgagagtgaaagtggacgtgctgctactcccctcattccca

SEQ ID NO: 46846 - DNA, 409 bp, Zea Mays
gctcacgctcatcttcagcctgttgtgcaggttggatttggagctgagataatggcggtggggattcccctctgagatgagatgagattgaggtgtagtaatgataagggcatctcgctcggctctgcctgcggctgcggggatgcttcgtgtaagctcatgacggtgtgctttggctgtacgagtgttattttttctcactttcttttttttcttttttttcttcttcttttggaggaggctgtgtgatcaaatgatgatggatcatgtgagtaccgtgtgtcgtctttttctccgcgtacgatgtctctatcctgtgactctatagcatttactctcactctctctctgacagactgcttttttgtgtcgtgttggagcgaaagaacaacagaaagccagcgaaaac

SEQ ID NO: 46847 - DNA, 6159 bp, Zea Mays
ctacaggcgactcacttcagctgacagctccacaatacggtgactgtcccgctcacgtgccctattcctgtggcgtagttctgaccggagttgctccactctggcttctaggtctccaattgggtcattactgccactactacttccttcgtgtctggaggctagctaatgtcgtggcaaaccaagaggtccagtcaatttacgctgggtagtcttagtgcgcgccatatctccataagaggggaaaatttattagtatagttttaaacatgatccatgcataacctaataattatggaatcaaccttcgttgatccccaacttcctatatattgtgcactttattacccgactttacaagataaggggctaccagaaagtgataaggtaagaatgagagaaaatttcaagataagtgtttgaaaattctttttgaagtactatataatatttgagaggatgggcttcgctccgataccagctgtcacggaacctcccaaggtattaggcccacatacagttgtccttgtcctaaggacttcggacaatcctgtagatgagcataatcactcgacaagttcggtcctctgtatcttccttacatcacccaagagtgttttacccatcacgcatatattacatcacatcggagaaacgaatgagcagaagcagattacaatacttaatttacattcataaaatatatagagagagtattattacaatactgggtgttaagagtgcatacagtattattacaaaccagggaggcaaaacaccctcccgcacaaaagtttagtgatttcaaactgggaggcaaacatcctctcgcctacgggatcacggattcagctcctcttttggtaccacctttgaacagaaatagcaaaactccgatgtttcctcacctacaacaacatgggttcgaaaaccctgagtacggagtgtactttcacaagtcttacccgacaaaggaaaaagactctcaaggatatgctggcttgagggagtcagggtaaggccattcaagaatcaaagactctgtttgcagaaatgcttactgacagtggatccttaaaattctagttttattatcaggttaagtcattacttgcatctagagttctttctaccctagtcaagcacttggtctacactagccgtcttttatcaccctttaagttcactggaatgctacgtgtaagtcagtgaccaagtcttcatgtccgagaagtaacggcgatctgaatcgattaatacctagctggggatctccatccacatgacatatgtagcacttaacccttgcatatgtcaactcgccaccgggtttctcaagatcagaccgggttcacgccaaccgagagcacagatacaccactgtccagcctcttgccacggagggtacacgctactcttgccatctctccactcccattgcgtgttggcctttctggtattggtctgtctgaggcaaaccttacccatgacgaggcatatggccaattaaaaggtcctcgatcatcaagcctacatcagtacggtccttaatcgactcagacagagacactacactgagacatccttctcgtgcaagtcaccctcccgatctcgcctttatcatttacaatcccaaagtttggtacctaaaagaggtacatcttttccgatgttgcgcccatcacggccatgatggattcaccatcatgttttatttttgaaaacatcccattccatctgaagcatcatcttttgtttaaaacaaaacattttgttttctagagcaagactaagcatcagaatttttttaagtaaaacaggtatcaagcaatgataatcaatttcaaggtaggaaatgcagcaattgtgtagcactcaactcctatcacctaatgcatcgattcaagtgataaagaatttaaaacaacaaggaaaaggataaatgcaccggagcttgccttgtgtcgtaggggactcgagatctgttccacaaatgtcaaagtagaaattgtccccgacaggtggaatttcagtcggtggtgcaacttcctcttcagctactacttcttcttcattttcgaaacataacaataaacatacataaatggccatgtgatgctatgaatatgcagttatgatagaatacattaagttatatattgaatataactttccttcatggtactcctaagtcactagggtttcctgggttagtatcctattagggttagacaagttctaccttaggaagctatggttttggggttttgggatcaaacaatgtccaaaacataccaaactttacccaagggctttgattattatatcaagcttacccagaaagttttattatttttggagctagtaatcaatttctaaaattctaaaagactaggtttaagcacctttaattgctaaataatttatgattgagactaaaaatctaggacctatttttattaaatactagaggaatttaggagtatagtaaaattggtcccatatttttatcgtttttctagaattttcaataaatttcttaagcctaggagaaaaagaaaaaggaaggaatgaatagtaacaggctcaaaccagcccgagccggcccactaacggggggaaatgtgcccgcgcacgcccacgctggcggctttgcacagaggaccctggttgttcaaataactagtaaagaatcccaagccactattcactgtctctctgacattctcacttaagcccctgcacttctgtttcttcgcagacccaggtccccaacgccgaacggtggtgagcacgccctccggtgagcttgtactgtccgtgatacacaacgactgatgccctaactcggtcgacacttatttctacccctggcgactgtaatccggccatcaattgcacaattccggcccggagtctttctgcccacgacgacggcgaaacccgaggggaaatcgaggtgttattggtgatttagggtggtctagctcaatcaaacaggtctacgagcaataggagacttaagggaggctagaacatcaagcgaagaagcttgaactaacctgtagggtgaatgtcgcctagaggggggtgcataggcggaaactgaaatttacaactttaaacacactacaagccggggttagcgttagaataaattccgaatctgggagagagaggaaaacaaatcaaccaagaaaataaagcgggtgacacggtgatttgttttatcgaggttcggttctaaagaacctagtccccgttgaggtggtcacaaagaccgggtctctttcaaccctttccctctctcaaacggtcacttagactgagtgaggcttcttccttaatctcacggtcacttagatcccgctaggatcaccacacaattgttgtctcttgccttgcttacaaagcacttgagagtaagaagtgagaaagaaaagaaagccaagccaagcaaacaagagcaacaaagaaacacaaatcatccactcacaagtcctaatgcactagaattgaattagggactttgatcggatcgatggctttgatttgtgtcttggagtgttgcactttgctcttgtattgaatggagagtgttgaatgcttggattgttggagtggcggtggttggggggtatttatagctctcaaccaccaaaacaaccgttgggggtggctgctgtcgatggtcgcaacgcacagtccggtgcgccaccggacactgtccggtgcgccaaccacgtcacccaaccgttagggtttgacagttggagctttgtcttctagtggcaccgctcagtccggtgccgcaccggacaagtactgttcattgcccggtgcgcctctagtggctgctctgacttctgcacgcactatagcgtttgcaggtgtccgttgcaatctatcgttgcgctggtagttgttgctccgcttggtgcaccggacagtccggtgaattatagcggagtggcactggagaaacccaaaggtgaagagtttgaacttgtacggtcctggtgcaccggacactgtccggtggcacaccggacagtccggtgcaccagacccagggtactcgtcggtttcttttgctcctttcttttgaaccctaactttgatcttttattggtttgtgttgaacctttatgcacctgtggaatatataatctagagcaaactagctagtccaatatttgtgttgggcattcaaccaccaaaattatttataggaaaaggttaaaccctatttccctttcagtgtctccctttttggtgattgatgccaacacaaaccaaagcaaatatataagtgcataattgaactagtttgcataaggtaagtgcataggttacatggaattaaaccaatttatacttttactagatatgcatggtttgctttcttttgtttagcattttggaccacgcttgcaccacttgttttgtttttgcaaatccttttggaaaatactttcaaagtctttttgcaaatagtcaaaggtatatgaataagatttcaagaagcattttcaagatttgaaattttctccccctgtttcaaacgcttttcctttgacttaaacaaaactccccctaaatcaaattctcctcttagttttcaagagggttttaatatataccaattttgaaagtaaacataccaaaatatgtcaattaaaaattttcaaaaaggtggtggtgcgatccttttgctttaggctaatactctctccccctttggcattagtcgccaaaaacggagactttgtgagccctttgttactttctccctcattggtacaagtaaatatgagtgaaagattataccaatgtgagggtgatgtggagtgatggcgaagggtaaatgataccggtagagtggagtggaagccttgtcttcgccgagtactccatttccctttcaatctacgacttagtatagaaatacacttgaaaacacattagtcgtagacataaaagagatatgatcaaaggtatataaatgagctatgtgtgcaatgtttcaatcgaagttccgagaatcaagtatatttagctcagtcaaaagtttgctaaaggttttctcatctaatggcttggtaaagatatcagctaattgttctttggtgctaatataagctatcttgatatcccccctttgttggtgatccctcaaaaagtgataccgaaagtctatgtgcttagtgcggctgtgttcaacaggattatccgccatgcggattgaactctcattatcacataggagagggactttgctcaatttgtagccatagtccctgagggtttgcctcatccaaagtaattgcgcacaacaatgacctgtggcaatatactcggcttcggcggtaaaaagagctactgagttttgtttctttgaagcccaagacaccagggatctccccagaaactgacaagtccctgatgtgctcttcctatcaattttacaccttgcccaatcggcatctgaatatcctattaaatcaaaagtggatcgcttggggtaccaaagtccaaacttaggagtgtaaactaaatatctcatgattcttttcacggcactaaggtgaacttccttaggatcggcttggaaccttgcacacatgcatacggaaagcataatatccggtcgagatgcgcataaatagagtaaagatcctatcatcgaccggtataccttttgatctacggacttacctcccgtgttgaggtcgagatgcccatttgttcccatgggtgtcttgatgggcttggcatccttcattccaaacttggtaagtatgtcttgaatgtactttgtttggctgatgaaggtgccttcttggagttgcttgacttgaaatcctagaaaatacttcaactcccccatcatagacatctcgaatttttgaatcattatcctactaaactcttcacaagtagatttgttagagacccaaaaataatatcatcaacataaatttggcatacaaacaaatcttttgcaatggttttagtaaagagagtaggatcggcttttctgactttgaagccattagtgataagaaaatctcttaggcattcatgcaatgctcttgggcttgcttgagcccataaagcacctttgagagtttatacacatggttagggtactcacta

SEQ ID NO: 46848 - DNA, 652 bp, Zea Mays
gtttctcttgcattgccagcacccaatccgaatctcttagtgcatccttcaccctatatagctcaatagaggacacaaaagagtaatgttcacaaaaatgtgtgactcgagatcgagtggttacccccttatgaatatcaccgagaatggagttcacggggtgatctctttgaatcgcttggtggactcttaggtgtggcggtctttggccctgtatctcctgctcatcttccttgtcttcatctcccccttgatcattgtcctcctcttgaggtggctcatcctcttaatcttcatcatcttgagcctgatcctcatcttgagttggtggagatgcttgcatggaagatgatggttgatcttgtgcttgttgaggctcttcggattccttaggacacacatccccaatggacatgttccttagcgcaacgcacggagcctcttcatcatctaattcatcaagatcaacttgctccacttgggagccattagtctcatcaaacacaatgtcacaagaaacttcaactaatccagtggatttgttgaagactctatatgcccttgtgtttgagtcataaccaagtaaaaaagccttatagccttaggaacaaatttagattttctacctcttttaacaagaataaaacatttg

SEQ ID NO: 46849 - DNA, 214 bp, Zea Mays
tataaaatatagaaagagtagctattacataaccgggtgttagagtgcggaacttattattacattatcgagagacaaaacaccctccctaaataagttttagtgttcttcctattgcttgggaaccaccttggaacagaaacagcagaactcagtcgtttcatcacctacaacaacatgggtttgaaaaccctgagtacggagtgtactttcg

SEQ ID NO: 46850 - DNA, 199 bp, Zea Mays
gtctttattacataaaccccaaagtttggtacatgatagaggtactcttttcagatgttgaacccatcatggccatgatgattcactatcacaagtcttttctttataaaaatccccatctcatatgaaacatcaccttttgttttaaacaaaacattttgttttctaaagcaagactaagcaacagaaaacttgtttg

SEQ ID NO: 46851 - DNA, 452 bp, Zea Mays
gatgtggtggattcctcacctcaggtccgggcgaagatgatccggtcaacgcgacacagcggctccatgatgcatggtggcccgacggcgatgcccaagcaccggtgtggaatccctgggcctagctgctcccaaggcgtcaatccagccacggtgtcgaagcccggccatgccccaatctgcggggacactacgaggatcgctacaccccactatgcttgctctctcgtggctcagctcaagtctaacgatggtgacgacatgaactcagcggcgacacccttctctccccctctctctttcttatgttggattcgaaggtctgcggatggcaaagaggtcattggacatgggtttatactcgctgcctaaggagtgggaggggtccgcatcgcctagggtggccgagatccacggcggaagcgaccatgcgcagccttcggtgggttgtt

SEQ ID NO: 46852 - DNA, 390 bp, Zea Mays
tgggaagcggcagaggaagccgccatgtgagggaggtccgagctaggagccgacgccggggcaagggaacgcgcggcggccatgggccgagcaggcaagctgcacgggcacccgggagcagagggagatggagcggctggtatgcgcggcagtgagaggaggaagaagatgtgctctacggttgaaatagagaggagaaatatctgcacaacaagccaggagatgagcaccgcggaaacaaaatcgagagccacggcggccggacataggatcgaagaactctaagcggcaagagattaggacgtgagatattttctctttttttttgtttttagaaattcgcagatatttctaactccagatttttagcagtgtacacaggccgacacg

SEQ ID NO: 46853 - DNA, 221 bp, Zea Mays
cagaggaggacatgtttgacgactcgacgacgagctgggcaggatccgagctaataggtacagtatgagatagcgaccagcacgatggacgaactaagtcgcgatgaggtcgaccgacgagggaaaataaggaacacgacagtcagtcgacgaactgaagattgggagtgacagcctcatctccagagagctgcgcgagggaagctgaaaattaatgcgac

SEQ ID NO: 46854 - DNA, 353 bp, Zea Mays
atgattgatttttggttatttaaatagcatttcttcttaaataagaatccaaataaataatataataataattattagtccaaaaataaatattttatttataaataattttggtataattattatgaattttagggttatttgaaaatatattttgaatttagaaaaggaaataaaaaaagaaaaaaagaaaacctaacctaaccctaacggcccattagtcgcgcgcctccctggctgccctaacctagccatcgctgcctgcttccttgtccagccgccgccaccttcctctctcctctctctctctcccacgcccttccctctccctgcttccctgaccgagccgccag

SEQ ID NO: 46855 - DNA, 282 bp, Zea Mays
atcaattaccatccttcgaattaatttctaagtcaaattttgatttacaactgaatttataaatatataatgatattacataagtatattacaaaaaaagatatggcctagtgcatttaaatgatactccctccgtcccaaattgaaattcgttttgcctttcaatagattcataaaataattaatgtatatctctactactacttatgttagtagtgtaggcgtccacaaccacccgttctatcgcgcgcagatgcccgcatcgcgcagccgctccgcaac

SEQ ID NO: 46856 - DNA, 516 bp, Zea Mays
atagatttaacctatgctgtgttgtcatacaaataacctagaaaggtggtatatgttaataattggaaggacagttgttcaaattggtcagttcgattaagaatgatttttgcgtgtgaggggaggtggtgacataccaaggtagtcatcaattcctctatgtttataagtcgagtcgagtcgatgcgcaatttgtgttcattaaattatgctttgcatatagtgtaatggagttagttgttttgggataattattaaaatgttctgttcacatgataaatatgtatgattgtaaaaacattgaagtgtatgttgtgtctcagtctgcgatcataataggcaagtcgatgtgtatgtcgtatggcgggctatgccatccctttggttaatcgactagttagatggcgttggttaagctcgtagttacgatgaattacttgttgtggtctaaatgcgtatggttatggtcgcatgtaaaaattagtagtgctcatgtggcgtctaagttaaaatgcg

SEQ ID NO: 46857 - DNA, 930 bp, Zea Mays
ctcaatcaaagatccaaatcatgcatgtatcataagaacaaacactcaagcgtatagatacccataaaaatagttttgtttttgttcctaagagtaggtctcctattcctaaaggtcactttaggcacgtgatttcaaagtgtgaaatccacatttgtctttagaaagaaaaggtaagaacaatcagagtaaagcagaaatagatgagaaaagattaagataagtttagaaaagaatcagagtaaggtaagtaggtaagggtttgtccatttctatctaggttttgtcctacagtcaacatttcctctgataccacttctgtaacacccggtttctaagggacaaagctgggtgcatctcatacatgcgccaaagaagacaacacatataataatagagtgtatagagataaatgtcacaataatcagagtacttattacatagcggaagacttaaaaaaataaaagataaatatagcaagatctaaaatccatccttggtgccagaaagtcaactaggagacgcaacctagatcgaatcgaactcctcgatgcgtggctccacttgaaccacctgttcttctcctgtgggggagggtgtgagacagcaagggtgagctcacacatgttcatcgctcaacaagttgtggggaataatgtggcatgaactcaccaaaggtgggaattcatgtgaagtgtaaggctgatcaacaaaataaaggttgaagctgagcattgcttttataagttggtcaaaattttattagcaattactaagtataagtagataccaaaccataataataatagaacaaaattaataaataatcccatgcaaatgcaaatgacaatttgagtttaagttccataaattaatcatgtgagggtccgagccgctcatgactgtgagcacggctagtataccagtttt

SEQ ID NO: 46858 - DNA, 885 bp, Zea Mays
gtaatgagcactgaaattcttgggaattattctaaaaaagaggatcaattgatgacagcagccttcggcacccggccgaaacgaaggctaaacagagtgcttgatgctataggctttgaatatcctgattatgagcgacttgacaagggtgccgaagggcagaaaaggaaaagagtagccgacgctttgatcaaagacggcgaagatcaatcaaaaaagaagaaagaaaagtttgaatcgaaagtgttaacttcgaagaaaagaaaggactcaatcccggaacaaaaatcaattgatgaagaagagaaggcttctgcgacatcttcttacgctgaaatagaggaaattctaaaggtaatgactgaaactttgcctgtcaaactaagtccattggggcttcatctgacgaagctttttcataatgaaaaggagcccgcaaagacaaaggcatctaggccaaaaagacaaaggattgttaccgtgacagaagtgattgaaacaacaccaccaagagctccagctctgaagatgccgtcaattgaaatcatgacagctactgaagctgtaccttcggaggctgccgcagaagaggccagagccgaagatgctaactccgaaggtattaatttagagagcatagccgctgatatagataaaatgctgctaaacatggccgctgaagaaactgctgcagccaccgaagagaccacggctgccaaacccgagaaagaaggaataaccgaagatacctcggaagatgaaacttttgacttccgaaacttagttggccaggagctgactgaagctgaaaaagaggaattaaaagagtatgctatatcttgtggatatcggccgaggtcgcttctcttcggtggtattgatgat

SEQ ID NO: 46859 - DNA, 238 bp, Zea Mays
gttcaattgatatattcttggatcactatattgtaatgtgttgaattagtgaatcactaagtgttcatgagtatttcgttcaattggtatttaaaggtgatcacgagttataggattttctctctaatgccattaatgctataacttgtcttaagcctattgtttaagtgacaagagtgatcaaaatggaggatcaagcacatgaagagaggatctctttggaaaaagtactgcaact

SEQ ID NO: 46860 - DNA, 615 bp, Zea Mays
gcttgatacacctagaatgcattcactaggtcaaaaaaatcaatgaatatggtgttgtgtattagagtatagagctcaggttaagaactttgcttgagacatgggaagagaagtcgtctctaagcaagtaacaaattgacttggagtcttaagtgctaaaggtaggtcttagagcccaaagtggccttgttttggaattatggtcaagtggaagaagcacttaaggaactggaataatccaaaccttaacttgagttttgcttggaagagatggttaagtaaagcaaattcgaaactaaggacactttggacatgagcttcatatactagagttggatttgagattaaggggagtcacttggcttttaggagtatggattgagttgataaatcactagatgagaaggagtcacatttgaaaccctcaactagcccaaaagtggagttttaaatctagagagaatttgctagtggtccatatatcaaagttgtatattttgaaaagttgaacaactttcatgtatggagaattccaagttttagaggaaaagttggagtaaaaagcttaattcagttttgaatcagacttgaagtttgctgaaaataatatcaact

SEQ ID NO: 46861 - DNA, 1303 bp, Zea Mays
agtggaggcgccgtggccgcacgaggtgtagataatggcgcaaggcggggcgcatgtggtgggggtggaaccggatcagactcgaggagggagtcaagatcggtgggttgggtggagccagcaaggggaaacacatctttgtcaaagacgacgtgacgagagatgatgatgcggtgggaggtgaggtccagacaccggtaccccttgtggttaggagagtagccaaggaataggcagcggtggaacgaggagaaagcttgtgaggagcggtggcgaaagtgttagggtagcaggcacagccgaacacacgaaggtggtcatatgaaggggctgcgccgtatagggcgaagtgagggttagggtggctcaccgccttagagggaagacggttgaggaggtgggtggctgtgtgcagggcctctgcccagtagctggcagggagagacgcctggaatagaaggcagcggagcatattggtggtggtgcggatcatgcgttcggcccggccgttctgagaagaggtgtaggggcacgagagacgcaactggacgccatgagtgaggaagaaagaccaggaggtgttgttgtcgaactcgcggccattgtcacactgcagagcacggatcgggcgacgaaactgggtggatacccaggcgaagaagtgtgtgagggtggggaatgtgtcagacttcaaccgaagcgggaaagtccagagaaaatgggaaaatcatccaaaatcaccaaatagtatttataaccagagagactgagtacaggggaggtccaaagatcatagtgaaccaggtcaaaagcctgctcagcccgagaagaagaagtagtaaatgggagacgagtatgtcggcctaaatgacaagcatgacagagaccctcaaaatgtcccctactacatgaaagatctagactactggtaatcttggtcatgacttcgggtccaggatggccgagacgacgatgccaagtggtggaggaggtggtggagaccaggacgggaggaggagacacgccggcgctggagggctggagcgtgtagagcggtcccgagctgtcacagcgggcgagaggggtcctggtggccagatccttcatagaaaaaccagaggggtcaaactcaatggaacaagagttgtcaatggtgaatcgacggacagaaagaagattgtgagtgatgtggggagctacgagaacatcgttgaggtaaaacggcccagggagaactgaggcacctactgaggtgactggtagagtggaaccatttccaacgacgatcgaggatgggtgagag

SEQ ID NO: 46862 - DNA, 1328 bp, Zea Mays
gtgaggtgtagtcaggagggccagcgccgggggacgggaggcactcggagcctggcccggccacatggcgatggtcccggtctaggggttgtagaaggacggccatgcgtggccgccaccccggtcggagggaccaccatgagaggggctgccacccccacggccgcccttgcgggagcgatgaccaccatcggtcgtggaagccggacgagtggactggcgggtagaagccccggtcgacggaggacgggtggcctggccccccgaaggcggttgtccgctggtaggagcgctgtagagaaccgaggtaggagtgggcgcctcattcgccatggtgagctcctcgaggagaagctcgttccgcacagcgtggaaggtggggaagggcacgctcctcttgatgagagccttcatgtggccatagtgggggctgaggccacgtaggaggtttagcaccaaggtacgatcgacgactggctcgccgaggtcgcggagagagtctgccaggccattcatctggcggcagtactctcccactgagaggtccccctgagagaaaaggtggaactgggcgtcgaggtggagcgctcgcgcatcccgattctcgaggaactggtcctcgagagcgagccacgcctggcacgcagtgtccgcctggtcgcggatgatgtcctgtagctcaacggtgatggtgccgtggagccacgagaggacaacgctgtccatgaggcaccaggagcgaggcagcggagcgtcgtggtcgacaaggacgtgatcgttgaggatgaaccaccgaagcgtgagaaggacctgtcctcgccaacgggggtagtgggaagaggtcggatccaacaccacggacacgagggcccggatgttgtgcagtccaacggcttgagcgtggagagcaacgatgaggtcggcgtcgaggtcagaggcgagggggtcctccgggggttccataggggcggccggcgggcgaccgaggaggcgctgcatggtggccatcttagtggtcagagcggcgcccagggcacgctctctctccagggcgagggaggcggcacgctcgcgctcccgcgaggccgtcacagcggcttggatcgtagcgagggtgtcgacaagcggggagtcggtggtggggagtgtggagggcgcgacggcgtggctctaggtgggtgaagcgagggtgggaaagcccggcggggagcctcggcgcagggtcagcgggggaacggcggggagcggcccgagggcgacgatgtatggggcccctccatgggcgagctcgctgctgatcgcagcgggggcgatggggccggtggtgg

SEQ ID NO: 46863 - DNA, 1038 bp, Zea Mays
atcaacttatttttcaatgttttaagttgagccttttgtttagtgcatacatcctcaaaaaatttaatggtttctgcaagctcatctaaggagggttttccctcaccttcatcatcatcactactacggtcatcactagaggatgggatactcattttacctcttgccataaggcacttgcgtgatgagcgtgatgaggatcggtagttacgtgtccttggaggttcatcttcacttgaagagtcatcccaagttttgacacttgtaagtgccttgcctttgcccctcccttttgttggttcggccatatttggacagctgtccctgaagtggcccttatccacgcatgcgaagcatcctctctttctttgctttttcctgtcaatgttaaagagaagatcctcgacctgcagaggcacatccattagattaatcttgcatatcatcccaattacctttctgacgcatcggattgtttcttcatcctcggaggatgatgttgatggttgattatcttcatcatcactttcttcttcttcctcttcttcacttgaggaacttggattgggagccttcttgcctttcttttcatcacatgcaaaagcatatggtcttgaagaagttggctcctcttgttgacccatttttcgcgacatctcaaatgccgcaatcttttcaatcacaatggtcggggtcattcgactcaagtcctccttgttgtgaagaatggtgatgatgctcccatatttttgttgaggtagcagggagataatcttcctcacaatgtccgcatcacctagcttattaattccaatagaattaaactcattgatggttagattcaaacgagagtacaggtctctaacaagctcattctctttcatggcaaaagaattataatcatttaaagctaggcaatgtttttgctcatggacattggatgtgtcgtcatggagctcatgtaatttaagccaaatctcattagcagtttttaaagtaaaaacttgattaaaaactttcatgttaagagatccatac

SEQ ID NO: 46864 - DNA, 414 bp, Zea Mays
ttcaccatcttttctttgccatgaatcgtctcgcggggtggggaaattgggatccagggtaccggaacgggatctctggccatggctccgccgtttgccggtgtgcgccgtcgccggttcggttagctatgaggatttggggagggttttatgctggcccttgatctagattcaggtggccacggttagatcttaggttaccccttcgttttaaatcggggccatggatctgtgatcatatggtcgggagagagttgttgtcgcgggaaatcctcggccatcgatcttcgtgcgggcgctcggtgtgataaaccagttcacggagaggaatagatttaatctcggccgtcgagtttcgatcggacgaccagggttccaggataccccttcggccaattcttttgctaaagacac

SEQ ID NO: 46865 - DNA, 386 bp, Zea Mays
cgcgtggttaattattggttgatgtcatcgctgacctcatagtggcacatagtccggcaaaggaataaaagaaataaaaaaaacactcacgggtcactcgttcgtgggaaatttacgtggaggaaatgggcgagtggtccatggaaacgctgggtcgagctgcatggcacacgtaaggtaagctttctcttgtttttttttctaattttgatttctattgtacttttcaaaatttatactgaattttagattcagttttgaatttcagaattcaaattcaatgcataatcaaaccctagcatagaatgcacattcacgtatttatttatttgccatttgactactttaattcctttagttgattatgcacaaagggaagaagatca

SEQ ID NO: 46866 - DNA, 704 bp, Zea Mays
gtctattaatatttaatctggcgttaaaacattgaaagtaaggaatcactttagtaagctatttctgcaaaagtatctaagttgattcttgctaaagcctctccttgattcccaattccagcatacccttgagagtcttttctttagtcaggtaagtcttgctgagtaattccatactcagggttttattccctgttgttttttaggatataactttgtgctgctgtgatggtgttaagtgccgatgggctcggccttcttatataagtatacctcgtctttatattcttattgaggatggtcacttgagctagcatatatttcaaacttatagttttgtaatcactccgataaaataatgtaaaaattttataacctgtaaaatttggtaataagatttccgctgcaaaatattggtgtgtgtgatttgtgttacttaatcccgcggttctggttgtaagtggtttatccgaggtccttggggcactcggacagatcctattgatttatctggtgcacctgcatagtagtctgaggtctttgagacaaggacaggtgcatgtgggcccaataacttgggaggttctgccacactcacaacccggctacggccaaactgttgacagcgtcaacaaactagcctaaaaactcggaacctgaccatgcacccaggctacaatcaggtcgcatgagggaacaaccag

SEQ ID NO: 46867 - DNA, 359 bp, Zea Mays
tctggctcgcctcggtaacaagtaatgatggctccccgcgtgcgcccatgacgacgttggttctcatccccctacggaagcaaggagacgtcagcaagatcccagcagcaccgacagctgtgcttctacagggctcaggcacttctctgacggccatgttactgcgtacacagggctctagcacctctccgacagccacgttggcatgtacacagggctcaggcacttccctgctagacacgttagcgcctagctacacccccccccattgtacatctggaccctctccttgcatctataaaagggaggtccagggccttcatgcggagggtcgcgcgggagaacgagctaacgaacag

SEQ ID NO: 46868 - DNA, 614 bp, Zea Mays
cggcttgccaaaaggtgagagaacgaggatgacgcaagagtgattacaatccagcgtgaacagtacaatgttactgttcatctatttataggcatgggacgcagcccgggtaaaagtacatttatatctctggtaactatctacaatattaacaagaattattacggaatgtatggtctttatccttttcagtcgttatcatacttgagcttcatcaacatgttcagctgaagtcctttggcttctagcttcgtcgcccactctttattttccctcgtcctgttataagagaagttctccatcccaatgctgaagcttcctgtaattattcataatcatgatgaaaacatgtggttaatcacatttttttaggaccttcggaagaggaaggccccccaacaagagctatcgacaaagttatttgactgaggggttagcctttgtgaggacatccttgcaagagctccaacaagaactaggagaaagcttatacacttctcgatacctcggtaaaaatattaaaagtgtcgaacaagagtttacatctctatcgatctttagcttttacatttatattatacgccttggttgtgtgttttatctttctaacttag

SEQ ID NO: 46869 - DNA, 282 bp, Zea Mays
ggattaagtaacaaaaaatcacacacacagcattttagcagcggaaattttattaccaaattttacaggttacaaaaattttacaatattttatcggagtgattacaagagtataagtttgaaatatatgctagctcaaatgaccatcctcagtaagaagataaagacggggtatacttatataagaaggccgagcccaccggcacttaacaccatcacatcagcacaaagttatatcctgaaaaacaacagggaataaaaccctgagtatggaattactca

SEQ ID NO: 46870 - DNA, 776 bp, Zea Mays
gttttacccaagatgttgcatctaatttgttttggataaagtctatccatttgtccatttctcgttcaacagactcacatggaaaatcacggtggtaccatttcatcacgaaacacaaccagaaactatggtaccagcgtgtaccaagtcatttatccacacacgtgcatccacagggaatatccaaaggaatagccattttaactcttgggattcgacaaatggctatagatattaaaagttgcttctgaaacaggcagttgtttcttacaccatagtcatagaaaagctcacaggttacatgatccaggtgaaacgggataaactctttacaacaaagtttaacctgtttttttttactagctaacattgccatatgggtttaccttacatccacccttcaaaactaatttacatagttatattgcctcacgaggattaagttgcctgctatatcttctccagttatcacatctgtcagatgtttgtttccatgctccataggtaccttttagtccgttggtgttggggcagaataaaaggcgccattgagcatatgcaccgtttgttgcagatggttgaccagtcgctgcgctatttgaaattccatcggataggtacgatgcaactcctcaagcacctgatcctgatgacttaggaagcccatggtttctttaagttcttccctaacagtaacagcatacgagcgaatttcttcttgttgctgactcaaacttttgatttagaatgagcattagttagctgatgctcaagct

SEQ ID NO: 46871 - DNA, 1043 bp, Zea Mays
cattgggagcatggtgggatcttactggaaagttccctataatgctcttttcatcctaaggaacacaaaacaatcctaaggatgaaagtacttaaattgagacttgggctaggaacaggtgatgctccacctaggttaattaaggattggatacgtatgtaggcctgtatgataaaagattatcttaactggccgcatgccctggatatgggacagggtaagcttgaacccggctattccatacatgaaaagataatcgcgcactaggagtggagagatggcgagggtggcacgtaccctcctagcaaaggaccgcctaaaaggcgtggtgtgctcttgggtggcgcggacctattcatgcagtggaggatccgtgggaatggtagacatatgcaagagttacgagaaacatatgtcgtgtggttagagatcctcatctgagtaaatcgattcagatcgccgttatatccccggagagtggagacttgatctctgacctgcaacctaagttaggatgtaaacattatgaataaaaataatgttgtattgatgagatggtgaaattagactagatgcaaccagtctattaatatttaatctggcgttaaaatattgaaagtaaggactcactttagtaagctatttctgcaaaagtatctaagttgattcttgctaaagccttttccttgattactatttaaccaacatatccttgagagtcatttttccttagtcgggtaagacttgcgaaagtacacttcgtactcagggttttcgaacccatgttgttgcaggtactagttttgtgctgctgttgatggtgctaagtgctggtgtgctcgaccttcttataagcctaagtacctctcctatacttattattgaggattgtcatcgagctagcatatatttcaaaattataaataatttataatattttaaagtttatttctttgaatcacttttgtaatcactccgataaacatattataaatttgttgtaacttgtaacttttgtaataaagaaattccgctgcaaaaat

SEQ ID NO: 46872 - DNA, 725 bp, Zea Mays
ccgcggccccgaccggccccggccccgcgcagcaaccgcggccgagccgccctcccctgagcagcccgcccgcgcctgcagccgtcgcgaccgcgcccgaccaaggcaccgagccgccgcgccatttcgtttccccattaatggacttcatgcatcagaaatcctctcctctcctcccattcctctccattgaagccatgagaggaaaccgccgccattaaactgtgtaatggagtcatcgacgttccttctacctttgctctctctcttttcctataaatcgcaggccgcgtctccctgaggctcacagtcctgagctcttcctttctccctgcacgcgagtagccacaccgagcgccgcatttcaccgtcgccggagcctctgcgccttccacgtcgccggcaaggacgtccgtgagttccctggcgcccctccgttgaacccttgcccaagaacacagttcgccatagaacccgcccggcctccttagctcgacgtcgccctacgcagagaaaccgagaggaagagaatgtagaagacaagcgtattgtattctacccctgcagcgttttgttgttttaaatttgtaaatttcagagttcgaatcacgtgtaaattgaatgattgatctcctgtgtatatgatgagctatttcaaatagtgtttatgccattttccatgtttacatcttagtttggctatgacggttgaaattaaattaaag

SEQ ID NO: 46873 - DNA, 136 bp, Zea Mays
gggaaaggggatggtggtcgacaacaacgagaaggagtccatcttcaacgagccgaagaatgacaagtctaccgacttgggctcaagccaaaagcgcaaagatgggaagaagaagaagacaaggcgcatcaaggag

SEQ ID NO: 46874 - DNA, 232 bp, Zea Mays
tatcctttaccaacaaaagtaccatgtttcgacataacacatttatttgactcaagaacaactttgtatccatctcgacatagcatggaagcactaacgagattcttcttgataaagggcacatgctgcacgctcttcaatggcaccgtctttcccgaagtaaacttcagaatgaccgtaccaacaccaagaacatgagcatgcgacccatttcccattaacaaggcgccag

SEQ ID NO: 46875 - DNA, 515 bp, Zea Mays
ataccgccaaccacaaacttgtcaggcaaaggacacagaaaaagtttgagttgcttagctagtgcctgaaactcatgagcctgttccactacagatcggttctcaaccatcttgtagtcatacagctgctacatgagatacagctcgctaccagcatcagttactccaaacttccaataagtgcattccacagctctttccctgtaggaaggatgatatagcttttctggaattttgtatcaagtgcgctaattactgctcctcgaaagaggttgtcttcagccttaaacttagcctcatcctcaggaggtaagttgacaggcttgccctcagcggcatgaaaacaagacattacagtaagccacaataccattttagctttccaaatcaagaagtttttaccatcaaatggatcaggctttagcacagcagcaaaaccactgacagaaaaatgcctaacattaggtttttggtgtgttaaaattataggcattttccatatcattttaattcca

SEQ ID NO: 46876 - DNA, 2576 bp, Zea Mays
aaaacataaaataggaatgagaaaggaaatttaaataaaacccttattcctcccctaaaggaatgactaggaaaataacattaatgaaaataatagaggttatattttcattagggattggtttgatatttgggaatttgaaagacaaatcagaaaagttgaaacatgtttgaatttggaatagggatttgaaaatttaaaaacattgaaaatagaaaagaacaaaaaaagaacaaacttgcatctgggccgaaacaaccttctccccgcccactccctgtcctgctcacccgcctcagcccaatccattcaccctgtaccggtcgcgcgggtgtctctctactgggctggcccacgcgtcggtcgtccaaatgtccccactcgcctgcccatgcactggtgttcggtcactgcgcgtggggctgatttggcagaatcatctccctcccgagaacctcgcaaggttgttgcaaatgctgcgtgcggatctcgccttcttccccttttatcgcgattatccagccacgtgcagatcacaaactgcacatcgcctatgtgggcccaggataccgagccaaaactacctcctacggtgcgttgccgcgcgcgtgtactatattaccggaggtgacgctgggattttcgttcccacctcgtcgggtcctggcgggcaaataaataccgagccctcctcttggatcgaccaccgtgcgcgcagccgtgctctctgcctaaagccaatcgtccgtgtgcgagtgagatcggtcaggggtgagaacctgggtgcgtgtgggtcgccgaaatgggctctcggagttcatcgtagtcccgccctcaagatacatctgggtgattcgcttgggtccgttgagtgcgtggtgacctcggcgctcaggaaatttctgccaacgccattgggattgtccatcgtcatcgggggctcatcgcaggccgcctggcgccgtgtcttggaccgctaatcgcataattcgtggtatgagcacccctcccggttttgtatcgtctacaatttagttttgcaccatacgagggcttgcatcgcgctcgagggtgagttctggtacagtgcggcaatggcgccgccgtggtgtgatgaacaccatcgccaccggcgttttctcgggggaaacaccatggaccgtcgatctcaggagttgcggctaggattagatggagtcgtgaagtggttatgatcgtaggatccccatcctgcgcgtagaaatagatcaggggggtacgatctgggacccgttgattccagaacagacggacctgatgcaatagtccctggcctgttgtgcatttaatctagaccatccgtgcagatccaacggctgcaaatgcaaggtaccgctttggtaggttcttttacaaaagaaaccatgtataatacagttatcaacccgaagtacacctctgaatgttcactgagtcttagagtttttgcatcctagcccctggtggaggttagtaaaaatgagtaaatgataaaggaaattgatttttagtatgaaattaattgtaacaatttgtataaatcatagaaaattcatatgagctccaaattggtcaattccagttcctatagttttgtattaatattttctagaactatgtattactgttttaacaggaaaattatattaaatttgatctcttaattaatactaacagacacatagaaccttcagaaatttataactcacaatccgtaactctgatttgatccgttcaagttgcgttagtcttgtataaacatttactatgcaataacaacatttatcgtaccatatctcattcctttataaccagatcttttatttaacttatgtcggttagtcttgttaatctgcttatccttataatttactagaatataatctatgatcaatttataacttagattaaagttgatataattatttataacctcccatatgatttatattaaccaatttataatatagtttaatattttagtcacataaatcatctataaaatcataagtccttaaccgtaactccgactttagtggttctcgttctcgtgatctcgtagctccgtgtagatcattattatacagtatgttcttatgtttggtgtgatgtgaaagggaattaggcttacacctagttcctaaatagttttggtggttgaatcgcccaacacaaacaattggactaactagtttgctctagattatatgttttacaggtgccaaaagttcatctataactatactaaatcgactgtccggaataccgtagattattccggacaggagaagctttttggaaaaacaggccaagcgcggaccgtccgggcccttgcggcggaccgtccgcgacatcggaatatccctcggacagaaccaatgcaaaaacacaagtttccactacagaccgtccggaggaaaagcaaagaccgtccgagccctcgcgcggaccgtccggcctcaggcgcggaccgtccgatcggtaagaaaccgaaatacccgaaggtaacgggttcggagaaatgaattatagagggcctcgcggaccgtccgaggtgc

SEQ ID NO: 46877 - DNA, 2068 bp, Zea Mays
cgattcggatcgtcgttacttctcggacatgaagacttggtcactgacttacacgtagcaatctagtggactcaaggggtgataaaagatggctagtgtaggctaagtgactgaactaggatagaaagaactctagatacaggtaataacttaacctgataataaaactggatttttaaggatccactgatagtaagcttttctgcaaacagagtctttgattcttgataagctttaccttgaatcccacaagccagcatttccttgagaagtcttttcctttgtcgggtaagacttgcgaaagtacactccgtactcagggttttcgaacccatgttgttgtaggtgatgaaacagctgagttttgctatttctgctcgaaggtggtgccaaagcaggaggaaaatccataaacttgttggtgggaggatattgtgcctcccagttatgtaatattaagtgctgcactcgaacacccgttatgtaataaatactctctctatattttatatgagtgtaaattatgttattgtaatccttccgcttattctttactccgattatgtgtgtaatgtctgcgtgatggatgaagcgctcttgggtgatatgatgaagatacagataaccgaacttgccgagtaattgtgcgcacctgcatgactatctaaggtccttaggacaaggacatctgtaggtgcgcctaataccttggtaggttccgtgacagctggtatcggagcgaagcccgtctcttcggacattacgtagtactttcaaaaggaattttttaaatacttaccttaaacattctttcattcttatcttaccactttctggtagtaacttatcttttgaagtcgggtaacagagtgctaaataagagtatgtgtaggaaacaagggatcaacaaaaagttgattccatgaatattaggttatgcatgcatcatgtttaaactacactaaataaatttctcccctcttatggagatatggcgtgaaccaagaccacctagtgcaaatcaatcggacctcatggtgtaccccgacatcagctggcctctagatatgaaggaagcagcagtggaagcaacgacccaataggggaattggaggccagagtagagcgactcaggtttgaactacgcccacgggtgtggggagtgtgcacgcgatagccgtcgtattgctgaactatcagcaaaagttaatcgcctgcaacatgaaattatggaacgcaatacgaccattgactgggtcgtaaattcgcgctctttcgcctaggattgtgaagccaaagctctagcccgagtagcagaacttagcacatccctggaaaacctgcaagcgtattgcaacaccctgcatgaagaggtgcacatattgtatggtcggctgcacccaaacgtgccaccaggagttgcagcaatgggagctggaccatctggaacagcaaatggaggatctgatgaggggttggaccttttttgagcccctccttccatgaaccttgcagatgaacggtctcctgaagtgggcagtggagtagctaaggacgaagagaattagagtagtatagtttaagtaatgtactcatgtaaaataaataaggaagtcgagttgtatactgagtatgtataattattacagttcagcaatgtaataaagatggtgtgtgtttggcatgtaataatttaggatgttttttcttcctcagacatcgcgaactcgtgctcatgatggggcaggaacttcccgcggcggggaggacactcccaacccgccacctgtacctcctacactggctgaggctatcgctgccttagtcaatgctaccgccgacaacacacgcttcctgcgcgaaatggcgggaaatcaatttcaacaacacggaggaagaggtcaacctcaaggaccacgatacaccacctatctagagttctctgagacctttccaccactctttatcaaggtggaggaacccctggaagctgatgaatgggtgcgggtgatgtaacaaaagttcgggctaatccgatgcactgagacacaaaagcccctatttgccg

SEQ ID NO: 46878 - DNA, 204 bp, Zea Mays
gtccctactttaggtgtacattcgggccgcccggcccaagcccgaaaaggcctgtattgtttgtttgaatttcgggccgtgttgagccggcccacgggcctagcactcggcccatggcccgacccgtaattgcttaaacgtgccgggcttattttgggcggcctgaaattcacatcagagacttaaattcaaaaaaaaaaaata

SEQ ID NO: 46879 - DNA, 497 bp, Zea Mays
atggggaaagaagggggaggaggaaggggagccagctggggcgtaggcgtgctcccaaggagctcggccagggctgcttctgctgggcgccagggagaaacttgggctcgcaggggggctggcggccatggaagtcgcaggggcgccatgggaggagctctggcggccctggaaaaatggagcccatgccatggctgctgagcgcctgctcccgggaagtggaggtcggccatggctgctggcgcccaagagagcacagcgagatggggaaaaaaagagagcagcggcgtcgcgccatgggaaggaaagctgctcgccatgggagcccacaaccatggcgtggaggagcttaggcctcggttggggagaggagacgagggggagaaggggaggacgccatgggaggagagggagcttcctggtggctgttgccgccgtgagggaggagacaggagagagtgcgtgcgtgggagagaaaaggagaagagagagtggcg

SEQ ID NO: 46880 - DNA, 307 bp, Zea Mays
gccatttccatcatcttaaatgctgcataactcccagtgtacaactgctgccacttttgacgactgtgccctcgagcaagctgcaactctagcacggccatcaatactcgagcagatgccgattctacagaatcctgcccaataggaatgctttccaataatcgggcctggtgatgatacaccaatgggtcacttaaggcaactacagggaacaacctcatagatgtggcttgtatttcttcccatttctggtaacaaatggttgttagcgcctctaaggcagctacctgagcaccttcccaaggag

SEQ ID NO: 46881 - DNA, 473 bp, Zea Mays
ccggtctgtcaggggtggcacgagcgcgcgcggctgggccgcctaggccgtgggaggagagggggaagcacgggcgcggtgcggctttttgggccagaattggcccagcccagggggaagggatttttttcttttttttctttctatttcctttttccatttcctatttttgtttctttttatttccttttcttttgaatcaacaatttgctcaaaaattttgagtgatgaatatagtctatgtgaggtgctcctaacatttcaagtgtatgcacatgatgagatgacccaagggtggagtttaggaaaataaaataagaggggggtttaggagattagggttccaaaccttgggttgggatttttgggatgttacaaacctaccccacttaaaggaatctcgccctcgagattagactggatctgagaaaagataagggtattccctcctcagggagtcctcactgtcccag

SEQ ID NO: 46882 - DNA, 204 bp, Zea Mays
cggctttgggccagaattggcccagccgagggggaaggggttttttctttttttctttctatttccttttccatttcctatttttgtttctttttatttccttttcttttgaatcaacaatttgctaaaaaattttgagtgatgaatatagtctatgtgaggtgctcctaacatttcaagtgtatgcacatgatgagatgaccc

SEQ ID NO: 46883 - DNA, 446 bp, Zea Mays
ctttgtcctccgaaggtcctcaaaaacgtgatttaacaatatcttccaagtgtgacatatgaacaggtaccttcggactcgagctaaaagcatgtacggtgtaaaaagcatgatcgtgacgaaggttggagttgctccgaagctacacgtaagggagcttcggctaaatggcggaaaaaggaaccgacttaaaggggaaaaggctatctagtcctcatagaattgtatataagtcaataataaatgtaaggggcatgtatgtaatttctcacagactgcgtcctgtgcctataaatagatgaacagtacccccgtactgttcacgctaactggtacttgcttttgcgtcacgcttgtaccttttgtcttctatcaagtcgaaggtatatttgtaattcaatattgtctttgttttcttagaataatataatgataatggattaatg

SEQ ID NO: 46884 - DNA, 437 bp, Zea Mays
ggctgaggaaggagaagggccggtgggggcgcaggtgtcgcgggcgtggggctcgggttggagctcctggagcaccggcggcctgtggaagaagcagggaggagggaagagaagggaggtggccggttggggcccgcgcgcgaaggaggaaggggaatttttcccccctggcggcagctaggtcaatggggctgtcggctccttctagtcgggcccctagtgggccaaatgaattagggtttcatttttttctttttttttctaatttcgaaatacatatttaaatactcctaaaatttatacaaattaacccaaaaattatttataataaataaaaatattaattttttagactaattattatattatttatttgtgtttttttaatttaagaagaaaatgatattcaatattcgaaatccattatgagcaatcag

SEQ ID NO: 46885 - DNA, 79 bp, Zea Mays
aggtcctcccacagcttcattcttgcttttcttcatttggcaccaccctggtacaaaagcaacaaaaatttgctgcttc

SEQ ID NO: 46886 - DNA, 80 bp, Zea Mays
attggcaacggtggaactgttcttcgcggtggcggagacaaatttgggggaaatttgaaattcaagagctcgggtggatg

SEQ ID NO: 46887 - DNA, 2375 bp, Zea Mays
atcaaacgccgtggggagagaaaggagggagatagtgacagtcatcgtcgtcagggcgaggctacgcgactgtcgtgccctcggggtagcaagcagggggtgtcaccagctctcgttgaagcttgtgtgtgttttggctgagcgaggggtggctcgaagtgcgcgcaattcatcattggagcaagggcggtgccgccgattcgcagctcaccgcgggcagtaccactaacacccaaactcatggtaagaatgcttcaccatgcttcgcaatcctctcttatgcgcatagcaaacctcgtttgatcgatttggggccggaatcgccggttggccgcaacccggccatggcgccgccgctgctgtcagccgtggggtggtgggcggatccggggtcattgatcggaccatgggcggtccagattagggcacacttacctcttcgcgcaatcggatctggaccgtggatctagtatcgagtgaacgagaatcgatcatggtcgtagatctccaatccaacggggctccgtgcgtaccggttcggattgaagaaagctctaatccgagccctctattgcagatcaaacgaccgatatgtgtcaataccccttcggccagggaattttgcataagagacctctgacttccttaaaataaactcgccatccggttacacaagaaataattagatacaggtccttttatttatgtctgagcccgtagaacttccgataatcatggccccagtccagccaaccaggaaaacaataaaaataaatgcagaagtcactttttagtgcaaaaataatgtcttaatcttagaaaagtcataacttcattgttttaactccaagttgacccatttctcctgcattggattcataataatattgtttaccagttagtaaccttattttactatgtagcttagtgataaaaataacactcatttggttttatatttaacacttaaaactttagaaagccatatcttttcaaccttaactccgattttagtgattctcgaacctgtgatctcgttaccatgcatagatcattattattcaatatgttctcatgattggtgtgatgttgtttttcccataccatgtttgtttgtattgctacgagtagcagcgaggtcacgagaatctgaagaccaacttggtacctgggaatctcgagtctaaggcaagttgtgcccttgaccacttttctctttacctaataatgtccctattaatcactgtgacatgctcaggttaatttgatgggacctaataggtttccctagtattgtttatcccacaccttgcaaacaaaagaactattgggtagaattgctattgctctacctggttttgggaaattaatgttatattatgatcatgtttcaattttgttgttgttttaattattgttcatgataaaatcatcatgttaattggatcatggagaaccaccccggaaacagtgctaccataagggtggaatgggacgcccttggccaagtaattagaaaaggcagggagagaatatcttacccgaaaagggcaatcggggaggcgtcgctacagagtatagggaggttctcgggtcgaactgttgtgatggcatttcggacgagggattcctatgcttccttctacctgaaatcgtagtgggttttctcgaactagtggaactttggaaaggcctcgtagtgctaccctgcctcgcttcctcggtagaggtgtatggggtctgtataaccccgtggcaaatgggtaacatgacttgtgggtaaagatgtgcaacctttatagagtgtaaaactggtataacagtcgtgctcacggtcatgagcggctcggacactcgcatgattaaattatggaatgaaacttaatctatcatttgcattgcattgtgggtgttattattaattttggtctcttatttatttgggttggtatctacttatacttagtaactgctaatacaattttgaccaactctaaaagcaatgctcagcttcaaccatctcttttggtaagccttacacttcacatgagccctattgtaagtgagctcatgcacattattccccataacttgttgagcgatgaacgtatgtgagctcacccttgttgtactcacatccctcgagatcaagaacaggtaccaccggatgaggagcatgaaggatgtcgcgatgagttcgtgagaggtctaggtcgtcgtctcccagtcaactatggttgttggatcgtcgtcttcatatgatgtaattatgtagctattttgtatagaactccattatatattagagatgtgacattcgtttctgtaccatgagtcatcatatgtgtgatacttgatcccagcacacatttgat

SEQ ID NO: 46888 - DNA, 1772 bp, Zea Mays
cttggcttaggttctgatcgcccagggccctcctttgggtttggctgagcccaacacttggagccagggattgacccatgatatctctttccacttttcctattagtgccttctcactgaattaccgctcaagtggagatacatcggggggtagaagagctcatgttggtatttcctccagccttatgatgagtcgtcaaaacaccataactgaaaagtggttttgttatgttctatcgaagagaggtgggtgaggtactttagagagtcgatgcaatagtggaggtagaaccctgatgttggggctaaggcgtatcgtcattgttccatgggcgtcgatgatatggcaagggacacaatctcctagtagtaacatttgtatagatcgtgcgagtctattgaagctaggtacctggagtccatcgaagttgttgtgatggtggtggatggtattgatgtcattgcatactgtagattatggttgtcttgatgtagaagacaatgtagttgtctcgcctcttgctacgcagcccgtgcctcccttcccaccgtggagtgtcgaggatgacatgtgttgcaatttaaggctactagaagagctttgatctcatatgtcttcgcgtcaacgtgaagagggatgtcaaagcaggtaccacagtaggtgattgtcatcggtaccaatgaagtccaaagatattgatgttggtgcgacgttcgacgttgcccgccagtcgtgcgaaggttgtgttgatgatgttatgcgtggcgtctattaagttgcatgcaccaatcagtccaatccaaaagcttaagctgttaggagaaggtaagcaatccatttatacacttcaacacccccactcacgtgcagccagagagaaagacacaaacatggaaataaaggggtgaaagcacaaataaagcctctgacaggattcaaacttgagacctctagatctgataccatattaagttgtatgcaccaaccagtccaacccaaaagcttaagttgttaggagaagataggcaatccacttatacacttcaacaatatcaatatcgatgcaaatgcgaactccttccccaaagatggttcaacatggagcgtctaccacacactcttgtgtgcctagttgttgagaacatcattgcctctaagaattgctcacagtggttaagccatggcggtggatccttcttgctgttgtatgtatggaacaacaacttgtggctgcgggcagtggcagagccaggctaaaagcgaagcctgggcaatgctagtgagagggtaggggcgacgacgcattgagattagcactgttcttaaggcatcgcctaggcgtccaggcggaggtccaacgcctaggcgccttgcccgcctacctcgcctaggcgtccaggcggtggtccaacgccttgtctcgccttaccgctttaaaaaccatggagattaggccattagggtaataccaccactagtagcaaggcttcctccgcccacaaccatcccgccttacctcaattgtctttgacctctctttgcctgcttttactcttattcctccccagcaactgcctccatgcgggggagatctggatcgaggcggccactaccttatggtagcgatggtgaatgtgaagaggtgatctactgcatgacgacgacgaatatgacaaccggtttaataggaaccaatcctaagtggtggcggtgccctcgacgaagatcgatctctccttgagggcgcgcagtgtggaagctgcaacggcta

SEQ ID NO: 46889 - DNA, 347 bp, Zea Mays
ctttatcaattagaagacgtttgtagagccatttttacaagacagttatttaaaatggtattattgcgaagcgtcacgtttatagtccaaaaatacaattgtccctcgcaggggcgcaatccgcgcgctggctttgagggctggggctgggcgcgagtagagaggactggaaggagctcgacgggctcgcggctgggagcagtaccaccatggttgggagctgcaagggcgcggcaccagggagctccgagcagggacgccgcggtccgagcgcaggaagccgggcggagcgcgcgacgcagagagcagcgctggcagaagaactcgcgcgcgcgccagggagctag

SEQ ID NO: 46890 - DNA, 1191 bp, Zea Mays
cggccattgagctagcttggatcgccgacacaccccctacctggcgcgccagctgtcggtgttttgggtccgacctcacacccggggttacctctcaaggtgttttctaggagtaggacggtgtcaacgactgtagcaaaatggttcgtgccgatcgcacgagagacagtggacaagatttgcaggttcgggccgcttagagatgcgtaacaccctacgtcctggtgagtatgcgagtgtggttacaagagggctctctgggttgaaggcacagagagtttacgtgggtggctaagtaagatagggtcgatcgatctgaaggggtgccccctaggccttatatactcgaccgtggggcagtacacgtggatatgataacaacaagtagctgaaaggtagtgaacctcttgagtctatccctacgtaaccctcgccgacttatcctcgcatggctccattgcatgggggtttcagcgcgggaaagtcgggtctctgttgcgatttactcgttcgacgttgtgggccgtccgggtttgctccaatccggtcttacatcttctctgctttgttgattgtctttccccaggcccacgaaagaacgaccttacgatttattgggcccttgggcctttcgtgaggtcttttacttctttagtggacccgggggatatctatcccccacaccttatgaatgtcgccgagaatggtgtcgacgggatgatctcgttggattgcttggtggactcttgggtgtggcggccttggttcttcctccttgtcttgatcatttgcgtctcccccttgatcattgtcgtcatcttgaggtggctcatttgtttgatcttctcctttatcaacttgagcctcatcctcattttgagttggtggagatgcttgcgtggagaaggatggttgatcttgtgcatttggaggctcttcggattccttaggacacacatccccaatggacatattccttagcgcgatgcatggagcctcttcatcacctatctcatcaagatcaacttgctctgcttgagagccgttagtctcatcaaacacaacgtcacaagaaacttcaacttgtccagaggacttgttaaagactctatatgcccttgtgtttgaatcatatcctagtaaaaagccttttacagtcttaggagcaaatttagattttctacctctttt

SEQ ID NO: 46891 - DNA, 760 bp, Zea Mays
atctgaagtcttgtactcatcaagcatggttcttgccatgtccaatagagttcgattcttcctctccactacaccattttgttgtggcgtgtagggagaagagaactcatgcttgatgccctcctcctcaaggaagccttctatttgagagttcttgaactccgtcccattgtcgcttctaattttcttgatcctcaagccgaactcattttgagcccgtctcaagaatccctttaaggtctcttgggtatgagatttttcctgcaaaaagaatacccaagtgaagcgagaataatcatccacaataactagacagtacttactctcgccgatgcttatgtaagcgatcggcccgaatagatccatgtgtaggagctccagtggactgtcggtcgtcatgatgttcttatgtggatgatgggcaccaacttgcttccctgcttggcatgcgctacagatcctgtctttctcaaaatgaacatttattaatcctaaaatgtgctctccctttagaagcttgtgaagattcttcatcccaacatgtgctagtcggcgatgccagagccagcccatgttagtcttagcaattaagcaagtgtcgagttcagctctatcaaaatctaccaagtatagctgaccctctaacactcccttaaatgctattgaatcatcacttcttctaaagatagtgacacctatatcagtaaaaagacagttgtagcccatttgacataattgagaaacagaaagcaaattatag

SEQ ID NO: 46892 - DNA, 295 bp, Zea Mays
attttagcatctaattttgctatatgatcattttgttgtttaattaaagccatgtgatcatgaatagcatcaatatcaacatctctacatctagtgcaaatagtagtgtgttcaacggtagatgtagagggtttgcaagattttaattctacaaccttcgcatgtaatatatcatttctacttctaaggtcggaaatagtaacattgcaaacatctagttctttagccttagcaagcaatttttcattttcaatcctaaggctagcaagagacatgtttaattcttcaatcttag

SEQ ID NO: 46893 - DNA, 472 bp, Zea Mays
gataaatatgctcattaggacaagacgagtctctaagaataagatagaatcttttgagattagttagatttattgggataagatgaaattcttttcgggatgagatgattttattaagttaagagagtatcttttttaagataagatggatctattaagataagggagaaccttccaagataagatggatctatttgatatattctaatgggggtattcttagttggtctagtttatctaataaacaaattatgagaataagataatttttttaacataagatgaacctattaggataagataggttcctttaagttaagagggatcgatttaaaatagatacactttaatggaggataacctaggttgtttagttatcttatgaattttatttatttatatttatgcctatatgtatatgcagatgtaattgtggacattactacacaactcatcacactcaatcaaagat

SEQ ID NO: 46894 - DNA, 725 bp, Zea Mays
gtccatttctatataggtttcatcctacagtcaacattcctctgataccacttctgtcacacccggttttaaggggcaaagccgggtgcgtctcgtacatgcgccaaagaagacaacatatataataatagagtgtatagagataaatgtcacaatataatcagagtacttattacatatcagaagtcttacaaaataaaagataaatataaaaggatctaaaatccatccttggccccagaaagtcaactggagacgccacctagatcgaatcgaactcctcgatgtgcggctcctcttgaaccacctgatcttctcttgggaggtgtgagacaacaagggtgagctctcacatgttcatcgctcaacaagttgtggggaataatgtggcatgaactcaccaaaggtggaagatcatgtgaagtgtaaggcttaccaaagagaatggttaaagctgagcattgcttttaaagttggtcaaagttttattagcaattactagatgtaagtaaataccaaaccataataataataatagaacaaaattaataacaaatgatcccatgcaacacatatgacagattgagtttaggttccataatttaatcatgcgagagtcctgagctgctcttgaccgtgagctcggctagtataccagttttacactctgcagagaatgtaccctttacccacaagtcgtgtatcctatattggcagggttagct

SEQ ID NO: 46895 - DNA, 212 bp, Zea Mays
gtatcctatattgccagggttagctagacccttagacaccaccgaggtgaatgactagggatccattgtgaggtctttataaagttccactagcttccgaaaacccgctatagtttatgggaagagcacttgcaagaatccctcgtctgaccgccatcgcagcaaaatcaacccaagaacctccctgcatgcaactcccctactgctcttgc

SEQ ID NO: 46896 - DNA, 623 bp, Zea Mays
aattggacatcatcacacaatgcttgaagtaaatagaggaaaggtactttattacatcaagatgtccaagacatccacatagtctattacataatcattgttcaacataattatcaaagtgcggaaataagaaacgtagatgctaagcctacacaggcagctgaatgggggtttgccactaagaaagaactagaactcgtcatattcctggaactcctcgaagtcatccatgttgccagcatcacctcctgagcactgagtataatggggacaacctagggtgggggtggtgtgtaaagcaagggtgagtacacatcaacatactcagtaaatgtcctgtttggctaaagtggactagttgtatatggagttgaggtcaagaagtttcttttagttggtaaaatatttattattattagtagagccaagttttagtaataaacccagttattacccagaagtacctcctcaaaagaggaaataccagagatcagattttatcatcattattaaccatcatcatataagtatccaaagttcttctaatcaaagaggatcccaaggctgctcttaaccgtgagctcggctgatataccagtttttaacactctgcagaggttgta

SEQ ID NO: 46897 - DNA, 501 bp, Zea Mays
gagaagctcactcggtttaggtgaccgtttgagagagggaaagggttaaaacagacccggtctttgtgaccacctcaacggggagtaggtttgcatgaaccgaaccttggtcaaacaaatcatcgtgtcatccgctcttattcgcttgtgatttgttttcgcccactctttcggacctgattatatttctaacgctaaccccggcttgtagttgtgcttaaactttataaatttcagatttgcctattcacccccctctaggagactttcagttcaccatcatatgagcttctctatcttatgtagagcacaaaacatggacaacacgactgaggaaacctttgaaattacctggccacggtgagaagagcactcgggttgtatggtcaccatggtcacatgatgcactggctgaagcaaacttggtagctgtggggaaggttaacaccagcaaaacaccaggatccccacgcccacatagtgtactatggctggagctta

SEQ ID NO: 46898 - DNA, 542 bp, Zea Mays
aataaagagagaaaattttgcaaaatccggcagcacctcctttgaaactagcataacaaggggggggaaacatgtagttcatacaggatataaagacagataattcacgtagtagaatctaaatgcaaaagtggtaaaacacattcatgacccagcaggaacaaaaaatgagataagtaactcagcccacccccaaaaaaacgctcaaccaacaagagaagctagaacatagtaattctctagacttgaccctccctgattaagaacattattaagtagtggttcctttattgaaggtgtagtggccgtgttgctacatccctcttttctcaaagcaaaaattaggtgcctgcatcaaacaatgcaagagtgagatgacacatctcagcaagtaaacataacaacaacaaattggacattgtaaatcaactgtgcttaaacaaccacatagttcaaaactttcttcttgaacattaaattgcagcaagtaaacaagtaactaattacttaatgccaagaagaatcaccatgtaaaaatccag

SEQ ID NO: 46899 - DNA, 534 bp, Zea Mays
aagcatcaaagtaagatgtagaggtgacaagggtaaagatgataatcatgaaaagcataaccaaggatagagttaaggcaagactcacgaagtggcgaagttgagaaaataatcaagggtaagatgggtaaggttccaatagaaggactgaagtaaagattcattaccgaaggaagtcacaaggaattaacgagatcaccaaggatgtgaaaaataaaatgacaactcatggatcattaagaaacaagggtggtcaagggtatgttaactgaaatgtcttaaacagacattggggtataaatataagcacatataaaaatataagagtatgcaatattccaaggatacgagcatactaaggtaagggaatagaaagagccaaaggataacgacttatcaacggaatagaaagggatctcagaagacaagaagttcatggacatataaatgaagtgttgaagtaggaaatacaaattatgatgtaagcatttgaaacaagagtattgaggaatctaggggtatgggcatgccaat

SEQ ID NO: 46900 - DNA, 870 bp, Zea Mays
gatttaggcaattttatcaacagaattaaactgtgggttggtaaaataagttgtagataattttataagctttccagattgttaaagagtgcattcatatgatttgtgaaactccagttatgtttgttttactgtggctgttcctgtttacctgacaaaaatgagtgggtctgttcactggtgggtttcatctagtaaatggccgaattggctcttccaactatggagacttttgtagagggataaaagttcttacttccagcagaatttcataatttttggttcagcagttttggagatatcgaattttaaagttaaccatactgctgtctaaaacagattcagtcagttatcttgtcagatgttttagaacttgtagatgacagaatttaattatctattgaatactgaagttgtagagtattttgtgtagatactcctagagtatttgtttgatatcaccgctgttttaattttaaagatacaaaattaacaaacagcgttgctgctgtatggcatgtggttcagggtgggagtctttccactgggtcttggtttcaagtgtaggagtgttttgttgattgatggcaaatgtttgtgaaatatttgtactaagttttatgcccactagcaggtggctacactccagatcatgtctagtacatttcttcttcttcgatgaaggcaagtgaatgtagcggtggttgcttccgttctgacctgttatttctatcgcctacactctaatattcgaaagtatcagattctttcataattggactctatggtgatgctttacttgcttgcattatactgatgctcaatcatatattgatgatgattatgatttgagtatgactcatgagatta

SEQ ID NO: 46901 - DNA, 1256 bp, Zea Mays
gcagcacttccacatcggctcccagatcccgaccactgccctgctcttcgacggcgtcggcgaggccgcgcagatctattgcgaactcgcccgcctcaggttcttatttcatctcgaattcgaagtcttctctcgtccctgtccccctccagcaccgtcgccgtcgtcgtcgcgccgcaacctctccatggcacgccctccgtcgacggccatcaagccaccgtatccggccttccattcccatcccagcgatctcgagctcgtcaactcctatctccatccctgggtcgagaccggcgtcaagaccgtatcaaactagtgcgctcgctctccggcctctctcgcacggtcgcaccccctctctcccctacctctctccggctctcttcttccaaggtagacagcatcagaattttccgacagtatgtgcattcgttgatctcgcgctctcaccacgcacacacactggtgtcgtacgtatatagcacgagtttcttttttgctagcttgtttcctcttcaggaatttctatgaatctcgttttggagttggagctctgcgtgcatcgtatctatggttcttcactctactttgttgatgctttcttctttgtgcctggatcgatcgcacgctcgactggccgggactagatttctacttcgatctgctacgacctttgcaaatttttgactgtatgtgtagggatcgtcagattattgcaggttaagtttgcacgccattaagctagctagtcagccagcgagggtccatggatcttgtggacaaacgattaaagaagagtagtgtgtgctgttccttcgttctaattaatcatcagctggcatttccattccttcgtatttgcgtgggtttttactagcaaatcgatccggtttagaagcatcgactaataaatatggaaaagcacatatggctatcatgtttagaagtttcttcagtctgtgtgtcacactcagccactcacacatcaatgtgatgaccatcatatgaaagaacacaaacacaatgacactacgcgctgaagggtttgtctggtttttatcactaactgttcgacaagtacatggcttgctttcaactatccaatgcagtcgctggggattgaagccattccaactgatcaccgatgtaactggagtaacggttctctttatttattttcagattgtccctgctccagtaagagtaggcgaggacgagcctcccccatcttgggtgttggtgcctgacccatt

SEQ ID NO: 46902 - DNA, 333 bp, Zea Mays
cttcctataaatgattacccacaatgcaacatttgaagatctccaagtcttttttggtcatagcaatgatacatttcaccgtgtcatcaaacatttcttcgacatcgttatccctggccttagcatgcggttcctaaagcctccttccaatcaagttcatcctaaaattcatggagacaaccgattgtatccatacttcaaggtgacttcttttaactcttatgtgtccatcttagaacatcctcaatattagatcttagaagatcgtttctttttttttgcagaattgcattggttcaatagatggaacccatgttctagtatcaatgtcac

SEQ ID NO: 46903 - DNA, 342 bp, Zea Mays
cgacttctctcgctaaggcacaattagaatcaaacaatgcaactacgctgcgctgactcaacaggtttttttttttttttgcccatcccctgatagagcggttttaaccaatgaatgacagaatgtgctttgtgccttctttccacggcctgatgatgattaggaagccacggtctaggaaacaggtccgcactgcttgctgtgtgggctgtactgcaaaacaggtcgccacgatgggttctcaaagcacttggtccatgaaattggatggggaactcgaactgaaccagcaagaatgaaacacgaccatcggttttacttgcagagctcaataggtttagc

SEQ ID NO: 46904 - DNA, 347 bp, Zea Mays
taaaattcacataaataatataacaaatattagtctaagaaataatattttatttataaataattttggttgaatattatgaatttttatggttatttgaataggtatttcgaaataaaaaaaagaaaaaaaaacaaacctaaactaatcggcccattaggcccatgtaagggtcggccgccactctctccctagctaccctaatcctagccgccgccaggagcttcagcgccgcccctgctccctgtctccaagccgccgccattccctggtcctctctctccctgcctctgtttctctcttccctctctcctgttctctccctcacgtgcgcagcccaggtgcca

SEQ ID NO: 46905 - DNA, 627 bp, Zea Mays
tgtgtggaattggagaggatttgatcacttgggagtgtctagaattgaatgcctagctcttgtaagtgattgataagtggaaaacttggatgcaatgaatggtgggtggttgggggtatttatagccccaaccaccaaactagccgtttgatagggctgtctgtcgtatggtgcaccggacagtccggtgcacaccggacatgtccggtgcgccagccacgtcaccaaagctgttgggttccgaccgttggagcactgtcttctgggcccgcctggatgtccggtggcgcaccggacatgtactgtagagtgtccggtgcgccagtatgggcatgcctgacttctgcacgcgctggcgcgcatttaatgcgctgcaggtagccgttggcgccgagatatccgttgctctgttgtcacaccggacagtccggtgcacaccggacatgtccggtgaattatagcggactagccgttgcgaattcccgaagctggcgagtttctgaggccgctctgccttggagcaccggacactgtccggtgtacaccggacagtccggtgaattatagtggagcgcctatggattttcccgaaggtggcgagtttgaggtggagtcctctggtgcacc

SEQ ID NO: 46906 - DNA, 77 bp, Zea Mays
tgcccatggtggaagcaaaagggagagaagaaagggaagcaacagagaacagcaagagatgtgaaaaagccagagag

SEQ ID NO: 46907 - DNA, 182 bp, Zea Mays
ggaaaaccagcctaggtgttgtccgtttcctttttttcttttcttttttttctgttttatttttttcaattttatattcaatttcagatttggttttgaatttcagatgcaatttagatgcatcaaacaaaaatcttagcatgggatgtaaaaaaaatagtaattattttatccattttttt

SEQ ID NO: 46908 - DNA, 187 bp, Zea Mays
cacatataggatgaaagaatcgttagccgagaatattagacaatagatacaaacgttgtaacacactctctcgctcgcattcctgtaacctgcaaaattctgattacccttatctaaaataaaatactgtagaaatctcttacagtaagttttacccctaaaaaatggggttccttttcaaaaaaaa

SEQ ID NO: 46909 - DNA, 379 bp, Zea Mays
  misc_feature (1)..(1): n is a, c, g, or t
naacaagccctactgcatgaggaacaagaaaggacacgtacatgacaacggacctaatttatcatggcaatagcaggaatggtgacgaggaagtgatgattgattgaaggatggtgggactgcagaggcagtggcctgatttcaatcatcttataacacacacacacacacaaaagaacatttgaggaacagtaaactccatgaaaacaagtagtcagatcacttctcccaattcttatcatgattttttttgctacaatgggcagagtttagttaatataccaaaaaaggtccatgtccctcttcctaaaatttccattcctttaacaatgattagagtggataatatatgggtcaaattcctaataattgagcttca

SEQ ID NO: 46910 - DNA, 454 bp, Zea Mays
cacggctggacaatggagcagcagtgtgtgggctcgaaatgtgtgcgtgcgtgaaggctttatctgaaagggtgtatcgtcggactgaagaattgaatttatttcgtgatggtcgaccccattgggtggtcagagattcatcataggttcgctttcacttgctgttgttgcagtgaagagtttttttttttttttttgctagggtagcgtgtcagttggaactgctggagctcacagcttttacacagccctcgccgcatgcctgcaagctgcaacggcacgcctcccgtgtgtgctgtgctccgactccgacgaggcgacgacaacggcctcgcactcggcatgcgttcgtttgaaaacatccagtagcatcctcctgcctagtcggtctccgtcaccgccgagctcgacgtcgtcaccggcgcagcaactgccaactggcagcccgaacgcg

SEQ ID NO: 46911 - DNA, 1660 bp, Zea Mays
cgcatcgtacccctcctcgggcaacgtacgatgctaaattgtaccggtacggtcggaccataggtcacgacaaaacttcagatgcaaatgagtcatgcaatgtatatggcatgctacatttatcaataaacttcacttccttcagatacaacacaaacctcaaataatacttcatttaccttcagatacaataccaacctcaaataatacttcatttaccttcaggggtgtgaattaatctcatgagacatactcgaatcataatcatcatcaatatatgattgagcatcagtataatgcaagcaagtaaagcatcaccatagagtccaattatgaaagaatccaatacttctgaatattagagtgtaggcaatagaaataacatgtcagaacggaagcaaccaccgctacattcacttgccttcatcgaagaagaagaaatgtactagacatgatctggagtgtagccaccttctagcgggcataaaacttagtacaaatattttacaaacatttgccatcaatcaacaaaacactcctacacttgaaaccaagacccagtggaaagactcccaccctgaaccacatgccatacagcagcaacgctgtttgttaattttgtatctttaaaattaaaacagcggtgatatcaaacaaatactctaagagtatctacacaaaatactctacaacttcagtattcaataaataattaaattctgccatctacaagttctaaaacatctgacaagataactgactgaatctgttttagacagcagtatggttaactttaaaattcgatatctccaaaactactgaaccaaaaattatgaaattctgctggaagtaagaacttttatccctctacaaaagtctccatagttggaagagccaattcggccatttactagatgaaacccaccagtgaacagacctactcatttttgtcaggtaaacaggaacagccacagtaaaacaaacataactggagtttcacaaatcgtatgaatgcactctttaacaatctggaaagcttatgagattatctacaacttcttttaccaactcacagtttaattctgttgataaaattgcctaacgcttaagagaacagattctgcacagaattatgagactgaaaaactgctataatcaaacttacataactttctgttctgatgtccgattgagatgttcttcgcggccacggaaagatctacaaattatctacgactcatatatagactttttatttttttgaggccactaagaccatggaaaactggcatgaacaaaaactgtcgaatctgccattctgcagaaaactaaattcgagatcaaaacctaaccccacatcaaatccaacctctaatcctttaatttccatgatccacaacctccaaaagcatataattacagggaggaacaaggatctcatccatacctagggtttcaccaagaaattctgcaagaagagatggggaagaacatctccttgatcctctctcccccttcaattcaacgtgctcctcctcttctcgatccttgctgcgcgggggaagatctagagggaggaggaagccgtggagaggggctgccatgggaggagaggacggccagcccaaggggaaaggagggaggggtggccaagtgtggg

SEQ ID NO: 46912 - DNA, 354 bp, Zea Mays
gttttttccttttctttttcttttttctattttattttcttcttattttttgaatttcaaattttaatttgaatttcgttgtgggtttcacatttaggctaattgcacaacttcaaatcctagtataagaagaatatatatttattttctttatatagtattttctttctcttcctcttctctttgttagtccccatttctaaattttcaatttaggtcttacaatcccaatttggatattaatttatttctgtcaatatgattacttttattattaaatgcacacacaaataaatcccagcatgatgcatatattatttaggtgtcattagatacttaatcactttgaatgtg

SEQ ID NO: 46913 - DNA, 228 bp, Zea Mays
caaatgaccatcctcagtaagaagataaagacggggtatacttatataagaaggccgagcccaccggcacttaacaccatcacagcagcacaaagttatatcctgaaaaacaacagggaataaaaccctgagtatggaattacttagcaagacttactcgactaaagaaaagactctcaaggatatgctggatttaggaatcaaggagaggctttagcaagaatcaac

SEQ ID NO: 46914 - DNA, 395 bp, Zea Mays
gtagtattaaaataagcctctagcattgattattattgaatattaatatggtaccgagccctgcagacaacaggaatccacccatgaacaggtagcggtcaaacgaaaccagctcaaataaatctgacccttgcacggcttcagggagctaagctaacctactgttgacctgatccggttacagacgaaacgagcaggagttggggaagtaaaccacgacagaaacgacatggaagaagtacgaagtggggcatcataggccaaaggagaaagctcgcggccacgctcttggagcggcggtgggcgccggcggagaacctggagaagatctcgaccatcgtctcgacggcccctcggtctggctccaagctcactcggagttgaacaactttttc

SEQ ID NO: 46915 - DNA, 568 bp, Zea Mays
gtccctcattgtcggagtcagacgaggagcagtccgaatcccactccttgccaagatgagcctcgccctttgccttcttataattcttcttcttctccctcttgttcccttggtcctgatcactatcattgtcgggacagttagcaataaaatgaccaagcttaccgcatttgaagcacgaacgcttccccttagctttggtcttgcttggttgtcccttgcgacctttaagcgtcgtcttgaatcttttgataatgagggccatctcttcatcattaagtccggctgcctctatttgtgccaccctgctaggtagcgcctccttgcttcttgttgctttgagagcaaggggttgaggctcgttgattggtccattcaaggcgtcgtccacgtatcttgcctccttgatcatcatccgcccgcttacgaattttccgagtacctcctcgggcgtcatcttcgtgtacctgggattctcacgaatattgttcacgagatgaggatcaagaacgataaatgaccttagcattaggcggacgacgtcgtggtccgtccatcgcgtgcttcc

SEQ ID NO: 46916 - DNA, 5168 bp, Zea Mays
attagtacacaaaaccaatgtactaaggtttagaaacatacctttgctctagatttgcactttgttcatccatgggtattgattcacatttaagcacttgtgttgacactcaatcaccaaaatacttagaaatggcccaagggcacatttccctttcaattgtctcgcccatgatttccaccgcccactttgcaatcctacccgaggcctctcggcactagatgatctcccccagggggaaggatgacaccacagtcaccggatgagactcgaagtagtgtcgcaacttccgccgcgtcaggatcactgcgtacaacagcttctgaatttgtgggtagcggatcttggtctcggacagtacttcactgatgaagtagactggcctctggacgggcaatgcatgcccctcttctcgcctctcaaccacgatcgtggcgctgaccacctgagtggtagcggcaacgtagatcaagagggcttcttcggcagcgggaggcaccaagatgggcgcgttcgtgaggagcgccttcaggttcccgagggcttcctcggcctcagggtccaagtgaagcactcggccttcctcaagaggcggtatagagacaggcctctttcgccgaggcgcgagatgaaacggctcagagccgcaaggcatcccgtgaccctctgtatgcctttcaagtccttgatgggccccatgttggtgatggccgcaattttctccgggttggcctcgatgccccgctcggagacgatgaaccccaagagcatgcctcgggggaccccgaagacacacttctcaggattgagttttacgcctttcgccttgagacatcggaatgtcacttcaaggttggaaaggaggtcggaggctttcctcatcttgactacgatgtcatcgacgtaggcctcgaccgttcgaccaatgtgttcgccgaacacgtggttcatgcacctttggtatgtcgcacccacattcctcaaaccgaacggcatggtaacatagcagtacatgccgaagggtgtgatgaaagaagtcgcgagttggtcggactctttcatcctgatttggtgataccctgagtaggcatcgaggaaggacagggtttcgcacccagcagtgaaatccacgatttgatcgatgcgaggcagagggtagggaacttttggacatgctttgtttagaccagtgtagtctacacacatccgccatttccctcctttctttctcacaagcacggggttggcaagccattcgggatggaatgcctctttgatgaaccccgcccccattagcttgtgaatctcctcgcctatggctctgcgcttttcttcgtcgaatcggcgcagaggctacttcatgggtcgggctccagctcggatatctagcgagtgctcggcgacatccctcggtatgccgggcatgtccgagggactccacgcgaaaacgtcggtgtttgcgctgagaaagtcgacgagcactgcttcctatttggggtcgagctcggagccgatccggatcagcttggaggcgtcgttgctggggttgagagagacggacttaaccgtctctgctggctcgaagttgccggcgtggcgcttcacgtctggcgcctccttagagaggctctccaggtcggcgatgagggcctcggattcggtgagggcctcggcgtactccacgcactccacgtcgcattcgtacgcgtgtcgatacgtggggccgacggtgatgaccccgttggggcctggcatcttgagcttgtggtaggtgtagttggggacggtcatgaacttggcgtagcatggcctccccaacaccgcgtggtaggttcctcggaacccgaccacctcgaacgtgagggtttcccttcggaagttggagggtgtcccaaagcagacgggtagatcgagttgttcgaggggctggacgcgcttcccggggatgatcccgtgaaaaggcgcagcgcctgcccggactgaggacagatcgatccgcaggagcccgagggtctcggcgtagatgatgttgaggctgctgcctccgtccatgaggaccttggtgagcctgacgttgccgatgacggggtcgacaacgagcgggtatttccccgggctcggcacacggtcgggatggtcgccctggtcgaaggtgatgggcttgtcggaccagtctaggtagactggcgccgccacctttaccgagcagacctcccgacgctcttgcttgcggtgctgagccgaggcgttcgccacttgcccactgtagatcatgaagcagtcgtggacctcggggaactctcctgccttgtgatcctccttcttatcgtcgtcgcgggccctgccaccttccgcaggtggcccggccttgtgaaagtggcgccgaagcatggcgcactcctcaagggtgtgcttgacgggcccctgatgataggggcacggctccttgagcatcttgtcaaagagattggcgccttcgggaggtttctgagggttcttgtactcggcggcggcgacaaggtccgcgtcggcggcgtcgcgtttcgcttgcgacttcttcttgcccttcttcttggtgtcgcgctgagttgacgcctcggggacatcttccggtgggtggccctggggctgcttgtcctttcggaaaatggcctcaaccgcctcctgaccagaggcgaacttggtggcgatgtccatcagctcgctcgccctggtgggggtcttgcgacccagcttgctcaccaggtcgcgacaggtggtgccggcgaggaacgcgccgatgacatccgagtcggtgacgttgggcagctcggtgcgctgcttcaagaatcgccggatgtagtcccagagagactcccccggctgctagcggcagcttcagagatcccaggagttcccagggcgcacgtacgtgccctagaagttgccggcgaaggcttggaccaggtcgtcccagttggagatctgccccggaggcaggtgctccagccaggctcgagcggtgtcggagaggaacagggggaggttgcggatgatgaggttgtcatcgtctgttccacctaggtggcaggccagccggtagtccgcgagccacagttccggcctcgtctcccccgagtactttgtgatagtagtcggggttcggaaccgggtcgagaacggcgcccgtcgtatggctcggctgaaagcctgtggaccgggtggttcgggcgagggactccgatcctccccgctgtcgtagcgtcccgacgcctggggtggtagcctcggcgcaccttctcgtcgaggtgggctcgacggttgcggtgatggtgcttgttgccgaggcgacctggggccgcaggcgcagtgttgcgcgtgcgcccggtgtggaccgaggcttcacgcatgaatcgggaagtcgcggcgcgatgttccgaggggtacccctgcctttgggaggcagagctttcggcccatcggaccgcggcatcctccaggagattcttgagctctccctagatacgtcgcccctcggtggtagatggctccggcatcgcgcggagaagtattgccgctgcagccaggttctggccgactccactagaggccggtggtggccttgccctggcatcgtcggcgatgcggtgctgggtgccctggggtagatgacgcgcttctccggccggaggttggcctgcccattcctgtccgatgtcccggcggaacggctcaagtgttcctgctccctcgtcgagcctggcctgcatctcatggatttgctcgagctgtgggtcatgaccccccgtcgggacggagaccacagctagcccccgaaggatgtcaacgcgaggcgcgggcctagggggatcaccgttttccggtataccaagatggttgccttcgccgggaccgcctagatcgacgtggaaacattcacgacttgggccgcagtcctcgtcgccgaggctgcggctaccgtcggaacagtcggaaaggcagtagtcgcatgcggtcatgaagtcccgcatggcactggggttaccaagtccggagaaatcccaacaaaagtcgggctcgtcatcttcctcggaacccgaggacccgtaggtcgagacgaccatcaaccggtcccagggtgaccgcatacgataccccagagggtttggactcgcctctatgagagcgtccaccaaagcgaagtcgcttggtgggtcgaggctgaatccaaaaggcacaagatgggagtcggtcggtacctcttggtcgacaggcggtgacaaagtcgcgtcaggggcagactgcaccgtcgtctcaggtacgagggtgacgcctagcaagtcctttgcgagcgtgctggcgtcgttcgtttgcttggagttggcgtgctacggggagacggcgctcatcttcgtctcagacgcgaagtcgatgcccgacgtgtcccccgttggggcgccgtcgactcgctcgacagccgacgaggtgccgcctcctgcttggccttggttgccccgcctcctcttccgtcggcgggggaggcgacgggataaacccgaaagtcattcttccgccacgtggggaagacgtcgtcgattccgccgccggcgggcgggttgttggccgccattgtcgctgtcgcgcggcgggggaaggagtatcatgtcgtagctgccgtcgagggacatgaactcaagactcccgaaacggagcaccgtcccgtgctggaaaggttgctggagactgcccatctggagcttgacgggaagctgttcgtcaacacgcagcaggcccctacctggcgcgccaactgtcagcgttttgaccccgggggggtccctggaccgacgagtaaattgtcgtcgcgtgccccagcccagatgggtcagcgcgagacggagcgcgaaggggggaagaagccggagggagagaggcgtaaaaggggaaacccgcggccttcgtgtttgtccagcacccaggtcgggtgtgcttgcagtagggggttacaagcgtccacgcgggagggagcgagaggcttatgcgagtgtcgtcccgtccttccccgcgcggccaaccctctgtaagagggccctggaccttccttttataggcgtaaggagaggatccaggtgtacaatggggggtgtagcagtgtgctaacgtgtctagcggagaagagctagtgccct

SEQ ID NO: 46917 - DNA, 2418 bp, Zea Mays
gacaggtggtgccggcgaggaacgcgccgatgacatccgagtcggtgacgttgggcagctcggtgcgctgcttcaagaatcgccggatgtagtcccagagagactcccccggctgctagcggcagcttcagagatcccaggagttcccagggcgcacgtacgtgccctagaagttgccggcgaaggcttggaccaggtcgtcccagttggagatctgccccggaggcaggtgctccagccaggctcgagcggtgtcggagaggaacagggggaggttgcggatgatgaggttgtcatcgtctgttccacctaggtggcaggccagccggtagtccgcgagccacagttccggcctcgtctcccccgagtactttgtgatagtagtcggggttcggaaccgggtcgagaacggcgcccgtcgtatggctcggctgaaagcctgtggaccgggtggttcgggcgagggactccgatcctccccgctgtcgtagcgtcccgacgcctggggtggtagcctcggcgcaccttctcgtcgaggtgggctcgacggttgcggtgatggtgcttgttgccgaggcgacctggggccgcaggcgcagtgttgcgcgtgcgcccggtgtggaccgaggcttcacgcatgaatcgggaagtcgcggcgcgatgttccgaggggtacccctgcctttgggaggcagagctttcggcccatcggaccgcggcatcctccaggagattcttgagctctccctagatacgtcgcccctcggtggtagatggctccggcatcgcgcggagaagtattgccgctgcagccaggttctggccgactccactagaggccggtggtggccttgccctggcatcgtcggcgatgcggtgctgggtgccctggggtagatgacgcgcttctccggccggaggttggcctgcccattcctgtccgatgtcccggcggaacggctcaagtgttcctgctccctcgtcgagcctggcctgcatctcatggatttgctcgagctgtgggtcatgaccccccgtcgggacggagaccacagctagcccccgaaggatgtcaacgcgaggcgcgggcctagggggatcaccgttttccggtataccaagatggttgccttcgccgggaccgcctagatcgacgtggaaacattcacgacttgggccgcagtcctcgtcgccgaggctgcggctaccgtcggaacagtcggaaaggcagtagtcgcatgcggtcatgaagtcccgcatggcactggggttaccaagtccggagaaatcccaacaaaagtcgggctcgtcatcttcctcggaacccgaggacccgtaggtcgagacgaccatcaaccggtcccagggtgaccgcatacgataccccagagggtttggactcgcctctatgagagcgtccaccaaagcgaagtcgcttggtgggtcgaggctgaatccaaaaggcacaagatgggagtcggtcggtacctcttggtcgacaggcggtgacaaagtcgcgtcaggggcagactgcaccgtcgtctcaggtacgagggtgacgcctagcaagtcctttgcgagcgtgctggcgtcgttcgtttgcttggagttggcgtgctacggggagacggcgctcatcttcgtctcagacgcgaagtcgatgcccgacgtgtcccccgttggggcgccgtcgactcgctcgacagccgacgaggtgccgcctcctgcttggccttggttgccccgcctcctcttccgtcggcgggggaggcgacgggataaacccgaaagtcattcttccgccacgtggggaagacgtcgtcgattccgccgccggcgggcgggttgttggccgccattgtcgctgtcgcgcggcgggggaaggagtatcatgtcgtagctgccgtcgagggacatgaactcaagactcccgaaacggagcaccgtcccgtgctggaaaggttgctggagactgcccatctggagcttgacgggaagctgttcgtcaacacgcagcaggcccctacctggcgcgccaactgtcagcgttttgaccccgggggggtccctggaccgacgagtaaattgtcgtcgcgtgccccagcccagatgggtcagcgcgagacggagcgcgaaggggggaagaagccggagggagagaggcgtaaaaggggaaacccgcggccttcgtgtttgtccagcacccaggtcgggtgtgcttgcagtagggggttacaagcgtccacgcgggagggagcgagaggcttatgcgagtgtcgtcccgtccttccccgcgcggccaaccctctgtaagagggccctggaccttccttttataggcgtaaggagaggatccaggtgtacaatggggggtgtagcagtgtgctaacgtgtctagcggagaagagctagtgccct

SEQ ID NO: 46918 - DNA, 1477 bp, Zea Mays
caccattgttgttttgaagatctcattatccaagtaggtgttgttgctcttgattgcttcatttttcatttgagtgtcctccctttatagttgactctttttccttccgaacttattgaaaatactcaagggagatgttaatagcacaagggagtacatgatgaagaatgatttctttagataataaatatgaacaattcatcatccataagtcacacacacatgaagtaaaatccttaatattagtgcatatcataagaaaagagggatatgcaccttttaaacgttttgatcaatcataggaaattttacttcttcttattgaattttaacatcataacttagaggcatatcaatatgaaaacaaatatagcaaaggtatgaattagattctaatggacaaatgcatttatgaaaatgtgattggatgcacatcaagacaattttagtccaataaagaatctattcttcaagtatgatgatttagaggatgagttcccatacctttcttacctttcttcctttgggtgaagagtacccattgatgcttgtgtcttttaatgagttgaacatactttcttgtagattttcataaatatgctcaagagatatgttattagtaacacaagcactagtttccctttgagtaatcattttgataaggaatggaaaatagattactaaagcatggaaattttataataagaattaggttatcccatgatgtatgcttaattttgcttacaaaaacaagcataaataattcttttaagattatgggaataaatctaattcataacatggagagtgataaatatagaagaatcatatccaacttaagcaagaggcaaaacgacataaatcattggattgatttttcctttgatgttagattacgcatctccaaagagaaacttattctctacatgtgagactacttaggttattagataaaaacattagtctcacgatttctagatataaagagagattccctttataaatgtcctaaggaattgaattccttacgtgacaccttattcttttaagaacatggaataactctctatatctagaacatggcaataatatgatgattagtgagaaagcatgccatgaggaacttacaacaatttaaagcatgtagattgctatggtatagaaatgatgaatatgcaatctaccatatgagaggaatttcttcaaagaatggtgacataatttaaaaacattttaagtgctttctttttttctaagtgactacacaagacacataagaaatgataatttatgatacttagaagcataattgttaccatcctttgactttcctccatgttgtaggtcttgacttttcggcataggattaattctttatttcctacaacattaatatcttcccgagatgatatgagtttagatataataatttgaaataaccttgggtcaatcttggatatgtagatcattgtagatt

SEQ ID NO: 46919 - DNA, 791 bp, Zea Mays
cccaaaagtcctttgtgctagcgcttgataaactcgttacctttctagcacaagttgcaattttgggttgcctagttacatgtgaaataattgacaagctagaagtggggttgttgccaatgggacaatccttgcattgatgtcccttttttggcatatgtagcaaaggtgttttcaagttttgaggatttcttatttccctttttgcttgctacatggttagtgaatattttcttttctaacattatgcctttttatttcaaatggggacaagatttaataaagtgtcccttctttgaacatttaaaacaaactttatcatccttgttaataatcaagccctttttaatatagggacatgatctaatcaagtgcctcttttcaaagcattcactacacttcttatttctatttgtatgaagtgtgatttgattattaccttggatgttaccttttatggaggcatggttgaggcttttggaagaggtattgattttcttcttttgcgtcgtcctcttagcaatcctcaagtccttgacattttcttcaagggatttagtgcatgccacggttgttcccgtctcaagcttcttcaccatgtgctcacggttatcttgagaaggttgagcaatgcattttccttttagttgggtcaagctcatttttagcctctcattttcttctttgagcttttgatgtgtatcatcgtttgctccagcagattctagctcaaaggaagatttgcttgtcgacggacaacaagcattagcacatggtaatgtagtttcaat

SEQ ID NO: 46920 - DNA, 401 bp, Zea Mays
gtttttgcaaataaaactcaatttcctatctctaagtcaaattcacttgttgaggcatagagaaaggtattccaagagaaattgatcacagattcaaaaactccccctatttcccataatcaaacattgtccccacaagagaccaacttttgacaaaaagcgacaataagagtattttgacaaatcaaaagttctaactctactttttcaaaatactcaagtggtagctgatccatttcttgctttggccttattttctccccctttggcatcaagcaccaaaacgggatcaatcttggccctttaaccccattgccttaccaaaatcgtcaagtaagaacaaaaggcattaagagacatggagatgaacttggagtaagttaccctctcatcggagtgca

SEQ ID NO: 46921 - DNA, 768 bp, Zea Mays
cgtcttgtttgttgcggaacacccacttggttcccataatgttttgcttgggatgtggcaccagtgtccaaacttcatttctcttgaaattgtttagctcctcctgcatggccattacccagtccggatctagcaaggcctcttctaccctgaaaggctcaatagaagagacaaaagagtaatgctcacaaaaattaactaatctagagcgagtacttactcccttgctaatatcacccaatatctggtcgactggatgattcctttgaatcgtcgctcggacttgagttggaggggcttgaggtgcttcttcctccataacatgatcatcttgtgctcccccttgatcacacgcctcttcttgatgaacctgttcatcgtcttgagttgggggttgcaccattgttgatgaagaaggttgatcttgctccttttgttcctgtggtcacacatctccaattgccatggtgtgtatggcggccgttggaacatcttcttcatctacatcatcaagatcaacaacttgctctcttggagagccattagtctcatcaaatacaacgtcgctagagacttcaaccaaacccgatgatttgttgaagaccctatacgcctttgtatttgagtcataacctaacaaaaacccttctacagcttcgggagcaaacttagaatttctactcttcttcactagaatataacatttgctcccaaatacacgaaagtaagacacactgggtttgttaccggttagtagttcgtatgaag

SEQ ID NO: 46922 - DNA, 412 bp, Zea Mays
gtgcttgattccttcctcctcaagatactcttctacttgaagattcttgaactccgacccgttgtcgcttcttatcttctttaccttgagctcaaactcattttgatctctccttaggaagcgcttgagggtcccttgggtttctgttttatcctgcaaaaagaatatccaagtgaagcgggaaaagtcatcaactataacaagaccatacttacttcctcctatgcttagataggcgacgggttcgaagaggtccatatgaagcaactctaaaggtcttgatgttgtcatcacatttttggtatgatgagagcttcccacctgtttacctgcttgacaagctgcacaaggtctatcttttttgaaggttacatttgttagacctatcacatgttctccctttagaagtttg

SEQ ID NO: 46923 - DNA, 1606 bp, Zea Mays
gaccattcaacgcctcatcgacgtatcttgcctctttgatcatcatccgcccgcttacgaactttccaagtatttcttcgggcgacatcttggtgtacctaggattttcacgaatattgtttacaagatgtggatcaaggacaatgaaagaccttagcattaggcggacgacatcgtggtccgtccatcgcgtgcttccatagctccttattttgttgacgagggtcttgagcctattgtatgtttgggttggctcctctcccctgatcattgcgaatctcccaagttcgccctccaccaactccagcttggtgagcatagtgacgtcatttccctcatgagagatcctgagggtgtcccaaatctgcttggcgttgtccaagccgctcaccttatggtattcatccctgcacaatgacgctaaaagaatagtagtagcttgtgcatttttatgaatttgttcattaatgaacatgggactatccgtactatcaaagtgcattccattttctactatctcccatatacttggatggagagagaacaagtggctacgcattttgtgactccaaaatccgtagtcctctccatcaaagtgagggggtttaccgaggggaatggaaagcaaatgagcattggaactttgcggaatacgagaataatcaaaggaaaagtttgaattaaccgtcttgtttttctcgtagtcgttgtcgtcgtcgtccttttgggaagaagaagactcgtcgctatcgtcgtagtagacgatcttcttgatgcgcctcttcttatttccatctttcttcttttgactcgagtcggagtcatttactttgtcgtcccttggctcgttgaagatggactccttctcattgtcgttgaccaccatcccctttcccttaggatccatctcttcgggcgattagtccctttcttgaagagaacggctctgataccaattgagagcacctagaggggggtgaataggtgatcttgtaaaaacttgaaacttaatgccacaaaacttgattaggagttagcacaataaagccaaatggctagagaggagttcttgcaaaacacaataaccacaagatgatcaacacagataggcacagtgggttatcccgtggttcggccaagtccaacacttgcctactccacgttgtggcgtcccaacggatgagggttgcactcaacccctctcaagcggtccaaagacccacttgaataccactgtgttttgctttgtttcactatatcccgcttgcgaggaatctccacaacttggagcctctcgcccttacaatttgatgttcactaagaagcacggaagtaaggatgggatgagcaacgcacacaagacacaaaatcagagcacaaacacgcacacaagtcacaactcaagctcacaacacaacccaaagagttctctactcaaatggagctctagttgctatcacaaagaatcaaatgcgcgcaattggagtcttggtgcttaggaatgcttagagaatgcttgatgtactcctccatgcgcctaggggtcccttttatagccccaaggcagctaggagccgttgagagcattccaggaaggcaattcttg

SEQ ID NO: 46924 - DNA, 364 bp, Zea Mays
gttgacttggttcccgagagcggtgacttcgccgtagctgactcaccggacactctccggtgcaccaccggacagtccggtgatttatagccgtacgccgccgtcaagacccgagagcagcaagttgatcagacgccagcctggcgcaccggacactgtccggtgcacccagactaagcagagtcttggctgctcgagccaagtcttttccaattgctttttctcttattctaacacttagacaaatatgttagtacaaaaaaccaatgtactaagtctagaatcatacctttgtattgatttgcactttgtccaccctttggtatagattaacacatgaccacttgtgttggcactcaatcac

SEQ ID NO: 46925 - DNA, 980 bp, Zea Mays
ctttgatgtatccagcggtcaaagaggcgacccgccgtgcaagaggcgtgcaaccgtcccacggctgtgcgcctcctcagctccgccacaactggcagtccaactcaggtgaccaggcccacacgtcatgtaaccagcacgccggttaccgtgtgcaaagaaacctgttgggggccttcgtcttccgaaggtcctcaaaaacatgatttaacaatgtttctggagtataattcatgaacagatatcttcagacttggaccttcggacttgggtgaagaagcacaaagaatacgaaggatgatgcagagacgaagctgcgtagagcttcggcgtgataatagaaaagggaaccgacttaaaggggaaaaggttatttagacccctatggattatcacagagttattagcaaatgcaaagggcatgaatgtaattttacatgggctgcgtcccgtgcctataaatagatgaacagtgctccggtactgttcacgctgacttggcattttacttttgcgtcacgcttgtacttttaccttctttcaagccgaaggtacatttgtaatttgttatcatttctatttttccataataataaaataaaaacgagttaataataatgtttaaatgtttatatcatatttaataccttatatgaatccttcttcattatttgttgtgctgattgtaacgccctgaatttgggggtagaatttttttcttcttgtctctcaccaaattcaggcgttacccttttcttttctcgttccctcgctaaaccttgatcttttccaaagttatagcgggattcggcttggaattcccgtgtaaagaaaaaccccaaagtactttatgttgtttgatgcaccatgccgaactatgcattctttgattgcttagagatgtaagtgcattcatctagaaagatcggatttcgaaaaggagaaaaaccttttctttctttttctttttctttttcttt

SEQ ID NO: 46926 - DNA, 735 bp, Zea Mays
catgcattagacgagctgagtagggctcgtgctgagatcgccctgctgtgggctgagcgcgcggaacgtcgtcacttggatggtggttcccccgcttccgtcgggactcagcacccgtaccgctcacctcagcgtggacaccagtcttatggcaatcccggctgcaagaccaagataactctagaaccatagatcgttagagttggatcttgtaattaatacaaaaaatatacatagaagcttcagtcttagcgttagactcggtcttagttagtcttagttagacagggtagtttgctatatcctatgcatttatgtttgtcatgatgaactatgtttggtttggatctttgtaatgactgtcaccagagtgtgggtatcccctgcattttggtttacctgttatatgttaatggagttagttatatggttgggaaaccttttattccactctcctctttatctgagaagctgtgtggtctgtgttggagatcagtgaagatgctcatctgttcagtgctgttgaaggattctattctctttccttatgctgcaagatttgccagatcagttctgatgtgtggttgcattctgcagatgtcagagaacaggcgcagaggaggaaggcgtgctcagcaggagcgaaccgctcaacaggatgaggttccccagcagcagcacctgccgcccccgcccctgatgtccatcgagcagatgtttctgatgcagactcag

SEQ ID NO: 46927 - DNA, 535 bp, Zea Mays
cacgttcaggtttaacgggtcccgcggggagcgaggatgaggaatgcttcccggtccatatccccgtttacctaccgggggaagattttcctccgtttagatttccttgaggaagaaactttctcatccacatcctctaaggactattttggaaggcacaaaaccggagatgattgtaggggctagaatacacttcttatttaaaattgaataagaagaggattagctctaatagaggaattccctacgagaaatcgggatcggcgctcattgccatctctaagtgaatctcagctactcaagcactccaacgaagatgacaaacaatacagtccatctgatggcggagctgtacaccacatccacgagccaaatgtcgagtcaacaatacatgaggatagtaatgcacaactcttcgttctgcccaaatatatagctccaagtcatgacatcgagcaaacaacaaaagtaagatgtatcttttatatctttttacttgaggctatatcattgttacttgctcgataaacttcgg

SEQ ID NO: 46928 - DNA, 952 bp, Zea Mays
cttaaggcacattgcaagaaaccaacaagactagaaaggccggtcaatggaggagaattgggagcattatacatgaggttcatggagttaggttttgttctttgctgtataatatagtctagacaaaaaaattattggtcaattttgattatccaacagatatcccacacgtgtgagataatatcctaatttataccggtccgacttcggatcaaatacgggttgatccacgggttaaaaaatatatttagagctagtttgagaacccatttttccataaaatttgtaattttctaaaagaaaataaactaatttctcttggaaaaataaaaaatctttggaaaaatatacctcccaaactggccattatatccggcttcctgcggtcgaatattatcatcctcctcccgccacgcggccaccactcaacgccaccctccctgttctgtggccatcgtcctcctcgcgttcccctccatggccctaccttctctgattctgtcgaccagataagcacaagactgctacttcaactattgattccccgccttgacgctgcactcttgcctgcactgcctcgccaacctctctgcaaacgcttcgacggatacgagtacagagagttcaactgtgcacagtgatcaaaaaggtattttcgcggaaaaaggatccgatccgttataaacctgcgtgtagtgtagtgtagtgagtgattcacgatcacgagtaggagtaggagcacctgtcgtctaagttggtagcatcatcaggttattcagctcggattcgttgttcgtaaacaatcgtagccgatgaaggcgtgcaagcgacaccgccgatatatatatatggtagagataagattcccaatctcccaggatgaacagacgggcagcaatccaagaagcagcagcccacatcatctctgatggtacgcaacggagtatctgtc

SEQ ID NO: 46929 - DNA, 432 bp, Zea Mays
ctgggccggaagagaggggggagcgggcgcgcgcgagctgggctgggattcggcccagccgagggaggggagagggtttttccttttccttttcttattctattcctttttctttttcttttctacatttgtgtctttttgtttcttttttttcctatcaaaatttctctaaatgaacttggtggtaaatatggtctatgtgaggtgcttcaaatcattttaagtgcatgcaaaagatggggtgacctcggggtagggttaagggagaagaataaaatgaaggaggggggaaattaggggggttagggtttcaaacctgggttgggattttgggatgttacaaccatgcagcacctcgagccctcgtggggaacgccttccgataaggtttctactggccgaccgcggtggcagacaccactaggattgtat

SEQ ID NO: 46930 - DNA, 254 bp, Zea Mays
cttaagagcagttacttgtgctctttttatgggtatggttaacaaatagtaaagtgggacattgatatgatgctcaccagcaactgctcttttggctttgcatttccaaattggcaacacaagtatcttctagaaccataacagaaacctccactcttaaggagttgaaatttatgtcggtctaggctctttccctggtcattataatcttggggattacatccaaagaatttccataggacaagtgcaagaat

SEQ ID NO: 46931 - DNA, 968 bp, Zea Mays
gtcaggttgttcatccgtttcttccatgcgaaatgaacagacttggttcgggaatacatggataaaataagagagcgaatgaacaaactcctgcatctcagcagctgggaaagtcaatctccattttgagagctaaccagctgttttccaacactaaaaagctccaaggcttcacctttacaaaaaggacgtaaagggaacttgtatgtttgaagtcaccatcaaagtcaaggaaaagagaccacacatgaaaagggtatggccttttgatccaacagagataatagatgttgcttgatcacttgacaaacaacatagaaattgtttcaagggaaatatttacggagatcacacatcagtgtagttccacaatggatcacgaccagagacctcggtaaccgcatgcgccaagcagcataaccttgcgtgtactttcacaaggggctctcagtttcgcaacgacaccacaaatcattaatcgtgacaccattaccgaacagcaccaataatgaatctcacgtggtaacaaatagactgagccaggatgataatatacaaaagagactccacctataagaatggttacaggtagagagccaaataggtcctggcccgatgaaggaacacgggattgccaaaacctaaattggttgatgagggagtacgatgggagactcttaattcagcgccaaacatatttctatgcccatcgccgagattacaaagtcaaggattaatgtctgattaggttcagaggaaaaatgatcggaagattaaattggtatgccttcaagagatatgaggaacccaaagacatccagttcaagaaaatgattggacatggctttcctgagttaggttgataaaataacgagatggtccccaaaagatatagagtggaatagaaacatcaacttgcaccaagggaccaaaggcatgattttggagggaaaatgactacaaaagag

SEQ ID NO: 46932 - DNA, 484 bp, Zea Mays
acaattttcgccaacataatgtggcaatagcgttctatatcggtggcatatctacgttctctctcgatatgttgctagtcgtcagctacacatacgagttcgaagttagtgtacctgcagaaaatttcatcacagcccagttcccaatgatgcaattcacacatgacagtttatcacagtttatactccatatatttctatatggaggccagctcctcattaagcgccgagccacgcataggcgccgctgccacactttaaccatagggcagctcattatggtaactcaccttcttacctgagcgtaggtgcgtcgttgcaaatacattacacttctcagtattcccatgtctgtatacccatagacatccatggggtactgaatcccggaaaagtaattactccacatcgcagccttcatatatacatatgtgtaacatgtatataatcaagcgccacaattaagcactcccctagaccgacg

SEQ ID NO: 46933 - DNA, 222 bp, Zea Mays
caatttggcctattaaggttagcataggaacacccaaaaacgcacagtaggaggcacactggaatcctcccaggcactggccataaattcctcctgcaagcgactcctatcattcttgtgtggttcctctccacccacgcgtgatggcgattcctctccttccatgtgtcattccttcctcacactccattccttgtctcatgcgcatcttcatcctctcca

SEQ ID NO: 46934 - DNA, 216 bp, Zea Mays
aaaaggcaggaaagatagtatctataatgctcagttctttatttgactacatgctttatcaagcactaaaatgaagagaatgagtaaaaagtcatcattttgccaaataaaaaactctgaggtcccagagaaacatcaagcaaaatctcccagtcccacaacacagaggcctactggttccagtccatcccaaaggtgcccatgccaagatccaaa

SEQ ID NO: 46935 - DNA, 292 bp, Zea Mays
ctcccagttgttcatttttttatgccatagcccaagtgacagataatttgaaaaagatgagataattatacacaaaataaaacatatttgctaagactgtaaaaccacatgactcagactggaaggatacccgagtggctgagtctttccaagctcttcacccaactctgcactcagaggttgttcaccatcataaagttcttttaatttaaccaatcgttgataacaggtttggcaaaaaaacattttagccattaatagcagcatcattttttcaaatgcttaaaacgac

SEQ ID NO: 46936 - DNA, 682 bp, Zea Mays
ggcacatttctttcgtgcaaagacagaaccactcaaatttgatcacaaagacataagcaaacattttaaatttctgcaagtattacaacgttttaatccttagtaagacataatacaggttgcaaacaccaaacgcgatatagtattcagtccccagtagtgttgcagataattaatgcaagaataagttgggtagttgcaagggttattccttgtgctacgtattcaatgtggtataggtatgcacaatgatgactcaagtataggaaaagttgtgtattttcctagaagattgaggtgcacaaggaaagatttgagcgaaccacttaccagaaaatcaataataatttgtcttagtttgtttctagccgaataaacaattattgcaaaaaggtgtatagatgccagaacatacaaaaaatgctagaaaactggttatgtgcacttggaatggaagttacttgagcatgtgcgcttggttaattgtttcgtttcaccatcagagtggggaaatgtacagatgtgacagaaatatgaaagtaattaactaaccttttgggatccaccaacatataaagttgcatgatttaacttcaaaataaccaggttagttacccaatcagatctttcttctgtacaaatatatccatatgaaaaagaatatataagcacccatctttcc

SEQ ID NO: 46937 - DNA, 315 bp, Zea Mays
gtaaacttatagccgacttcgacataagagagggacaaataaagtcttacattaatagtgaagagttaaccactatacaaatagactaaatggcaggctacatgaatccttacacaaccagattagctttattattaaacttgcttaagtttaatgatatctagtggggctccactcttcaattcttaaccccacccctaccccacatcacttgatttcttatgaagttattcttggtctaaacatttaaacggattaaacaatggcctaacatttagctatttattcaggccaaaagaaatcatgacctttaag

SEQ ID NO: 46938 - DNA, 1139 bp, Zea Mays
ttgtactaagttttatgcccactagcaggtggctacactccagatcatgtctagtacatttcttcttcttcgatgaaggcaagtgaatgtagcggtggttgcttccattctgacctgttatttctatcgcctacactctaatattcagaagtatcagattctttcataattggactctgtggtgatgctttacttgcttgcattatactgatgctcaatcatatattgatgatgattatgatttgagtatgactcatgagattaattcacacccctgaaggtaaatgaagtattatttgaggttggtattgtatctgaaggtaaatgaagtattatttgaggtttgtgttgtatctgaaggaagtgaagtttattgataaatgtagcatgccatatacattgcatgactcatttgcatatgaagttttgtcgtgacctatggtccgaccgtaccggtacaacttagcatcgtacgttgcccgagaaggggtacgatgcggcttcatacccttagaggtatgaaggcagaggacatatgcattgcattcatatgcattcattgaagtgatatttgcagatgatgtggttttatacccccagaggtatgaagatagagtacctacacattgcattcatatgcatacattgaagtgatatttgcaggtattgttgacgcagggaagtgttatagaacctattgtggttgttcgaggaaatgagatggtattggttatagtgggactactgagttctatatctacaagcatttctgatttttaattgtgactcttttaaaatgttgatgaattcaatttgtggtttaaatatctcgtcagaacaattagcttgctgagatgtttcatctcactcttgcattactcaatgcaggtgcttgttgctcatcaaggggagtgggaagtagcagcacacccaccttcattctcataataatgctgcccagacgcaaccatgatttaattagaaacttcttgtcaaaggatgtttgtttttaactagtcgtgcgcactgattaattcagttcatgttgttatggttgtcttcccattgctagcagattattaatgtcttatatgttttcttatcatgatatctatttatactttgttgcttcccccatt

SEQ ID NO: 46939 - DNA, 268 bp, Zea Mays
gtaagtttgaacaaagttttactttgcttttaggacaatggactaagtagcctgtgaggtaggttatgttgtttgttcacggacgagttggtctgtcattcttaatttagtgcagagtgcaataatttaaaatatgttttataggggtagagtctcatttattttaccactattaactggttaagggatgaccttaggttagctcacttaaggttagacttcgttaggttagattaatccatcacattagatcggatctaggttagat

SEQ ID NO: 46940 - DNA, 218 bp, Zea Mays
ctagatacttctaccccataaccagttagatagctccatcacttgatcagcagacactggagtagactcctcttcagaatctccttcttggcactctacatgaaatgtatgcccatgaatgcttatactcacgttatgaaagtgcaacgtgtaaagaagacaatattaagcacttcccactacaccttcccacaaggtgcacaaaaagattaacaaaa

SEQ ID NO: 46941 - DNA, 453 bp, Zea Mays
caaagcttcaaaccacttgcagtgctaaaataagattgtgcattcaaaagttgctccatgtctctgaataacttttatttggtagggtcaaattgtgtgaaatgatcagcattttgctacctcctgaaggctacatcaggagatgtggtttggcatgctactattttcaccaaaatctgttcgcactatttctaggactgaatgacttgattgatggttcatattattagacttaactaaacagcttgctgtaaccgatgtccgacataaactgcaacttgaactttccacgatttctcatcataatttttccacgattcattatccaagcgagaagggagctggatgatccagagaatccacttatcggtgcttttcctggtacaactaaattgtcaccctaatctttcagaattatcaccttgctttcctcagtatctaactgtccgctct

SEQ ID NO: 46942 - DNA, 303 bp, Zea Mays
tcgtcttccgcggctccaacccgcactacgcgcacctcctcctgcaccacgcccagcaggtaataaatacagcgatgtgatggtccgtgtttttgttgttgttgttgctatggttcgtgaaaatcactcgaaaaaaaatgcggtggacttgcggtaataccggtacgtacgcgtccgccacgcctaccgaactttggaccgtcacgaccgcctgcagctgcaggcaggctgctagctgctctagtcaagatgtgccggacatggacagcttcttcttggcaggggcgtttggaaggtgtgttc

SEQ ID NO: 46943 - DNA, 907 bp, Zea Mays
cttctcttccctgtgtgccgctcgccccagctcctcccagccatggcgcgcttccatctcttcctcgcgtcttctaccctggtgccgcgtgagcacgcctctggctcccttcgaactcgcccaagtgctctactcggtcccctgtccatctccctgtgctcggattctccctcctgttacttctccctctacgcgtgagctcgcccctgcgtgcttcgctcgtcccatggcgctcgggtcgcggcgcccctgctcggttttctccatggcgcccggccagggttcccagccgtcgcgccctccgctgtccttcctatcttcccagccggcgctttccatctccagtccaagctccttctttttccttcccatggccacacgcccctggttttccctgcgcacagccgtggccctgctctgctcgtcgggcgcgcaggtccctaccggtgctcagctccagctcagattggtccatgccacgcgtgcgcgtctccctctgtgcatctctctgctagctcgcgctcagcggagctcgatccctgctgcgcgctgagtcctatgccgctccctccctgctcgttcctctctcaagctcgtggtcaccttgctcgtgccccgctcttgctctagcctggcccgtgccttccctgtcctctgcacgcgtgcagttcaccccaactctcgtccgtagtggtcgccagtcgtcgaccatgctcggattccatctcgccaacacctgctcctagtcgacgcttgctcggattcgcgtccctgtgcctagcctgctcgtcgtggacacgggtcgctgcccatgtcgagctcccgtgccgaatccttttttagctcgcccgtgacgcccgacgtcctgcctgctttgctcgcgcggctttctgctcgccagcatgcc

SEQ ID NO: 46944 - DNA, 950 bp, Zea Mays
gacactaaatcaccaaaatacttagaaatggccctagggcacatttccctttcaatctccccctttttggtgatttatgccaacacaacataaaacaagtagaacaagtacaaaatcaattcaaataagaactcaaattgttttgattcaaatttgacatatatggatcactttttgccaccacttggtttgtttttgtaaatcaaactcaaatttctatctctaagtcaaacacacatgttaagacataaagagagtcattccaagagaaattgattcaagatttcaaaaactcccctttttcccataatcaatacttctccccacaagaagccaactttttacaagagagacactaaaagagttttgataaaccaaaagctctattctactattttcaaaatttctcaagtggtagctgatccaccctttttcccataatcaatacttctccccacaagaagccaacttttgacaagagagacactaaaagagttttgataaaccaaaagctctattctactattttcaaaatctctcaagtggtagctgatccatttatcgctttggcctttattttctccccctttggcatcaagcaccaaaacgggatcaatcttggccctttaaccccattgcctcaccaaaatcttcaaataagaacacaaaggcaataagagtacatgagatgaacttggaataagttactctctcatcggagtgcagtggaagtctttcatggtccaagtccaccttttccctttcaaacctcctttgagactaaatcaagcaaactcaagcaaacggttagtctcaaagggtcaagttgtagcacagctccccctaaatatgtgcatcacatgcaaaaaggacttgtgaggtccagggagtgtttgtacaacttgagcaccacaagtaaacaacaaaatgcataaggaacatgatcaaag

SEQ ID NO: 46945 - DNA, 305 bp, Zea Mays
ccaacacccagtccggatctagcaaggcctcttctaccctgaaaggctcaatagaagaaacaaaggagtaatgctcacaaaaattaactaatctcgagcgagtagttactcccttgctaatatcacccaatatttggtcgacgggatgatccctttgaatcgttgctcgaacttgggttggaggtgcctgaggtgcttcttcctcttcaatttgagcatcatgtgctcccccttgatcatgcgcctccacttgaggtacctgttcgtcatcttgggttgggggatgcaccatagttgaggaagac

SEQ ID NO: 46946 - DNA, 2055 bp, Zea Mays
cacatttccctttcattaaacacaactataagtcgggttagcgttagaaatataaacgagtccgagagagggggcgtaaaacaaatcgtgagcgaataaagagcgagacacgataatttgtttttgagagcacctagaggggggtgaataggtgatcctgtaaaacttaacaccacaaacttgattgagagttagaacaatgaaatcaagtgagtagagaggagatctcttgtgaagcacaatagacacaataaagacaagcacaagagacacgaggatttgtctcgtggttcggccaagtacaaaacttgcctactccacgttgtggcgtcccaacggacgagagttgcactcaactcctctcaagtgatccgatgatcaacttgaataccacggtgttcttctttactttactctttttcccgtttgcgaggaatctccacaacttggagtctctcgcccttacaataagaatctcaatgaagcacaaaagtaagggagggaagcaacacactcaaatccacagcaaatacgcacacacaagatcaagacttgagctcaagacaatatctcgaggttctcactagaacagagctcaaatcactaagaatgtcgaacaagtgtgcaagaatgaagtgtgggtgatcaacaatgctcaaggaatgcttggtgtccttctccatgcgcctaggggtcccttttatagccccaaggcagctaggagccgttgagagcatttcaagaaggcaattcttgccttctgtcgcctggcgcaccggacagtccggtgcaccaccggacactgtccgatgcggatttctttccttctttggcgaagccgatcgatgcagattcctagccattggcgcaccggacagtccggtgcccccttctgaccgttggctatgccacgcgtcgcgcgcggattctacggccgaccgttggcccggccgactgttggcttcaccggacagtccggtgcaccaccagacagtccggtgatttatagccgtaagccgttgttgaagtcccgagaacagctagttcgcagatgccagcctggcgcaccgtacactgtccggtgcaccaccggacagtccggtgcacctagactgagcagactttggctgaacaaagtcatctcttttccaacttgatttcttctgtttccagcacttagacacaatacattagtctccaaaataatgaagtaagtcttagaaacatacctttttacttgatttgcactttgtccaccactttgcctagattaacataagtccacttgtgttggcactcattcaccaaaatacttagaaatggcccaagggcacatttccctttcaatctccccctttttggtgatttatgccaacacaacaaaatgcaactaaaggaagtgcaacatcaatacaaatgagaactcaaaattgttttgattcaaatttggcatatatggatcattctttaccaccacttggtttgtttttgcaaatcaatctcaatttcctatctctaggtcaaacacacttgttgaaacataaagagagatattccaagagaaattgatcaaagattcaaaaactccccctttttcccataatcaagctttctccccataagagatcaatgtttcgacaataagagacaaacaagagtattttgacaaacaaaaactctaactctactattttcaaaattctcaagtggtagctgatccatttcttgctttagccttattttctccccctttggcatcaagcaccaaaacgggatcaatttaggccctttaaccccattgtctcaccaaaatcttcaactaagagaaaaaagacaataagagtacatagatgaacttggagtgagttactctctcatcggagtgcagtggaagtcttgcatggtccaagtccaccttttccctttcaatccacctttgagactaaattaagaaaactcaagcacatggttagtctcaaagggcaagttgtaacacaactccccctaaatatgtgcatcacttgcaaatggacttatgaggtccggggagtgctt

SEQ ID NO: 46947 - DNA, 635 bp, Zea Mays
cgtcgattcaccactgacaactcctgttccattgagtttgacccctctggtttttatgtgaaggatctggccaccaggacccttctcgcccgctgtgacagctcggggccactctacacgctccagccctccaccgctggcgtgtctccacctcctgccctggtctccaccacctcctccaccacatggcatcgacgtctcggccatcctggacccgacgtcatgaccaagattaccagcagtctagatctttcatgtagtaggggacattttgagggtctctgtcatgcttgtcagttaggccgacatactcgtctcccatttactacttcttctcgggctgagcaggcttttgacctggttcattgtgatctttggacctcccctgtactcagtctttctggctataaatattatttggtgattttggatgatttttcccattttctctggaccttcccgcttcggttgaagtcggacacattcaccaccctcacacacttcttcacctgggtatccactcaatttcgtcgcccggtccgtgctctgcagtgtgacaatggccgcgagtttgataaccacgcctctcgctccttcttcctcactcatggcgtccagttgcgtctctcgtgccc

SEQ ID NO: 46948 - DNA, 312 bp, Zea Mays
ctcactctattaatatcactcccaacccctgtttagggtatgggttcctattctaacactatcgaccttacatccagcatagtcagagtctgaatatccaatcaagtcaaaagtagacccctttggataccagatcccgaagcaaggtgtagcgactaaatatctaagaattcgcttcacggccactaagtgacactcccttggatcagattgaaatctagcacacatgcatacgctaagcataatatccggtctactagcacataaataaagtaaagaccctatcatagaccggtatgccttttgatcaat

SEQ ID NO: 46949 - DNA, 429 bp, Zea Mays
gcctcttctaccctgaaaggctcaatagaagagacaaaggagcaatgctcacaaaaattaactaatctagaacgagtagttactcccttgcttatgtcacccaatatttggtcgacgggatgattcctttgaattgtcgctcgaacttgggttgaaggtgccggttgtgcttcttcctctatcacatgaacatcttgtgctcccccttgatcacatgcctccttttgatgaacctgttcatcgtcttgagttgggggatgcaccattgttgaggaagaaggttgatcttgctccctttgttccagtggcctcacatctccaatcgccatggtgcgcattgtagccgttggaacgtcttcttcatctacatcatcaagatcaacaacttgctctcttggggagccattagtctcatcaaatacaacgtcg

SEQ ID NO: 46950 - DNA, 968 bp, Zea Mays
aaaagatcctcttgcttttctaataaactatttttatcattcaaggcatcaattaattcgttaatcttatcaaccttagttctatctaggcccttaaataaacatgaatagtctatttcatcatcgctagattcttcatcacttgaggaagcgtaagtacaagtatcacgagtgcttaccttcttttcccttgccatgaggcaggtgtgatgctcgttggggaagaggggcgatttgttgaaggcggtggcggcgagtccttcattgtcggagtcggatgatgaacaatccgagtcccactcctttccaaggtgtgcctcgcccttagccttcttgtacgccttcttcttttcgctcttgttcccttgttcctggtcactatcattatcgggacagttagcgataaaatgaccaatcttaccacatttgaagcatgagcgcttccccttcgtcttggtcttgtttggatgctccttgcgaccccttagtgccgtcttgaatcgcttgatgatgagggccatttcttcatcattaagcccggccgcctcaatttgtgtcaccttgctaggtagcgcctccttgcttctcgttgccttgagagcaatggtttgaggctcttggattgggccattcaacgcatcgtcaacgtatcttgcctccttaatcatcatccgcccgcttacgaattttccaaggatctcctcgggcgtcatcttggtgtacctaggattctcacgaatattgttcacaagatgtggatcaaggacagtaaacgaccttagcattaggcggacgacgtcgtggtccgtccatcacatgcttccatagctccttattttgttgacgagggtcttgagccggttgtacgtttgggttggctccttgcccctgatcattgcgaatctcccaagtttgccctccaccaactccatcttggtgagcatggtgacgtcgttcccctcatgtga

SEQ ID NO: 46951 - DNA, 264 bp, Zea Mays
gtcatcttttggatcattgacgaaggactccttctccttatcgttgaccaccatccccttgcccttaggatccatctcttcgggcgattagtccctttcttgaagagaacggctctgataccaattgagagcacctagaggggggtgaataggtgatcctgtaaaacttaatatttaacaccacaaacttgattgagagttagaacgatgaaatcaagtgagtagagaggagatctcttgtgaagcacaatagacacaataaag

SEQ ID NO: 46952 - DNA, 72 bp, Zea Mays
tttgcaagaaccgaacctcgataaaacaaatcatcgcgtctcactcttcatttgcttgtgatttgttttagc

SEQ ID NO: 46953 - DNA, 1435 bp, Zea Mays
agcgccttcccccctccatctcctcaataacagtaggtaatggcactagtatacctgttatgtctagaggtcattccgtccctcctacacctacaacaaattttgctcttaataatatccttgtcgccccatccatagtccgcaacctgttatccgttcgtcaattcactcgcgacaacaattgttcctttgaatttgacgcccatggtttctctattaaggatctcaggacggaacgcatgattctccgttgtaactgcgacgggggcctatacaccatgcctgcctccacacctggcgctccacctcatgctctcctggttgcatcgtcaactctctggcatcaacgtctcggtcaccccgcccccgctgttttagagcgtctcaataaacttcatgttatttcctgtaataaagtacaacactccttatgtcactcatgtcaactaggcaagcatatgtgtctaccttttagctcttcgcattccataactcatgcaccctttgaactcgttcactgtgatgtatggacttcacccatcaatagtctgtctggtttttcatattacttggtctgtttggatgattacactcactactgatgggtttttccgctccgaaaaaaatctgatgtccaccaacacttagtcgagcttgctgcctctgcccaaacacaattcagcctccccgtcaaatgctttcaggctgataacggcactgaatttgttagcactgccaccatcaaattcctcgctgctcaaggcactcaccttcgcctctcctgcccctgcacatctccccaaaatggcaaggctgaacgtatcatccgcacactcaataattccattcgcatcatgcttctacatgcctccctaccacccacatattgggccgagggactcctgacagcctgctacctccataataggcacccatcctcctctattcagcatgaaattccctatactcgtctgcataatcaaccaccaacttatagccatctgcgtgtttttgggtctctctgttaccccaacatgcaagcaacctctaaacataagctcgcccctcgctccacagcatgcatcttcctaggatatcctagctcacacaaaggttaccgctgtctcgacctatcaacccgtcgcatcatcatctctcgccatgtcacattcgacgagaccacctttccctttggagccacctcagacgtctcgtcctctgcttccctagaattcctcctcgacgacgatatggtttcggtgccctgtcctactgttgttgcaggtgggactccatcctcgacgctcgtggttgctccatcccactcggatgttgagcagctgcccccagacgttgcagcctcacacgactcgccttctgcgacaccgggcgagcatggtcccgtgcccccgcctggacccggcgtggttccctt

SEQ ID NO: 46954 - DNA, 353 bp, Zea Mays
tagagattggcttggtaactatgacatgaggcgaaaccccttttttatggactagattgtttcggaggttgggcaaatgttggggtggggcaaggataaagcttgttggtgaaaagaatcaaagttgtctcgcgtgtggtgtgttgaggcttggcaacgacagtgcaccgtggtcttcctccttctgtgtcgggttttgggtgtaggtgtcgtcgagttcctttggtcatgagtggcccatcttgcggagtcagagttgcttgttccttgtgttgagctcggtaacgatgactctatatgagctttgtgtggggggctaccgttgtctagattatttgtgcactttgtgtagg

SEQ ID NO: 46955 - DNA, 1118 bp, Zea Mays
cgcactctcaatatgttatacaaaaggtctttcagtcttgagctctgaatactgtccgacaaaccacgttcgcatccgcatcatatccaactattcattgttccgtaagcagaccaatacctactaatttattcggtggccattagagttctgtgaaggactaaaggctatagctcctcctcctctcgggcagtttcagcgtgcaacgctactagagcagcagaactccaccgctgaaggcatccgctcgctgtagtctgctttaaagcaagtgtggtgtgcatgcgttagtggaaccaagaaaggcaagtactgattctgagctgctcttcttctctcttattccctagagctagagagcatatgtatttttttaaaaaaaacatataatgaatgaaatgaatgaatgatctgtgttgattaatgcaaacgttgtactcctgtttgtgccagaaaggcaggcaggcaccaacacccccacctgaaaaaagcacatgtcaaccaggtagccatccaggcatccacccacccaaaaagaagaactgaagaagtagccaccatagtccataggattctttcatgatatcttgttggtacatgagcatagattccggcgatagagcaggcgggcggggcagcaaagggagcgagcagagagagagagagagagagagatgaaaagactgaatagactacggtggcggccgtgctgtgtttttattccatccaaacatatcggctgtgtgtgtagcgttcctgcagctggaaatcatccaggctctgttctgtgggggctgtgccactgggcactggccatgccaggaaggagggatcgctgcagtgtgcagttctgctctcccattctgcagacagaaggtgccaagcagaggcagaggctagctatacgtttggcaccagaactgatcagaccacctccgaaattcagcatggtactggagtactggactatacgctacgtccttgctagcttatggtgtagtggtattatgttcctgcgacttgcagacccaagggtggctacagcctacagtgcaacgctttgcagtctctagctaggctctacaactacaaaacgagggcaccggagtggttggcct

SEQ ID NO: 46956 - DNA, 1138 bp, Zea Mays
ccaccattgacgatcccacgacccactgtggatcaggagaggtcgttggtgcctcctgttaagaaaccaatttgggccccgaaggcccatgtggcttatctagccgaaactctaactttgcactatatatagagaagagaacactacattttgttgtaaccagtgaatataatacatgaataataatatcagcccctctcatatctttgtgtctcctgtatttatgagttaaggagcctttggactacactcggtagcaaatggttcttaacacgttatcagcacgaatgctcttgtgatataggagtttacaaaggtaagaatctagtcacactgcaacgtgcagagatatggccataggcccatccgatcatgctgaaggtgcatagcaggcatgtatttttttctcgtttctttgttcttgattccaagtttgcaacatgcaaggcagcagccgcccctccactaagtgccgctcgagcacaggcgagcacgcgggcacaacggccatggcaccgccacacaggcgagcgagcaggtcgcgctgtcgtacgcaggcgcgtgagcacgggcccagccgctactactgcaggcgaaaccaggcatcgccgctccggcaagtgggcgcgcagccgtcgcagcaccacctctacggcacgagggcgtcgcgccgccgttgctccaaaggcgtgctgacgagcagacgcagccctgtcgtgaccgagcacaggccatcgttgttgcatacgaagctcatgctgtcgctgcgcaggccagctcccgtgcgctgccgccgtcccgcggcaagcgcgcaagccaagccactgcgccgcgagcacgaacacaggttgagccacctccgccgctgcaagtgaacatgtaggcgcggctgattcagcggtcagcgtgctgactgccaccgccgccactacatgggcacgcaagcctgcaggcaccgaccaccaccggcgacacgacctcgaagatacgcaggctggcgcgggcaccaccgctccgaaggctggctggcgcgctagcagccgccgcagcctcggaggtaggtaggcacgaccgccaccacctcaagtttgcacgaaccgaaaataggaaggaaaggggaaaaaaaggtaaaaggatg

SEQ ID NO: 46957 - DNA, 207 bp, Zea Mays
ttttattttcatataatgtcggtgtttcggaccagcgaggaccgtcaaccgaccagtaaatttgtcgctgcgtgtccctgcccagatgtgttgatgcaagatggaacacaagagggacgatgaggcttatgttatcttgcatcggggtgctcgtagtaggggttacaagcgtcgcgcacgagagagagggtccggccctgaggtgag

SEQ ID NO: 46958 - DNA, 200 bp, Zea Mays
cttgagcattaaatattgaaattaaaattcatttaaaattagaatctaaaaaaaagaaaatagagaaataataaaaagaaaaaaaaagagaaaataaaagggccgatgtctcacctcgtagtgagcctaggatcactcatgcccatctcccctccaacacaaccagcccacgtctctccctatgcacatttttttattcc

SEQ ID NO: 46959 - DNA, 451 bp, Zea Mays
tagttaagccagcagctggcttggcagcagcatgaagttcttcacttgcgttagattccctgctgctgtgctgcacagatctttagctgaatggttgctccaggaagggcggcatcttcccgtagtgctagtcctccacgtgtttgctgcttcttctccagaaaacggagccagaagacgtcgcggccgagcacgccccgcctggtttgaggccgccgcctcgttcccgcccgactgacacagccgccgcctcgttcccaccacgaccgctgcgccagcttgttcttgttcccgccgccactcacgacgtgccacggccgtgcagcacgggcgcccgcagcagcgtcgccatcgcatcgagcttctaggattaaccgagaacaggcgacagcgagaggtggctggaaggagcggccgagcggcggtggacgggcctggagctggactgggc

SEQ ID NO: 46960 - DNA, 997 bp, Zea Mays
tgagggtacccctaattatggtccccgacaactaccttactcgaaaggggcaagggcagtaggggagttgcgtatagggaggttcttgggtcgatcatgctgcgatggcttttcggatgagggattcctatattgcccttcctagaaactatagcatgtttttttaagctagtggaactttgtaaaggcctcatagtgaatccctagccattcacctcggaagtgtctaagggtctagctaaccctggcaagatgggatacacgacttgtgggtaaatggcgcaacctctacatagtgtaaaatcagtatattagtcgtgctcgcggtcatgagcagctcaggactcttgcatgattaattgatggaactaaacttaatttgtcatttgtattgcatcgtgggtgttgttattaatttgattatttacttatttgggttggtatctacttatacttagtaattgttaataaaattttgaccaactttaaaaacaatgctcagctttaaccatcttttttgtaagccttacacttcacatgatctcccacctttggtgagttcatgcacattattccccacaacttcttgagcattgaacgtatgtgagctcacccttgttgtactcacatcccccaggtcaagaacaggtaccactagatgaggcgcatgaaggatgctgtgatgagttcgtgagtggtctaggccgtcatttccagtcaactatggttgatgtatcgttgtctgcatatgatgtaattatttagctattttgtatagaactcctattatatagtaaagatgtgacattcatttctgtaccatgagtcatcatatgtgtgagacttgatcctagcacacttggtgattatttcgtgcccgggttttgcacccctagaaccccggtgtgacagaagtggtatcagaggaatgttgactgacttgtgtgtatggtcctcaaaggaaacaatgaaaaatcatgttcctagatgagctcag

SEQ ID NO: 46961 - DNA, 1432 bp, Zea Mays
cttgcgtaataatggagacaatatgtggttcatgaagtcctggaatgtggctggggctcctgtaagtccaaatggcatgaccttgtactcataatgaccattatgtgtttgaaaggcagttttatattcttccccttcttgtatccgaatctgatgataaccagccctgtggtccaacttagtaaatattgtagctccacctagctcatctgtgatctcatcaaaaacaggcataggaaacctgttttttacagtgtaggcattgagcctcctgtaatcaacacataacctccactctccatctttcttcttgaccaagagtactggtgaagcaaagggacttgaactctgttgtatgatgccagactccaacatttcctgaatttgtctttctatctcattcttctggtgtggagtatatctgtagggtcgtaaccggaaagctgttgctccaggtaataggggaatagagtgatcaaatggcctctttggtggcagtccctgaggtgtagaaaacaattcctgatacttctctatcactgctgcaatttccggaggtatttgcaccggaacaacttccttgttggattctgtgacagttctgagctccaacacatgctccacagcttcttgtctgattagtccagttaattggatactagacagaagagtacatgactgtaatttgggtctcaccccttgcagctgaactaccttaccttgatattcaaactccatccacttatccatccagtgtatggacatggggttaaatttttccagccagtccattcctaacacaatgtcataaccggccagtggtaaaaatttaaaatcagcgtagaaattgatgccattacataaccagggacaatcaggtacccaatattcactccacaaggtattaccatcagccaccttcacctgaagcggatgtggcagtttctgaaccccttttactacctcaataaagtggttactcatgaaactacccgagcttccagaatcaaccaacaccaacatctggcatccctgaatataagcccacaatttgatggtcttgttatgctcaccaccatgtactgctgcttcagaaatagctaacacctcctcctcaacaaccttttctggagaatcatctgtttcctcggacttttcatcttcttcaccatgagacacaacagcccacatttcctccactacatgcagtggtacactgttagaacaactgtggctaggattccattttccccacatttgaaacaaaggccccttgcccttctataattcttcaaggctgtaagcttttggtcacccacccgactgttgcctactagtggtttacgtcgatcgtcagggatcactgggtttcgacctgttaacagggaacttgactgtccagccataggaggcattctcatgggagccttag

SEQ ID NO: 46962 - DNA, 307 bp, Zea Mays
caactgacgacctggccccatgcgtcggcgctaagcttagcctaggctggcgcagagagaagccaagtgggccaaaatggagcagaaacggcccaggcgcacgatttctctttttcctttttctttttattttatttttttcttgttttattttcttttctttattcccaaatttcactttaaattcagatttaaattcaattcttgtgccaaattatcctcaaattatattgtgaaattaaaaatacctattttagaaatataactatatatatatttatttattttcataacctttctctttttc

SEQ ID NO: 46963 - DNA, 494 bp, Zea Mays
taaattccgcaccatatgccaagtgcattcataaataagtatctcaaaacaacttcattcgtgatcttatatgatccgataaaatcatcatatctttaaggtaagccatacgcatgtatgataatatcatccatcaaaggaataaaggttgaccaaacaaatatgcttggtctaacgtgcatgtgagtcatattatgtgattcgatgtctactgttcaaataattagataaaggttgtatgctgagttattaaaacttagtgatatggcatggctttaacaatagcaagactcaagaatatgcatgaattaaaatacatgcatatcatggttcggcagagagttgaccaagctagcaataaagggatatttgttagctcgtcaacaaggaaatcatgtcgtatctgacgtacgcatgcaaccatccacgactacatgaggcaaagatttttttgttttcttttgtagtttgtaatagtcagccatatgatgtaa

SEQ ID NO: 46964 - DNA, 224 bp, Zea Mays
ctttgtttgatcacaagcacctcacttagattttattttccaacgcctagattatccactaaatgttttgttcaaaaaaaagaaacaaaatggaaatgagttattaaaaataaaaagaaaaagaaaaaaagctctccttccccctgctgggccgagtctggcccatgtcgcggccgcctcctccctcccccgcgcccgcgcattcccccccttcggcccattag

SEQ ID NO: 46965 - DNA, 317 bp, Zea Mays
acaagttctggtcgcagagtccaaggatgaactggccggccgccgggcggctccatacatgtctggtcccaagcagcagcagcatccaaagtctcatctaaaagctaaaggggacagggagctccatcaatagagctggaattcgatggctgttttggagcactgtctctagctggctttaattgggagaggactttggcatatgatgtgatggcgacaagtgattagaaaagctagcgtagcataaaaagcaagcaaagacatgttcacatgcatatggccatgcaactaacaagaattctctcacaaagcccccc

SEQ ID NO: 46966 - DNA, 338 bp, Zea Mays
ctcccacccacgtactactccacaagtatggggggccgaggcttggctccacgaatcgccaataataatgggcaaaggactgcgtgcgcacaggagtagcagtgccgcctgagagattgctgggatcatagagacagtacgtgctccaccaccagtaccagaccatcattgcttcgagatctattgatgactgctctctctgtatatatatatggcttgtttgttacgtatggatacaacggaaacaaccaaggaacggtttttttttatagttttacgaagctgaacccacttcattgtattctgaatcccgaagaactatataaagttgctcgtca

SEQ ID NO: 46967 - DNA, 341 bp, Zea Mays
caaaagtatctaagttgattcttgctaaagcattttccttgattcctacttaaccagcatatccttgagagtcttttctttagtcgggtaagtcttgctgagtaattccatactcagggttttatcccctgttgtttttcaggtcatagttttctgctgctgatgatggtgttacgtgccggtgggctcgaccttcttattagtctaagtagcccttctatacttcttactgaggatggtcacttgagctagcatatatttcaaacttatacttttgtaatcactccgataaaataatgtaaaatttttgtaacctgtaaaatttggtaataagatttccg

SEQ ID NO: 46968 - DNA, 64 bp, Zea Mays
tggtgcaatctatgctcaggtaaagaagaaggtgtcgaggcagatctccaggagttccaggacg

SEQ ID NO: 46969 - DNA, 367 bp, Zea Mays
cgagatttgggtcaaatctcaacgatccctgtgacatttctgtcatcaggtgcctacgcgaggtggaagacaccggatatcgggcccacccgccagaataacagggacgcgggagcttagtgggctgtgaagaggaaatcgacccaagtttgaggtatggtccctttttgtttttttttgttatttttgttttccattttttttgtaatcagattcaatttcaccaacttcaaatctatttaaatgtacaaacacaaaatccagtgtgtatgaaaagtattattttattaatttattaatttgttattatttaaacaaatacttttttgttgaatatgcacaaagaaaggaagaccaaatgatcacc

SEQ ID NO: 46970 - DNA, 441 bp, Zea Mays
cattgcatcgcaggtgatgttattacttttgttctactacttaattgggttggtatttacttatacttagtaattgctaataaaattttgaccaactttaaaagcaatgctcagctctaaccatcctctttggtaagccttacacttcacgtgagctcccacctttggcgagttcatgcagattattccccacaacttgttgagcgatgaacgaatgtgagctcactcttgctgtctcacaccccccacacatgtcaagaacaggtaccataggatgaggcacatggaggatgctgtgatgagttcgtgagtggtcttggtcgtcgtctcccagtcaactttgggttgctggaccattgtctccttataatgtatttatttatttattttgtacaagaacttttgttatgtagtaaagatgtgacattcgatcatgtgcca

SEQ ID NO: 46971 - DNA, 419 bp, Zea Mays
ctagagggtaataaagaatacatctagaatacacctacaagctatcatcacaagctacaagtcactagggagccaatccttttaagacttcacccaaacacctcaaacttaataagcaacttcatcccatcactaagacactagatgccctaattacccaaggatgaaatcctctcttctattttgagcaacaattagtttgctatgcaaacattgcccaaacagctcaaactttacccaagagctaatatgcccaagataagcttacataaattttcctacaatttttagtgctctatttttaaacactcctagcacacaatctaaatcctttcttctccaatcatcacgcataaacacgggataaggatgatggcgctaaccatagccgaccacaatcacacaagaaccaattcttt

SEQ ID NO: 46972 - DNA, 223 bp, Zea Mays
ctccactgtacacattgttagcaaaaccagcacttccttcccctcatccacaccatacactgcctttggatgaagtatagagctgtttgatgtagaagtcatacttcacaagcttaatatacatgatgggtacatgtctatttgccggacttgtaagggtgggcgctacagtaaccttacatgctatttggcagcttgactactgcttctagctagctgtaag

SEQ ID NO: 46973 - DNA, 461 bp, Zea Mays
aaacaaaaaactcggccaactcgtagtgtcatcctctcgatgagagtaagagtcttgttgcttacaacatgcacacccaacaacacaaagatggtcataggagtggttccaaagagagcaaaatgggttgtcggtgcatgagtcaccgtagtaggaaggcaattaaggaggtaggtgttggtgtggaggctctcagccaagtagtgagcaggaacaaatggctgaaatagcagggaatgcatggcgtgattagtggtgcgaatcatgcactcaaccgtgccattctgagaagtgtagggtaggacatccggagctagactccatgggaggaaaaggaccgagaggagctatcaaactcacgatcattgtcacactgaacgaccttgatggtgtaagcaacgagactcttactctcatcgagaggatgacactatgagttggggtgattttgcttattttct

SEQ ID NO: 46974 - DNA, 233 bp, Zea Mays
ttttgagaaatcgattcagcggctgcgaaccaaattggcttgccattgccatggaagcaatgaactgcatgggccatgggtgacgactgacgaggcaggcgagaaaataaacttaacacacactactgagtactgactactatacttatttcagtttattagtaccatctgccattgcatgcaatgaaacgtaaaaaaaaaggggttcaaagttttaaggcaacgtgaagtat

SEQ ID NO: 46975 - DNA, 714 bp, Zea Mays
ccgcgtgcacggaacttcggctaggggcacgcagcaatccagggagccggccaaagggatggaagccgcggcgcagaaaggaaagcgcgacacagggagatctgaccggagctggagcaaggggaaggagacgcgcgagcgcgagcaccatgggagcagagagctcggccaggagagaggaaacaaaggctagctgaccgagcgtcgtcttctgcggcgaacagcagggagaacgacggcgccaccataggagcacgagcagcagcagggagtagaggtggccggcgccagggctcacggccaggaggaccgctccttggagccgagcagcaagccgagagggaggggctgggatgttggagaggagagcttgggcacgtgggggatgaacgccggctgggaacttggaggaaggagcacgactggatacttgaagaccccaggggcggctgggcggcgcgcggatgacgacggcggaatcttcaccggcggtgagcggcgtgataaggccagacggctaatgacggtggaaaaaaaatcagggcagcggctagatctttttccatttttttcttctttctttccttttttgataacggaaatcgcagatctttctggatcgagatttttagcgatgtggacggaccgacatgccacacgaatacatatgacatgcttcgaatttagcgaaccaatctaatcgctaattaccta

SEQ ID NO: 46976 - DNA, 233 bp, Zea Mays
gtcatgtcaaaaaaatcgtgtatgattgcaacaatattggcaaaatattgttgtactttatattttgatatactgtgaacaaaacaagtgccctctgagaccatcatgatttatgcattttcaaactaaattttacgacacttcttgttgtgttttatgtttccattaaaaaacagtcttactgcgttttacgccaaatttatgacactttttgatgtgttttacagcaatct

SEQ ID NO: 46977 - DNA, 605 bp, Zea Mays
tgttgacagcctgctagctaggttaggttagttagtttattcagttcttggcagcagctagctagctttccttgcttcctccttactatagcttagcttttctggtggagagtacatggagacagctcgtcaaacccccaatttttttttctcaagcgtattttgctccccttcatccggccattcatttcattcatcccctcctctccctcgccatgcatcatgtgtaagatcctcatcagactccctttttttcctacatgcgcgagccttgttctagagttccatcattcacgattctctctatctccctctctcttgttttgttcgttgttcaattcgtcgatcgattgtatcgagaaggaaatggtacgtacgcgcagcaggttccctgcactggccatttggatcttccagagaattaggatatactggatacatatatatagcctattgctgcgccttctcaattgctttgttgtgcctttgaatttcctctggcatccgtccgtctttgtccaaaagaacaagtctttgaaaccctctgtgggtcggctcgtggctacgacgctacgtacgtttgatttgatttcctgtctgcctct

SEQ ID NO: 46978 - DNA, 236 bp, Zea Mays
ctcctatttaaaacatttaacattaggtgaaacgagtaaggctatctctggtagctatctctcatccactaccaaacttcactccgtaaacaaaataatatacaatatgattcatgtattttacacaatctattacagacaaccttatatttccagtagcttaccaattcatatttctatattcaaacttcactctgcaaacaatacaaatattcagatacggattcatgtttttt

SEQ ID NO: 46979 - DNA, 504 bp, Zea Mays
  misc_feature (1)..(2): n is a, c, g, or t
nngtggttgtagggctcaggacaggctcacctcatcagcgccagccaaggaggagacggatggagggagacacagatgaggcaaggcggtcagagcttgggagcagcccagcagatcaacaaatgcagggtgcgggggcggggagcgcgaaaagcagcagcggcagaggaagcacggcattgtccacgagattcttgcaggcagcgaccaagcacgacagcagcagctgcaggggccagggaggggaggggaggggagcgggagacgggggtaggtctgcgcgcgcggcggagagcatgaattcaagcgagaagagctaggtgggaggcccggacggttggcgtaatggcagacaagaaaggccgagcggaccggacggagcactgcgccattgccactgcgtagctttgcatcgggaggtgtgtgtgctgtggtgtgatgtgatgagtgaaaacatggagcccggcaagccgagctagtaggagtagtagacgtctgccgggc

SEQ ID NO: 46980 - DNA, 424 bp, Zea Mays
atcgctcctttgttgaatccaacacttggtctttttattggctagatgtgaactttttgcacctgtataacttatacactagagcaaactagtcagtccaatatttgtgttgggcaattcaatcaccaaaattatttaggaactaggtgtaagcctaattccctttcagtattctagggacttaggaaacgatcctaagcaccagtaatttccaacaatggtatcagagggttttgaagcatggatctgattattcaagcttttctgtgatgttattttggtcctgaggccctatggatgcgagaacagtgctctgcgcacttgatctgatttctatacatgttttctgatcacaaatttgaacccaaaaacgatattggaccttcggacagagcgtgcggttctgggattatttcggttagag

SEQ ID NO: 46981 - DNA, 484 bp, Zea Mays
aggtcataaaccctaaccctaattagttgtgagagctctctggtttgaggccgagacacactgtgtctttttacagtggccagacctaaaatcttagggttagggaaaaccctccaaatctcgattcccattacatattattcatttcttacaagcatacatctcgtgaagtggggatcgaataaaaaaaaagggagaaaatcatgacagagatggcccatgcagccaagtgcatacagaaatgtccatgcggcaagtagaaacgaataaaaaaaacagaaagcaaatagagagtgggcggctgtgtggctctgtgcagggcgcagtcggccagagccagccgctggtgcttcctggcggacgaacgaaagtgagcggcagaaaaaaaaggaagagggaggtgcggtcggcagtgccacagctcccaggcggctgagacagaaggaagccgccggccagagttttcggctgagagagtagaaag

SEQ ID NO: 46982 - DNA, 360 bp, Zea Mays
ctgggaatgtaccacgacgccacgacgcgatcccgacgcggttgccggccctccacgcggcgcggctcatgcttaaatcaccgcagctttccactgacgtgctcgtcgtcggagcttaactttaatttccaagaaaacatgccacagtacccggagctcgttctcgatgacctgccagccgctcctcctcctccccccgccggaatggtcaccacggcgagggacgcctacttcctctgggagctgcgcaagtacgtgctgctgcaggccacgctcgcggccagcgtcacctactcggcggggctgagcccgccgggcggggtctggcctgacaacaacgacagcaccagcagcgccaac

SEQ ID NO: 46983 - DNA, 1762 bp, Zea Mays
tgagaattaggcgtcttgagggtacccctaattatggtccccgacaacttggcttgtcttccgcatcacgcgagcaattatcgtacccaattgagatgcactatgcacatgaatgcatataaacaagaatagcacaaatctaaatagtgctatacgatagcgtattaaacacctagtggcgaggcgttgtacaattttgtacggaaacactagttattaatatatgactacactcaataattacgcttctctagataaaccgaacctaacgcgaacatcacaaaacaacaaattatacacctttaatacaattagcctaaccacaacttatcagttaattaattgaattctaaacttatccctcgttttatgaattattctacatcgctcacaaaaaaactattttaattttattttactactcacatgtttttcatgtcaacaattactcaaacatttctttatcacacatgcctactaatattctacttggtacattaattcagctaattaaccaaaatagcgaaataactcgctataactgaacctggctcgataatcgcaagaactgcgaagtcgacgagagtttcgtgacttacgcaatttatcgagcaccctaatgagcctcgcactaacatattaatttattcaactatcgaactatactgaataatttatcagcttaccgtttccacagccaacatgaatccacgatatcggtagcgattttccgattgagacaatttgtcgagcgcttgaggaatattgcgccgctagcttcgtcttcacccgattcttgggatttcttggggatgcacgaacgacgacgaccttcgattgaagtctggggtaagctggtgaggtggagatcgagccggggatgacgtgtttgacgactcgacggcaaacgacgagatcgacgacacgattgggaattaaagccgagcgagccgagaggacacgctggcgagcagaaaaccgcgcgagcaccggatagggaaaacgacgatgctgtcgcacacagtgcgaaggcgaacgacgcaacgacgaggacctaagatgtgcgacacacgacacgcagtcagcctgtcgcgcgaccgagcgacgacgacaacagccgagtgcggtaaggggctggaaaacgacgacgggccaaacagaggacggaccaaacagaggagctcgcgtaggacaaactcggcacgacggccatggacgaggtgagcgagcttagcacgacagaggactcggcgcgcggcaggaaaagggctcgagcacgaacacggcaggcgagcagaggggctgggcagagggatcttctttgaccagagccgagcgacgcagtccaagctgaggcaggggcgagctccatggcgagctcgagggagatgaagaaagggggcgattgggcagggagatgcgcacgcggtgatgggaacagggagcgcgctgagccgggtccaagcaccagggagctgctcgcggccggagctgagcagagggacacgcgccagagctaggagctgagcgtcggccacagagaaatacagggggcgcgcgacgaacttgagaaaggctggagaacgagctgggaaggtgggcgcgctggaagagtagaagccagggagaatcgacggcggccgcagagaccaaaggcgcacgcgatttttatcccgcgatggctgaaaaaatcaacagggcggcgggattctcttccacgagcttgagcggtgcaggggataagccccacgacagcggatag

SEQ ID NO: 46984 - DNA, 309 bp, Zea Mays
cggtcagcacgcctacatacgcattaatctttaaccaacctgggtagaacatcacctgttcctcacccaagtctcaatttaagtatttccatccttaggattgtgtctgttccttaggatgaaagagcatcacagggaactttgcagtaagatcccactattgctccacatgaaaatatccttgcaggtagaagccatcctctctcgggttagactgaggacaacctctatccacaagatctaagcaaggctaagcatttttgtaaattataattttgatacttcacagaagtatctataaaggtatgg

SEQ ID NO: 46985 - DNA, 1275 bp, Zea Mays
gtgcctactaatattctacttggtacattaattcagctaattaaccaaaatagcgaaataactcgctataactgaacctggctcgataatcgcaagaactgcgaagtcgacgagagtttcgtgacttacgcaatttatcgagcaccctaatgagcctcgcactaacatattaatttattcaactatcgaactatactgaataatttatcagcttaccgtttccacagccaacatgaatccacgagatcggtagcgattttccgattgagacaatttatcgagcgcttgaggaatattgcgccgctagcttcgtcttcacccgattcttgggatttcttggggatgcacgaacgacgacgaccttcgattgaagtctggggtaagctggtgaggtggagatcgagccggggatgacgtgtttgacgactcgacggcaaacgacgagatcgacgacacgattgggaattaaaaccgagcgagccgagaggacacgctggcgaacagaaaaccgcgcgagcaccgaatagagaaaacgacgatgctgtcgcacacagtgcgaaggcgaacgacgcaacgacgaggacctaagatgtgcgacacacgacacgcactcagcatgtcgcgcgaccgagcgacgacgacaacagccgagtgcggtaaggggctggaaaacgacgacgggccaaacagaggacggaccaaacagaggagctcgcgtaggacaaactcggcacgacggccatggacgaggtgagcgagcttagcacgacagaggactcggcgcgcggcaggaaaagggctcgagcacgaacacggcaggcgagcagagggggctggggcagaggggatcttctttgaccagagccgagcgacgcagtccaagctgaggcaggggcgagctccatggcgagctcgagggagatgaagaaagggggcgattgggcagggagatgcgcacgcggtgatgggaacagggagcgcgctgagccgggtccaagcaccagggagctgctcgcggccggagctgagcagagggacatgcgccggagctaggagctgagcgtcggccacagagaaatacaggaggcgcgcgacgaacttgagaaaggctggagaacgagctgggaaggtgggcgcgctggaagagtaggagccagggagaatcgacggcggccgcagagaccaaaggcgcacgcgatttttatcccgcgatggctgaaaaaaatcaacagggcggcgggattctcttccacgagcttgagcggtgcaggggat

SEQ ID NO: 46986 - DNA, 248 bp, Zea Mays
agggatatcagcttgcgccaatcgaataagggcatggtctaagatgaaaatatgagtcgagattcttattttaagcttaagtaccctttttgtccaacgaagaaattatctaaacatttatttgtataagtttggatcaaggaggggtaacggaaaaatcaactttggtcatggttcaccaactaagaacatggcctagatttgggtttaggcaaacaagtcactaaccttctatcagtacatcaagc

SEQ ID NO: 46987 - DNA, 112 bp, Zea Mays
cgccgtcaagtcaaacagcggctcctcctcttccctccacttcttccatacgacagcgaaacccaaaaccgatgcagctgaaatacctgcaactgttgaagcaatagtaagt

SEQ ID NO: 46988 - DNA, 468 bp, Zea Mays
ggacaaacaaaacaggaacaaaagctggtactagacgtcggctgaccatttcatcaaacatgtatcatgcgtcgtccagcatttggcacagatcactgttggcggcctagctactcgcacacacggtggacaccacatcgctgcatttgtccacatcgttgcattcgcaagctactccaccaggctgtcatagtgggccttccccggcaacaatggtggcctcccatgttggctcgagcacgctgatgcggatgtcacagccgaggctactacctgcgctgtcgcagcgtcgaagctctgcccccatggccatggcgttgagggctttcatccccgcttgttggtcctcgagctgcaccaccgtggcgtggaagctccgcccccgacagccatagcacggtggtggatgggtaactgtcgtagcactgctggcgacttgtacgaaaatatcgagcacgcacatggata

SEQ ID NO: 46989 - DNA, 51 bp, Zea Mays
cttcaagtaagtcaagtaggtttgtggtacaagttgtgtaatggagttagt

SEQ ID NO: 46990 - DNA, 873 bp, Zea Mays
gtcgccatggccgttgccttctccctgctcgcgttctgcgcgcgtcccttagcccttgcgctcggcgcccagtccctggccgagctcgccctgatgccgcaccctcaagctcccagccgcggtatagcctgcacgcgtcctccctgcccagtcggtctccaatctcccagccgagccgctttttcttcatcttcctgtgcgtcacggagctcggatcgcgtcccgtcttctctgcttgcccctggaagccgcgtcctagccatgtttcctgcgcgcgttctgcttcctgcgcgcagctgcaagctccgctctattgctcggtccctgctgcagttcgcgtccagtttttctgtgcgcgcttagctcgaagctcctctgtgcgccgagctgcgtcgctgcctcagcttgccgcgccgtcgcgttgctgttcgtccggccgcgacctcgctttgctctctgcgtcgctgtttgccgggtcaagccacatgttatcgcgtcctgtttcttgctcaccagtgcgttctctcggctcgctcggctttaatccccaatcacgtcgtcgacctggtcgttcgtcatcgttcgtcgtcacgttgttcgccgtcaagcctcactgtcattcctactgtgcctcgcttccgatgtgttcgattaaatgtcggaccaagaatccaagatatcgctcctcgctgtgaaatcctcacgctcacctttctctattcgatatcgtcgtcaagctgaaggccattgtcgttcaggcaactaccaaatcgagttgtgatgtggtgagctgattcactatttttactcttggttttatgatcgtaaataaagacgctttgtatatgtatacgattaagttagaaataccag

SEQ ID NO: 46991 - DNA, 325 bp, Zea Mays
gtccggtgtggcaccagactgtccggtgccgcatgaagacaagcgtctccaacggtcaactgctcagaaccctaacagttgggtgacgtgacggcgcaccagacaaggaacagtgcctgtccggtggcgcaccggactgtccggtgcgcccatcgctagcagccttcaccaacggctatggaagtggttgggggctataaatacccccaaccacctcattcataaccatccaagcattccaaacatctcattctatacaagagaaaaatactccactccaagacacatcaaatagattgaatccattagggacttgagagagggt

SEQ ID NO: 46992 - DNA, 1218 bp, Zea Mays
ttgcaggaaaaatcacaaacccaagacactttaaaaggattcttgagacaacctcaaaatgagttcggattgaggatcaaaaagattagaagcgataatgggacggagttcaagaactctcaaatcaaaggatttcttgaggaggatggcatcaagcatgagttctctacttgaaagggaaatgtgcccttgggccatttctataagtgttttggtgattagatgcccaacacatactgatttagttctcttgtgctaaatggatgagaagtgcaaatcgaagaaaaaggtatgtatccggccttagtatattgttttgagtactaacatatgcattgaggtgacaggaaacattgccgagaagaaatgatttgaattggagaagagttggctaagtcagccaaaccagcacagtctgtggtgcaccagactgtccggtggtgcactgggcaatgttcggtgccccaggctggcccggcgacgaactggccgctctcgggaatcggtggggcgacgtggctaaaaatcaccggactgtccggtgagtcttcaacgacgaactcgtcgctctcgggaaaaggagagagcaccgcagatataattcaccggactgtccggtgagtcagagccgctcgagccaacggtcggcagagaaatcaatgggcgacatgtggccctagtcaacggtcggttgggcacaccggactgtccggtgtgcaccggactgtgtccagtgcgccaacgggaccaccggcccaacggtcggatgcactagataaggaaggagatcgagcaccagactactacaggacctgtccagtggtgcaccggactgtccggtgcgccactcgacagaaggcaagaattgccttccaagttgatctccaacggctcctagctgccttggggctacaaaagggacccataggcgcatggagcaggactccaagcttgcaagaaacatcctaagatgcctagactctgcaatcacgcaatcggatcatcgttcttgagatttgagcatcgtttgagttgtaaactccctgtgtcgtgtttgtgtgctcacttcttcacttgtgtgcgtgtgtttgctgcgattcgagtcttgtgtgtgttgctttccctctcttactattgtgcttctttgtgatctatattgtaagggcgagaggctccaacttatggagattcctcgcaaacgggagaagaacactaaac

SEQ ID NO: 46993 - DNA, 451 bp, Zea Mays
caaaaaggatcctgaaggaggaagggatcaaacttccagcagtgatattagtgaagacgtgataaaagaagccattgaaaaaaggtcgtcttattttagaaagaactctgagtatgtgtcctcacattctcattatatgtataattattagggatcgcaacgggtatataccctcggtaatatcatttcgtacctgtaaaaaaaactacacattgggttacacatatctgcttgttggtacagagtcttacccatagttgtacccacacgagtaattttacaattcgggtaaccattactcgcaaaaaagtctcaaattctaatataccaatcacttaaaatgtcaaacaaacatacaaaaataagttcaacttcaaatttaacaaatcatatgttacataacttgatagttaaacaaacgatagccagataaggattttctttagctaag

SEQ ID NO: 46994 - DNA, 582 bp, Zea Mays
ctttggatgtgatgaatgttgccaatacaatcgtcgacgaagttgtggataggctactgaatgaggttgccgagaaaatactcaaagaagactagattcttgttctgctaaaaaaatgtaatattatgtatgagtcaaacaacaagcatgtatattaatgtaatatatttctttgtgacacatgaaagttgtgtacataccatttttgagccttcggcgaaaaaacaccttcctttcttttcatgctttgcaaagaaaaaatcaccccttctatgccatatttgttatataatattgttgtcgacgaagattttcttggtatgtaaaattatgactgccgaaggtacactttgtgctttagcacattgttccattcatcaaatattttgaaagaagcatctttccttcttcgcagctttgttgctgatgcgatatgatgtatgatgtaatgcttatgtgatatgatgcgatgatatgatgctgcatgatgtttgtgccgaagacacacacccacatgaaaacacacccagactctgcattcccttaggaacgacttttgagtctcttcaccttttacttatg

SEQ ID NO: 46995 - DNA, 3004 bp, Zea Mays
agagtatctgtaggcttcttcccttctttgccgaaagtcattgtcggctctgatgtgctcatccattttctggagaagcttctccaaagtttgtggcgacttccttgcaaaatattgcgtcgttggtcctagtctgagccccttgatcatggcctcaatgacaatctcattgggcattataggcgcctgggctctcaatcgcaggaaccttcggacatacgcctggaggtactcttcctggtcctgtgtgcactggaacaaagcttgggcagtaaattgctttgtttggaaaccctggaagctagtgaccagcatgtcttttagcttctgccacgacgtaattgtccccgaccgaagagaagaataccatgtttgagccacactcctgactgccatgacgaaggacttcgccatgacggcagtgttgcccccatatgaggatatggttgcttcgtagttcatcaaaaacttattcagatctgaatgcccatcatacatggggagctaaggtggcttataagatagtggccacggggtagcctgcaattctgctgccaagggagaagcttcatcaaaagcaaagttgccatggtgaaaatcaccgtaccattcatcatcattgattgagctgtcttgacgaatctccctgtgttggggtcttcggtcttggtcatcctgagtgaggtgacacatttcttcagcagcttcgtcggtctttttctgaaggtcagcgagccgaagaatcttttcccttttcctttgtacctgttggtggatagcctccaaatccctgatctcctgatctagctcctcctcctcaggtgttggtctagtagccttcctcttctggctcctagcttctcgcagtgtctcctgatttgtgtccagtggttgtagggcagcccctggcactgttgtcttctttggcggcattacgaaagtcgatgcttgccgaaggtggtcgattgagttcaccggaggtgggcgccaatgttggtccttgttctcgattgctatacaacaagaacaaagcaacacatttgttaacaattaaagaccttcgtccttcgaagcattatctcctttgggatataatgatcttcagatgaaggtcatgaaggacataccttcatcatctcgataaacaaatataaataagaatacatgaaatacaaaagaatataaataatgatcatataatagtagtttatttatattcttatttcataaacataaacaagcatccatgatatttatgttactttgttaccttcggcttgtcagaaggtgaaaatgcaagagtgacgcaagagtgattacaatccagcgtgtctcctgatttgtgtccagtggcttcaaaacctatgggagtgcacgctagcagttaacggtggatctaacgaagaaatatagggccaacgatgagaagacatgatgatgtgtggtgggtgttagtgggagcaagaagtcaccttttggaaggagctaagagagacaaaagggtgaattgaagatgggtcccacacataaatggagaaaaaggactacaacaattgcgcagattggtcgtccaacgatccaatgaagcaccatcaaaccataacatgagtgtggaaactatcatagaatacattgccattgcgtaaaagcacaatgcacaacatagtaccattagacagaatgataacactactccatacatgtatagactatagggatcattgggctgatctgacgcctggtgtaattgtccaatctgatgtccgattcgtaggttatcttgtctcctaagccttgtattctatataaaatgcctaaggtatcaatgactcaatgtaatatatccaattacaccaattctattattctatatggatggtctccttggacaaattatggtgttgccacactcatggatggtctccatgagatctgatgttatgatgttgaagggccacgacatgatgacacattccatgtgacactagacatggtgagggcagtggagagtacatgggccgatggcgtatatatcgactaagcgtgagtaagatgtagtagcgccacttgttaagtaggagaacacgagatcaagggcgatggggactaatgccttgatgttctagaccgtgggcacttgcgcatgtaggtgggtgatcatagtaacctcatagtcaacattttggtcctcatgatgattgtcacgatcaaggggtggaagggcacagcatgcacgagcagggcctcttgttcgagattatgctcgcgctggagagcacattagcctcatgcatgcactctatgcagatgcggcagtggtgatcgcaacatcatctttagtggtgcggatggtggcatcgatgcatacctatgcatcaaccaaggctgcgaactccacttcttacttttgggcttcttgagagtcagcttcttgctcaatagcagaggccggtggtggtgagctcaaagtcgaaggaaggcataatagcgacagctactgtaggagtgaaagcggtatatgtcaaagaactaagaaggtgatatataccatattagagaaaatatactacataaattatagttgtattgcattgagatctatggagtgattatatacattgcataggactaacaccttaagatactaggcaatagggtacaattcatatctacgtatatacaacgctaggtagcttggttgacaagagaagaaccctgcccaactatagtaacaaggtccaatcgaaggtccaatagaattgtacaggtaatcctaatgttcctcattccacatggacagaagtgacaattgtacaacccaaaatctacaattttattacttccaaataaaatgaaacccatcagatgaagtttgaactgaatttgaatcttaaaaggtgtagcacaaattggccaactaataaagccatgaaatcaccagctcccttaatatgatcaccaaatcattatggaactgaagattataagtaaaagatagaatttt

SEQ ID NO: 46996 - DNA, 211 bp, Zea Mays
ttccagccgttgtcgacgccaccggtaatagcaatgccaacgcaataaggcgaaagaccactgggaaaacaatatgtctttcaagtctaaccattattttggataggcttgcaagatcgtaacaaactttgaacttctcaagtcttcacacatgaataatgaaagtgtgtaggtgatcctttattatcttgcggtcatcaaaagagaagtc

SEQ ID NO: 46997 - DNA, 269 bp, Zea Mays
gtccactagctaacttagacaaaagatttaagtgatgcttatgaaccaacacatctttccttttgcaagaagcactagtgctattcacaatcaatgaaacatactcaaagaaatcttcaatagatgagcaacattttgagaccacaacaactaccgattgcaattgatgagcaaagcaatgaatataatgagcatgcaggttctcatctcgaattattttttgaagaccattaaattctcctctcatattagaagcaccatcgtaccct

SEQ ID NO: 46998 - DNA, 379 bp, Zea Mays
caaatttgggtttaagacctagtttgcaatttagaatttggagaaagagaaggaaaaatactatacaaaataaaataaaataaatatataaataaataaatccttccataacggtatattcaatttgtacatttaatatgagtgcaagttcacaatcaaatttgaattcaaatttgaaatctaaaaataaaaaggaaaaaagaaaacataataaaagaaaaaaaagaatttgaaacctagctgggccgaggaaaagggatttggcccactaagcgcttccgtgcaggccgccccgtcgcggcgcagtcaaccactgacatttggggctcaactatcagcacccttgaccccgcgcggactagtgtttggtttcacttat

SEQ ID NO: 46999 - DNA, 1128 bp, Zea Mays
gtaaacacacgatatctgctctcgaggaatccacaagagtacggactgcatcctgactagccttagaatttagtcccacacatttcaacacaaaatattggatggattcattaaactgaaacttcaactaccaagcacacccgaaaagaaacctaggctagatcggcctggaggcacaaatcctcaggaggagcccaaccgaactatgccgctaaggtttaaacgtggggccgagagctgatgagaaaacagttgtgcaaatgcatctagagcatgttggtctaaacctctattgtcaacaatgatatccagcgatcgcatcaccctcttgcggattcacgtcgactccttgagaaaggaccggtcaggcctgataccagcaataatttttattttaaagaagatgtttaaagttaaaaaaaaagaataaaagctagaagaacctttttgctgacgattctaatatgctgaaagaactttgtgaagtgttacatggtaaagtagttgtaccctacaatgaggtttgtttaaacagttaagtatatgattgaatatagaagatgtttaaagttaaaaagaagaaaagttggaagaacattttttatggtgattctaatgcgctgaaagaactttaggaagtgttacatggtaaagtagttgtaccttgctacgaggtttgtttaaatagttaagtatatgattgaatataatgttgtgatgctaaggtcataaatacctcatgcgaacatgtggccttagtttttgagctgctatttgttttcaatcaaagaaatgaatgctattaggtaggagtattttgtagaagcacccaatagtgaggtgaatataaccgcaagggttgatttgatgaacagggatctcaagggaatccataattattcctcccttatggatccctgatcactaaatcagccctaatagaaatatatttacgcagtatctttgtcatctgaaaaattaatagatctggaaacctgcaacatataactcaatggaggtaaggattgcatatatggaaaattataattttccttgcacaacaattaaggttcgacagtggacaacgcaactgcaacatgtatagttcatataaaaagaacaagtgag

SEQ ID NO: 47000 - DNA, 934 bp, Zea Mays
gcagggggacatacagctacaacctccaacaatacgaaaaaggagacgtcattaaaataggaacgacaaatgtcgtcgtacaacaaaataatgaagggccgataatttttggtgaatcgtccaacacaaacaaaaaatgaggtacgactgtcaacaaaacaaccgatccaaaatactccatgccccgatggtgcccatcgggattgacacgatcgcaaaagcgaaaattacagcgccttagagcaaaggagaatcaagagaaggaggcggaaaaaatattcaatgacacacatccacagtatccaccaccacaaaagagatggagaccaaaggccgttgaggaaaatcaaacggccacagagacagaaaataaaacaacaactgtgcagctctttgcaggtatgtcagacagtccggctataaagactagaccaaccgtacagggcgcggaccgtccgaccactgaggccgactcatccgcaatacaccatgacacctgcaacgacgtaccaacacccatggaggaagacgacctgcaaggagaagatctggtcgactgtgaagctacgccagaacacttagaaaattcggaaagcaaggtgacgaattggttaggaccagtataacgcttggcggtattgagactaacagttcgatcaaagctaaaggggtcacgtccgttgagtcaaccatcggggctaaggccactgtgtatcatcctagtaagtgtcaagatgcctaaaaaaccgatgtgatcacatcgagttagttgcttttggttcgctcagctccaccaaaaggcaggggggcatatgtttggaaccaaaatgagtggcagacggttcggccctgagggcggacggtccgcggtccggacggtccgcgcaagcgcagaacagattagggttccgtttttttgctatgtttgttggca

SEQ ID NO: 47001 - DNA, 780 bp, Zea Mays
ttatctgctaatgatgggaacgtagatcagcgtgagccagtgtgagattatctaactatggcttcgttcaaaaaaagaagtgatctaattatgtagtcagtcggtcaaactgtactagaggctgctgtttctttttcgataaagaatagcagtcaaccgtacgggtgaaagtaaaatagacgttttctcactccaccgtccagtaccactgcactagcaaggtactattaccctccgaatcaattttttttagttattcttaacttcttaactttctttgatacttatggtacgtttggttcctttagtccagatactaaagtttagtcgagtgactaaggcctcgtttggtttgagggactaaagattagtccctctattttagtccctaaatagccaaacggtaagactaaaacaagaactaaattgctttagcctctagtccctcaagcggtgactaaaagagactaaactagattaaatccacctattaccactcattttatttcactaatggaggaagaatgttaagggacattttagtcttcttacgagtcatttaatatgttctgaataattttagtccctacaaccaaacaggatagagacttaagggtcgtttggtttctttagtccagggactaaagtttagtcactactctgtttggttacatggactaaaagtattcagaacacattaaatgaattataagaggaccaaaatatcccttagcattctcccgccagttgttaactgagataaagaaggcgcaaaaggtg

SEQ ID NO: 47002 - DNA, 1117 bp, Zea Mays
gtcggattcggactaggccaaacttgtgtcggattttgggccgcctagtaaacaagacccaagtaaacatctacagggaaggggaagaagcagcatcagtcttattggctggcttaagccagccgaccaggaactaggtttatatagaagatataactattccatacgttacgttatatagattgtttggttttattttaccctccactgctgtgcatacgatttattttttagttgaattaatatatattcaccatatatatgcatacacctctccagtttcgtccggccgctgacacgtgtgactgtgtaaggttacatccacaacagtactatatagtattttcgacggcctcggttatcacgaccagtcccacacaccagtgaccatctatagctacctctacggacaaatgagaatcttaatctatataaataccagtcatagatcccgtcgggtttgcatacacattagaatcttaatatatggaataccaaagtcaatttgatgatcagcatcctgtgaaaggattttcgtattataaagggaagaatatagttttaaaaagggaagaatttataggatcataaaactttatccttcctagtactttaaatgtctttctttttggtatttgattctaaagtttaatttatagaatcaaaagcaagttcaaccttgagcaatttatgttccatgatagcttaacaaatcacgcaccaaacaaaatgactcaaacgcaaaaaaaagagagtaaatattcttgtttaaaaaaaggatcttgttggaaatactgaaaacaatgtaaggttaattggcccgaacaagccggcatattgcagcctagcacccacgccacgcaccgcggcaatctgacctgtcttcaatggcaatcatggcgggaagcggcggagcaaccttggaaacatcgtccactgttccacaacgttgcagattatccgccgaactcctacgggtattgactcggcggtggggtagtaaagacggcgtcctggccgcgccgtcgacctcgaagtaccgtgtccccgggcggagggtaatacgagccgacgggaggcgccggatagtaaggtagcgcacggtcagtgtgcctgg

SEQ ID NO: 47003 - DNA, 497 bp, Zea Mays
gaaggccctcacggccgcggcaggagatggacttgatggacatgcgccggccgccggcgccggagaccgacgacatggctggctggcttcttagtggcgttggagcggcgcggtggggagggaaatcttgggccggctagacgatggatctggcgcgcgagtgctccgcagatggttttgaggactgatttgaccttgtgttcttcggttcattggatctcggtgcagttaattcgctgatgtctttgtctgtttgatcatggacagaacagaacagaaatggcctcgcgcattgtactcccaaagcttccatcttcaaatctgccttttagatatagataaaatgcatctcatgtgtgatttgtttgctgtcacttgcacgttgcttccacgggggaaaagaagtacgtatgtatctatatctatatctctatctctatacttatactaatctattaagagtataatatggaaacctaatgacaccacgacttcac

SEQ ID NO: 47004 - DNA, 113 bp, Zea Mays
aaatatcaccacataaatcaggtttcatagcacataagtctcactaagtatctcacaagaccaagtataactaacatcaccaacactcacaaatataagtctggatcatcaca

SEQ ID NO: 47005 - DNA, 950 bp, Zea Mays
gtttatttgtgataccataatgggccgaccgagtacacgatatgctggacaccccgccggttagtgccacctcggttgctcgatacagtagaagctagcttaaatattcagctatgataaatgtgaacaaattgatattttagatgtaatatcttaagcatttattacctttgtgtgcacttctgcttatggcaaatgaatttggtaggattcgatgtgtctattagtctgtagaggtaaaaggtggtgtttagggaccaataggtcactacccaccatgaatggcccttgatgctccatttacatagagtgatttgattgaagtggatacaatcagatgtttatagtgttcagtgaagattaagtggccatcgataaaagatatttctctataaagaacaactttgaattatgtgttcattattatttcagaattatgtgtggtaaaaggtatagagaagacaattacccaggtttatctgaaaatttgcttttctatctcttggtgtaggacacatcaagctggcctcttaccttgatgtccttcttcgctgatgccgcctcaccgctaccccatacatctcacctcggagttgtagacccgtctcctccacccctgccggagttgaatcctagccggaccaagccatgttcgccatgcacgcggtaggttggaccagatctgcgagatctgcaccgacactgctatgcctatcacgaggtatagtctcctaggtttggggcggcaccctctgttcgtgctcttttctgttgctttttcattctatttccaatagacttcctcttctcttgtgttgtgcgaggcttaactgttggttctttatctgtgaagagagtacaagcagatgggcgatataaatatgatgccgtgtcgattcttctgcagtttacatgtcttccttgcaggatgacatccgagagaaagcaac

SEQ ID NO: 47006 - DNA, 371 bp, Zea Mays
cgtcctgggcccacttgtcattggctcatggggtcttcttctccactgcagcacgtacacaacagggagcttatggacggagaagagctagtcgaggcgaggttgcagtggggctagccggaaaggggcttcaatttctatgcaacccagccagagaggaggccgccggctgatccttgctgcagggagctcgacctgcctgcccaggatgaggccaatccaggcgccatgcagggtgatctgcagaggggctcgacggcaaggtttgtccatggatgtgctctcacgccgtgggagatcttctgcacaaactggactagagaaacggagggacagagatagtgcgctggggaaggagaggccgatctaag

SEQ ID NO: 47007 - DNA, 329 bp, Zea Mays
agacgttaatgtcgaggtagacccgtcgcacttggatcagaccaacgtcgccgacgatgctctacagcggggacaagggccgcgcgcaggatactttggtcgtcttcgaacgcgctctggtgcataagtgtagcttcgcatcaagggccttccgctacaccgacatcgagaggagaagcaaccgtcaacgtcgacccgagtgcacgtcgtctttggaggctaaccatggggccaggtgggctcgcctgcttccactgatcgtgaacctagagcaattggtgctggcgagtcaacctaggcgagaggatttctcgtcatagctgctgcgc

SEQ ID NO: 47008 - DNA, 444 bp, Zea Mays
aaggatttgtaagaaaacaggtgctgtgctacggtggccgtcgcgcgtccaggtgcagcagaccactagacgaggctgctagctggttgcgccgcgcacactgcctctgtgcctgcctaaccgatctgctatctgccaaacagtgccataaacaagagcggcttcaccaacggcagcacgaaggagatcgacgctcattatccgtctgggaagccgagggaggtgcacactgtggcctgctgcgcgccactcgatgtctggatcgatccaacaaaaaccagaccactgcatgcacagcctgactgcagttcacagagcacagcccgtatgtttgttacccgcatcgtctcgtcttgaaccaccgtatgtgttaactctgtctgtgcttctgtttgactgcctgcacaagggagaagcaggctgcatgagcggatgcaaaacaag

SEQ ID NO: 47009 - DNA, 149 bp, Zea Mays
ggggtgctgtagctgtactgtactgcggcgcccgcactgtacaactggacgctgaaaagaactccgatggactgactgatcactgacactgatggcgttgtattgccgtccaaccgggtccggtggcggcgtggcgccgtgagaaggag

SEQ ID NO: 47010 - DNA, 472 bp, Zea Mays
tttgccctgcggatgggacgagctgcttgcttgcttcgtgtgcacaccggaccactgcgtcggtcagcgtgtccgtgcgtgcgtgcgtgctgcacccttcacgtcggttggggtgtgcaggcggctgccacggcggggcggcaagtgtcggttcctggtgagccgtgagcgtatatatgatggattcatcctcgtcatcgatctgcagtgctcatctatgcgttttttttttttttgaatcatggcttgcaaactacaacagctggattatccattcaatcattactactccggcggccgggtacgtcgttggagcccatggattagcatcccaactcccaagtgctcgatgccgctcttggattcggtgtcgcgtacggggccccacctgccagtctttggtcgcatccagagtccccgtgaagtgcaaaggccaaggccccggcccccgggacgccacgccaccgacagc

SEQ ID NO: 47011 - DNA, 104 bp, Zea Mays
cttctgtgagccgtgccacggaatcgggagctccaagtgggccatttttggtaagcagaactggcgatgcgggatgaaccggaagccgggttacggtgccaaac

SEQ ID NO: 47012 - DNA, 821 bp, Zea Mays
ctcccttgatcacgttagtgaacaacgatgattagttcaacacgttgataacgttgtttgaccatgaatccaaaaaagaatgccaaatccataaatcatacaaggcaagtgcctcaaacatgatggtttaggatctaatgtacctcattgtaaactgccatttctattcaatgggacagttctgccactttttatgcatgaaatctatactttctctataatgccaggaaatcccctctctccttggctaaaagtcgcctaaatcgtcaatagtggtacgatgactatactcctcaccaaaatatgaaataacacctctacaaagatgtttgaggcactctaagactaagctttttcctaatttgatataatcatcaagggaatcaacaatgttattgtaggcgagcatgtagaggtcaacagtgcattttttgattggggagagaccattgctattgaatgaataatttctaagagtgaaatagagggaatgttcacccaagctctctaagatttgaagaaagagactcctccgcatgtgatactttaaacgcaagtagagcgaaggctagacatatgggtcgttgaagtagtttgcatcaactgatcatgggcagcttcacgaccctagttgatgtagctccgatgttgcgtcctacgcctcctccttattaaagacatgcatccatcatagtttgatgtagcatatcccatcttcgatcatctcaacgtctgatctcaatgaaaacatgacgtcaatggtttggtggagtgaaacaagagcgagaggagtgaaatgggaagtggtaggagcggatagg

SEQ ID NO: 47013 - DNA, 249 bp, Zea Mays
catcccccttgcaaaattgcataaatgagggggcaacagtgtataaacatatatcatgacaaaaacatactaagtattattaatcggctagcaaagagaagttaaacatacgacatgtagtgaattaactagtgcgcacgactagttaaaaaaacaaacttcctttgacaataagtttctaattaaatcatggctacgcctgggcagcgttattgtgagagtgaaagtggacgtgctgctactcccctc

SEQ ID NO: 47014 - DNA, 1055 bp, Zea Mays
atggatccaagtttccctaaaagataagatcgaatagcgtaaaattatatgggctacgtagacaggcaggctggcctggtacaagcatcattggttcatacgagtagagtagattatatttgaaccaaatgaagtctaaaaaaaagcctgtacagacacgccgctatttacagtacatcgctaaagacaactgaagatccgtccgtctatagaaccgatggagctcggcgtcggatggtggcaggaggcggtggcggcacagcgggcaggtggcgtggtcgtagtcgatccaagtctcgaggtaggcgcggtggaagaggtgaccgcaggggaggcggtgcaccaccgacctcggctccaaccgcgccaggcacacgcggtagtcccccgccgcccgaccgacggaacctgctccggaaccggtccgccagggtgggccccgtcaccgcctttctgctgtcgccgccgccgctcgtcttcctcctcctgcgcagccccccacgacggtaggcctaggatcagcagtgcggcgcgcagcagccccgccaggatcgcgttgtacagcaagaaccccagcaggctgtcgttgggcgccgacatgctcgagatgcccatcctcgctgtccgccaccgatcccgatctcggttggggtgggattgggaggaggatttggggggccagccccgggagggaccaatgttacaatttgggcggaggaggtaggtcgggtgcgtgagggaaggatagagatagtggtgggattcgggtggaaggagctcggcagtggtggggcggcgcaaccgacgccggtcccacttatgccgtcgtaagcacgccgccgggatttgtgagtttatgacattcatcacagcatcggccttgccacagccgaacactttgtggctgggctccccactgcggcggcgccgccgcgtggcgtgctacatgtgaggcgaccaggagccgccgctcatgcatgctgacatggcgtccggtcccccgcactgcactgcacggcggcacgggtgtcgccgctcgccacagtgcacatgcg

SEQ ID NO: 47015 - DNA, 295 bp, Zea Mays
cttttatccatgtttcaaaattaataaagaatatttcacaactcatttatattgggaaaatactatgtaaatgtgtatccaaacttaaaacatatttcttttttttctaatttttatttttatttttttttcatgcaaatttgtgggctttacaaatcctaccccccttaatagaaatctcgtcctcgagatttgtaagaaaaggtgtataactatgtcatcttagaacatatgcacacacaaaaaattctcagtatgatgcatactttattagcaacacatgggtcaattagac

SEQ ID NO: 47016 - DNA, 366 bp, Zea Mays
gctgtcaggcgtggcgctggcgcgcgcagctgggccgcttgggccagggaggagagggggaaacgcgggcgcgacttgggccagaaacggcccagccaaggcccgagggagggagggttttttctttttctttttttgttttctttttcacatttccattttctatttttttgtttatttttatttccttttcttttgaatcaacaatttgctaaataatttcaagtgtaaagaaaaaatataatctatgtggggtgctctaacaatcaaagtgtatgcatatgacctaggggtgaagtttagggagaaaaatagaaataagggggtttaggaaatcagggttccaaaccttgggttgagattttg

SEQ ID NO: 47017 - DNA, 343 bp, Zea Mays
gtgtttgatgaaactaacggctctcaagtagagcaagttgatcttgatgagataggtaatgaagaggctccatgcatcgcgctaaggaacatgtccattggggatgtgtgtcctaaggaatccgaagagcctccaaatgcacgagatcaaccgtcctcctccatgcaagcatctccaccaactcaaaatgaggatgaggctcaagttgatgaagggcaaaatcaagaagatgagccacctcaagataatggcaatgatcaagggggagatgaaaataatcaagaaaaggaggatgaggaagaaccaagaccgccacacccaagagtccaccaagcaatccaac

SEQ ID NO: 47018 - DNA, 2115 bp, Zea Mays
caagattccaatccgaccctaaggaatcacaccttacgaccgtaaaacgaatcttgagatatttggcttatacacctaagtttgggctttggtatcctcggggatccacatttgatttgattggttattcagatgccgattgggcggggtgcaaaatcaataggaagagcacatcggggacttgccagttcttgggaagatccttggtgtcttgggcttcaaagaagcaaaattccgtcgctctttccaccgccgaagccgagtacattgccgcaggtcattgttgcacgcaattgctttggatgaggcaaaccctgcgggactacggttacaaattaaccaaagtccctttgctatgtgataatgagagtgcaatcaaaatggccgacaatcccgtcgagcatagccgcactaagcacatagccattcggtatcattttcttagggatcaccaacaaaagggggatatcgagatttcttacattaatactaaagatcaattagccgatatctttaccaagccacttgatgaacaatcttttaccagacttaggcatgagctcaatattcttgattctagaaatttcttttgctagcttgcacacatagctcatttgaatacctttgatcatatctcttttatatgctatgactaatgtgttttcaagtctatttcaaaccaagtcataaggtatattgaaagggaattggagtcttcggcgaagacaaaggcttccactccgtaactcatgcttcgccatcactccaagcagctctctattccttggggagaaatgagcatcaaagaaaaggacttcatccttgggggagagagtaaaagctcaaaagcaaaaggaccggacttcatctttggtataatcttaactcattcatttatgaccaaagaggaagaaaaacacttcgagggctctaatgattccgtttttggcgattcatgccaaaaagggggagaaatgagcccaaagcaaaaggaccgcaccaccaccaccaaattcaaaaacttagtgctttccaaaagtatttatcatttggtatcctattgtgttcaaaagggggagaaagtagtatttcaaaaatggtatatcaaaaccctcttgaacactaagaggtggatctcttttagggggagttttgttaagtcaaaggaaaagcatttgaaacagggggagaaaatttcaaatcttaaaaatgctttacaaactcttattcatttacctttgactatttgcaaaagatctttgaaatggatttacaaaaagaatttgcaaaaacaaaacatgtggtgcaaacgtggtccaaaatgctaaataaagaaagaaacattccttgcatatcttgtaagtagttatattggcttaattccaagcaacctttacacttacattatgcaaactagttcaattatgcacttctctatttgctttggtttgtgttggcatcaatcaccaaaaagggggagattgaaagggaattaggcttacacctagttcctagataattttggtgattgaattgcccaacacaaatctttggactaactagtttgcccaagtgtatagattatacaggtgtaaaaggttcacactcagccaataaaaagaccaagttttggattcaataaaggagcaaaggggcaaccgagggcacccctggtctggcgcaccggactgtccggtgtgccaccggacagtgaacagtacctgtccggtgcatcaggggactcagactcaaactcttcactctcgggatttctcggaagccggcgcgctataattcaccggactgtccggtgtgcaccggacatgtccggtgctccaaggaagcgcggtctccggaactcgccagcctcgggttcgcgtggcagccgctccgctaaaattcaccggactgtccggtgtgcaccggactgtccggtgtaccagcggagcaacggctctcttcggcgccaacggctccctgtggtgcatttaatgcgcgcgcagcgcgcgcagacgtcagacttgcccataccggtgcaccggacatcaaatagtacatgtccggtgtgcaccggacacccaggcgggcccacaagtcagaagctccaacggtcag

SEQ ID NO: 47019 - DNA, 284 bp, Zea Mays
cacagtcgaggcctacgtcgatgacatcgtggtcaagacaaggaaggcttccgacctcctctccgaccttgaagtgacattccgatgtctcaaggcgaaaggagtcaagcaaaatcctgagaagtgtgtcttcggggtgccccgaggcatgctcctagggttcatcgtctccgagcgaggcattgaatttgaagccaacccggagaagatcgcggccatcaccagcatggggcccatcaaggacttaaaaggtgtacagagggtcatgggatgcctcgcggccc

SEQ ID NO: 47020 - DNA, 206 bp, Zea Mays
ctcgcacctacgcaaagtttagtcgtcaaggaagggtcgacctagcctcggcaaagcccgaccctccctcgggggctaaaaggggggagaccccctctgcgtcgaatttttcctcgaaaaaggatctctttttagcaggattactttcgtgcttcttgaccacttcggaaagcggatcctggaaacgacggagtacacgtaagcag

SEQ ID NO: 47021 - DNA, 201 bp, Zea Mays
ctcggataaagcgactccgtggaccgaacaagtcttcacgttcggaagctctcctgccgaagcagtccttcaagctttctcgactaagtcggggacatggcctcatgaacgggtgaaagtaagcgtaagtggcaaggccgaccgagccgagggattcccacgcctctgggatacggatacctcactcgtcccttccgcgag

SEQ ID NO: 47022 - DNA, 1073 bp, Zea Mays
ccaaatgttgaagccttctgccgagtacatgagctacattatcagacgaaggccagagaagatgggcttcatgagaattttggctgttacaacttcgcttaccgcaaggatatgaaggccccgatgctaagctatcgcaccaagtggccaactggctggaaaagtgagtggttctatgttaaagctgatgagaagaaaagggagaagctgaagacgttagtactgagcccgctgagtttgagctacgggttgacgaggcccttgtgccgtatgtcgtcggggtcaccatgccaacaggctgtggcagaatttagagttgtaactgagcagatagacactagagatctggtgcaagaattcttagcctatggggtgtttctgttgttgagtgaatggaatatgccgaagctgaaaggagaaaagaaaaagaatgaacttgttcgattaccctatcacttcaagttcaagaaacaattcaaagagccttgccaagagtggctagaaatgattgaggctatgtgcaatgagattttgggcaactatactaaaaaagaagatcaactgatgactgcggccttcggcacccgaccgaagcgaaggctgaatcgagtaatggatgcactaaactttgaataccctgactatgaacgattaagcaagggtgccgaagggtcaaagtgaaaaagggttgtcagtgttatgaacagacaggctgctaggatgataaaagaagatgaaaattttttgaaaaagaaaaagtctagccgtgagccgaaggtgacaacctcgaagaagaggaaaacagcaactctagagccgaagatggctgagatagaagagggagctccttcgacaccttctgctaccgaaatggaagaaattttaaaggtaatgaccgaatccttgcctatcaagctgctaagtcccctggggccagaactgacaaagcttttacagaagaaggacgagccttcggcagcgaagaaggtggttgggcgaaaaaagcaaaggattgttactgttatgcaagcaattgaagaaacaccaccgccggcctcaacgtcaaaaataac

SEQ ID NO: 47023 - DNA, 232 bp, Zea Mays
ctgcatctgaacctggatgtggtgaacctggatgtggtgacggcaaggattacaaaaccggtggaaaccggcggtggacggtaccggtttaccaccgtttttaaaaatttagtttaaattttaaaaaatagaaaaattataaaaaaaataaaaaaatgataaagaactatatattttagtgagtaatttggtatataagatatttaaatttaaatggtttagtctatagaaa

SEQ ID NO: 47024 - DNA, 1011 bp, Zea Mays
ggcacatgcggacggtccgacgaccttggccggatggtccgtgcaggaacacagggacatgtgcgccagtagaccctctagcagagtcacggatggtccggcctgctggcccgaacggtcccccgaccccagaactaagtaattttagattgcgctttaacaaaagactttgacttttgaaaacgaagcactgttagtcctcatgcaaatgcaacactttatgttctatgaggcactaagttttacaccgatcaaattcattgacccctgttaatagtgcgactattttgcctactaatccagtcaatttcttctctaaactcctgatgaccggtaaaaacaaaacctatgttatacctttgccttaacttgatccacaaccaatggttataagtcttcacgactttcctgtttcctgtggtccaatcctgcattcttatttctccaagaattgttagtccacaagcagttgccattaatgaccaaaacaccactaaggggcctagatgattcacaatctctccctttttgtaattgatgacagcactgcatatttcatagaaagtagattttgtttttcaaaccttcattacatactggatataagaaagatttgagatgagttttgattgacttgtcttgatttaaagttcatctgaaatgttgataaatcagcagagaaaactaaacgcattccaaggttctagtttccgacagggattgagagttctcttcctctaaagctgtccacttgaaatgaaagggaacaaccactaaaccagctgcttcacatcttccctttgcttgcatgactggagcttggcaaggtatcgtagatgcacagactcaactcacccaaagagaagtattctcacactagcccgcccttaaccagaagaatgagaagctcgagactaaggaatatcaagggggtcggagggcttatttcacttgtacaagatggatagcaacactgaagaacactagcaagagcattgtagcacaggccgc

SEQ ID NO: 47025 - DNA, 452 bp, Zea Mays
ctcacatcaactatcaactctttatctatgtcaattcttgattgaaagacaagaaggagtaggcgacagtggtgaaagtgtaggaatggatccccctagatgtgtgcatgatatatccaattgaagagttcacacacataatatacacataatatatcagagttttggcgtagatcttcctacaatcatggtcatcgaggtatacaagtataataatatgagacatagacacatcaagagaaataacacctcgattaactattacaagttcacaagatttcgaactaatagaaccttaagaagtcaaacatagttcgaaataacgtagttcatcaactcagcaatataaaacatagacataataaacatgcatatgtaaatgtttaaaagtccacacgtgagctcccctgattgtcatcttcccttctttatctctctcccctttgacatca

SEQ ID NO: 47026 - DNA, 2905 bp, Zea Mays
aacagagatgagaacatcatcaacagtgaaattgcaactaaaacctaaatcacatagttgagctacggatagcaaattgaagtttagagattcaactaaaagtacatttgatatggaatggtcatttgagatagcaattttacccaaacctttaacctttccttttacgattatctccaaatgtgatgctatcataatttgaacaacctttctcagtcgtttgggtgaacattctcataccctcgattatatgtcgagtacaacaactatccaacacccaatgatttcctcccgccttgtaatttgcctacaaggggaccaagatctttggcacccaaatgaatttctttttgctaccaacaattgaagtgccaacaaacttaacatgaacaccttttgcattatgtgaaagaacatagcaatgctcaaaacaagatgaggatacattattgaatttgggacaattctttttgacatgtcccttcttgtggcacttgtgacacactttatcacattctttcacaaacatggtatttttcttcacaaaagcattctttcctttcttaggaacatacccaagactcccactattaagtgagcaccgttggcttcccaaaataaaattcaacttagcctttccaccataggccttctctaagtcataagttagagcatttactttccctactaaggcttcattgtcaacaatgatttgtgattcaccacaaccaatattatcattcataagataaattttgcttttatcactaataaaactagtaggttgtggtttacttatagaactatcaagtaagtcacaagtgattccaacatcctcggtgaccaccacaacttcatggacaagagatgagttttgagcctccacaatcttctcacaactctcttttagattgttgtgggaggtctcaagctcctcaaaagacacttgaaggtttttgtataattccttcaaggtcctaaacttttctttttctttgtgcatgtagtcatcagtctcatccaacattctaacaagatcatcatataaatatccatcatcatcaagatcatcaatgtcatcatcatcatctacatcatttaaatcagttatgatttttatcttagcatcacctttttccatgagacaatgaggagatgagaaaagtgaaggagcctccttgatagcgattctgacatttagtttggatgagtaatcatcatcataatccgagctagcatccgaatctcattcaactagataggctttgctatccttcttcttgtgatagaactttttatcatctccatccttgcccttattcttattgcttggacaattcatggcaatgtgaccgggttcctcacactcaaaacattttctatcattaaaagcatttcttcttgatgtttggcccattctaggttgacccttcttcttcctcatgaatttgttgaatttcttcacagagagagccaactcctcatcacttccactttcatttccttcatcttcactttcttctttttcaattgccttggaagctttagctttgagagctattgattcacctttcactttcttagctaaactcatagcctcggcttgagactttttgaatatatcttgagtaagaatctctcccaatacttcagttggagaagtagtggtcaaatcacttcttactaacatggtcacaatagtgccatatttctctggaagagatctaagaaacttgtgagtgaaatccacatccagttcgttaaaaccgagtctcttgaactcatttactatctcatttaaccggttaaacatgtcggacacactttcatcttccttcatgataaattgctcaaattgtcctttgcatacatacaactttgcactcttcacaattttagttccttcatgaattccattagcttggtccaaatctcatgagcggttgtgagattttttatacagttaaactcatgtctagagcattatagaacacattcatggcttgatcattggttagaccattctcattgtcactaggtgatggtttatcttgcttcaatacaacaaacccatatctaacaataggccaaatatttcctcccatagctttaagatgcattgacattcttatttttcaatagtcataatctttcccatcaaaatgcggtggcttctcaatgtgcacattgttgttactagccattttgtccaaatccaggatggttaaatcaacaaacaatggagtccaaacctctgataccacttgtaggatctaggacaccagctagaggggatgaatagatagttttaactaaaagcaaagacactagagaaatttaatcaaaacaacaagatatataaatttcctagctatgataggctaacaaaatatgatgaacaatttatgtcaatactacaaatgatagacaatacacaaattactaactacttgcatgtaataagtaagtgagagaatgacaccgaaacttatcccgtggtatcagtgatttgccgatgtaccacctagtgcagcaaccttcaagagtaacaagacaatgacgcttgcccgatgtaccacctagtgcctcaaggatcataatggatgttgttgaggacttgttcttaaatactatgaattaagtgaaagggaattaggcttacacctatttcctaattgattttggtggttgaattgcccaacacaaataattggactaactagtttgttcaagattatatattctataggtgccaaaggttcaacacaaaccaatcaaaagaacaagttaggtctcaaaagaaaggagcataaaggaaacccaaggctgccctggtctggcgcaccggacagtgtccgatgcaccagggcacttcagctcaaactcttcaccttcgggtttttcc

SEQ ID NO: 47027 - DNA, 791 bp, Zea Mays
cagaagttgaaaatccaagtgtgacgtgcgagtgaatacaggtcagcttgaacagtacggtgttactattcatctatttataggcacatgacacagactgtatgaaattacatccatatcctcgatatttactattgcctaaagtgtaatctgacgagggctagatagccttttccactttaagtcggtttcattttccaccgttaagccgaagcttctccattcatagcttcacaattgattcgtccttcttccagtccacgcctttcagaccgtgtacaccttcatcccaaatccgaaggaacctgtgacaatatattatacatggaaaacatgttagacatgtttttgaggaccttcggataacgaaggcccccaatagtagcccctcgcagtattaatttgttcttgtaacaacaaattcagactgtgacgtgaacgaaggccttaagccgaaggtccaaaaaaacacagcgacagcatttgatgcgccatttctgttgtttgtgttattttctcaaaattttaactcttgcttatcagcccacgcctgattttcgagcttcagtttaaaaacaagtgcttgctccatgtctgaggagaagaagatgactgaagagaagaagatgattgaggaagagaagctgtatgaggagaagaaagttgcggatccttttattgctgggttttatgagtctatggcaaaaacaaatacagagaagattaccaaggagataatggaggatttgtctgaagattctgatgacagtgatgattataatgtggaaagt

SEQ ID NO: 47028 - DNA, 1907 bp, Zea Mays
cgcaaagtgcttctgcaatatgctcgaacttttgtacgaaacaaaggctactggcgaagaacagtatcacaacaacctcggttgttatggatttattgcttgtaccaatgcaagctacccagttccaacatttcggaagaggtggcccggagcctggatagaggaatggttttatgttaagaataatctgattgagaggaaggacattaaggaaattatccaacgccccatctggtctcgcttcggccttcgaaggctgaaggtgacgattgaaaataatgatgaagcatgccaaaaggctttcaacaatgtttgtgctttcattggcacaagagacttaatccaagagcacgtagcctataaagtgtggccacttgtagatagctgggagatgccgaaggagactgctttcgggttcgccgaaggtggattagttcgattaaagtataccttcagattcagggatcagtttgacgagccaaatgacgattggctaaaaagtattgaagctattagcgatgagctacttgggacatataccagggctgaagatggtgctttatcctcggcattcgggggtcgaggcaagaaaagattgaacatggtgtttgatgcaattggcttcatataccctgattactgctacccattgcgaagacaaggaaaaaagagaaaaactgccgcttcgaccaccactactgtgccgaagggcaagaaaatgaaggttctgacccaccggccacgatatattgagacagccgtagtgcctgaacttggtgaagggatttcctccgctgccgaagggaatcaagctgctcctgctgaggctgaagccaaaggatcgactgcagcgccgaaggtgcctatagttgggtcagccgaagccaaagatgacgtggtcaaagagccagaattggaaaaaacagtgatgatgccaaaaattctgagcccaccggcagaggcagaattgccgaaggtgataaaggctcctgccacaactcccaagagaaggaggatggctagcgtgctagacgctgtcatggagactacaaaagccttgacccctgctccttctaagaaagttgccgaagatgtcacagtccaggccgaagccgaagctgggccttcagcacccattgagacgaagcctgccgcgcctgaggataaagctgagcaacaaactccggatgccggcatggcagcggggcaggacatgatagaaaaagctaaatctcctgcccccgaagctctgtccgaagatgttgattacattattcgacatgcttcggggaaaatattatccaaacaagaaatcttagaagccagacactacacccagaaaataaaatatccaaagggggccttagtgttcaatggcactgacgaagatgatttcctgtactgtctcccggacaacaaagaaatatccgtttgtggggagatagccaaaagtatgggatttccgaagcttgaaactggccttgccgccatgtcgaaggatgaccttgcggatagccttgcatacaacagtataaaggtacaaaagctgttaactttaaagttggaaatgaagtatttcattgtcatgcttaattctttctttttcttgcagggcttgattcttagcaatgccttcagggcacaaaagaacgccgaagacgaaagctgcacaatagctcttaacagccttcgctcagaggtaattgagatgagaaacgaagctttggataaagacaagattttaatttcattggtgagtaaagtggaagaggacgaagctagatacaatgctcaggccgaagcccaaaaagatgagatcgaagaacttcggaaaaagctcgccgaggctaatgaaaactatgtagtagcaaaagccagcaaagaaattagtgaatggtcacaagcta

SEQ ID NO: 47029 - DNA, 251 bp, Zea Mays
ccgaggtctccatggatatttccgtggaagactatcttgtgggcggcgtcgcgatgttcgacgcccatacagggcgaggacctattggtgagtttttttttgtttttttgttttttgtttttttgagatctgggtgtttgacgacactatggtgcaggatcggaggctaggaaattggttgttgtcctagcgccgatggctgctggggcgaaggggtcttcgcaggacccatggtccaagttttgcgccag

SEQ ID NO: 47030 - DNA, 351 bp, Zea Mays
ggctgggaagggaggcaagggggcggcggcggcctgagggagctaggtcaggggcggccgactcctagctgggcctaatgggccttaggttagggttgggttttttttctttttcttttttttcgaatttctaatttaaaatacacttttaaataactctaaaatttatagtaattgaaccaaaagtatttataaataatatagttatctttggactgattatattttttatttactaggattttttttatttaagaagaaatgttattcaataacgaaaaaaaatcaatcatgcgcgataaaaaaattactccaaatgaaataaataataaacacttcaatgaaaaattt

SEQ ID NO: 47031 - DNA, 341 bp, Zea Mays
gggaagggaggcaagggggcggcggcggcctgagggagctaggtcaggggcggccggctcctagctgggcctaatgggccttaggttagggttgggttttttttctttttcttttttttcgaatttcttatttaaaatacacttttaaataactctaaaatttatagtaattgaaccaaaagtatttataaataatatagttatctttggactgattatatttttatttactaggatttttttttatttaagaagaaatgttattcaataacgaaaaaaaatcaatcatgcgcgataaaaaaattactccaaatgaaataaataataaacacttcaatgaa

SEQ ID NO: 47032 - DNA, 750 bp, Zea Mays
cttttgcagtgtagtatatgttgctttagcagttggctgtcatcaaagcaaggtggcacgtgtcaatgggtaagacctcttaacaccgttcgcatcatgcatgatttattgaccaaaagaagacttgcagcagatgattcaaggcactcaaagtcaaagtagaagcaaagtgtcaacaagaatagaatgttaagagttgtgcaaggtagcaggtgtcaatgggtcagacttgttaacatcgtttgcattatgcatgatttagtgagcaaaagacttgcagcaaataattgaaggagctcaaatagaagcaaagtgacaataaatacttgagtatcacttcttatccagatttagttgtcaaattttaaaaaaacagtgaggtgaaatagagttaagaaagaggcattcctgccaattttagagagcacacacaatgaagaagtcaccacagaaaggttagcaccacctaccaattgcagttgtagtgtgttcaaagggtcagaactcagaagggagattgatggggcccaagtaagagaagtaaacaggaggttgaggaaagtatctaattgacatgaatgatcacgatacactcactttgaagaggtgtctcttaactgatatatgatataaagactaactgtacaggattataaaaggtctgaaaaataacatggattcacaatagttggaagcaaagtaacagaatgaggtgcctaatcaatttaactagtcctcccaatattttat

SEQ ID NO: 47033 - DNA, 607 bp, Zea Mays
cacagcgtcgagcaagcgactacaacaaggatccgactttcccgcgttggagctccatgcagtggaaccaggcgaggatagatcggcagaatcataggaagatagactcaaacagtttgctatcttttaggtatacattgttatcacatccatgtgtattgccccacggtcgagtatataaggcctagggggcaccccttcagaacgatcgaccctatcactcagccacccacctcaactctctgcattctcaattcagagagctaccttgtaacctcattcaccaagcatactccccaggacgtagggtgttacgcatctctaagcgccccgaacccgtaaacattgtccactgtccctcgtgcatctggcacgaaccattttgctacagtcggcgacaccgtcctactcctaaaaacaccttgaggggcaaccccgggtgtgcggtcagacccaaaacaccgacagctggcgcgctaggtagggggtgcgtcgacgatccaagctagctcaatggccgtcaccttccacagcaagatcgccctccgtcccggatccgtattctgcttcggaacaatctcatccgtagcagatgaagaaggaactc

SEQ ID NO: 47034 - DNA, 524 bp, Zea Mays
agtctattgggtccccgatgtcagtggccaataacgggtgtggggcgcgcgggtgcacgcggcgtgtgcctgatatgtgggcccggggtgtcggtgtgcggcccaagcgggggaggggtacactgggccgagaacgtgtagtttaggcccgcacgcataatcttcttttcctttttctattttttttttctttttctcttttctgatattgtttctactttaaaattcccaaattcaaacctaagccaaggttctaaattcaatcagatgcaccaaccaaaagaatgcaacatgtatgcacaagtttattctatttatttaagatttattagttaagccaattacttatttatgaggaattaactatataggtagatagatgcatgagagaatgacatcacatgtaaacaatggcccgcttttatttcactagaagttaattaggtattacagtatatgaactatgtgaaataatgtattggatttttttcgataattcatgaaaataaagtagcagtttgaac

SEQ ID NO: 47035 - DNA, 583 bp, Zea Mays
gtcttcgagaaggcagctgaaggtgcggtagaaagggaaaaaggcagtgtgctcatgtttctctccgctacatcgctcgtgctctctcgataggacgacattgaggactaccgtgccgcggcaacccctccgaagcggtgcgaggcgctaccttccaagatagcggacgtgctgggctgctggccggcgcactacggaaggtcgggagcacgagtagcgggtggccaccaccgtccgggccctggacgacgaggtcgtcgttgccgtcgatcatcgcctcagcggaggtaggtgcttctccccgccccagcattggattaaagtccacgttcaattcattttcgttgacggcgagatcatactatctatgtctgtttaaagagcggtgaagaggcaacggactctatttgcttgagtggtttcacttagatcccattcaaagcgaagttcacttagttgagaaatgctagcgctatggatcggagttggtccaaaagctagaattggagaagattcgatcagatgatatatatgcatggagttggatcgaaagacgatggtgatgcattgatgctactactgc

SEQ ID NO: 47036 - DNA, 205 bp, Zea Mays
atgtaaggaagcagaagcatcagatgagtctgaatcattgggtactgatgcatgatcatgtgaggacaaattcaaatcagcataaaaggaagaacataagaaatgtagaaaagtctgactatatgcacaaaatagtactgaaaacactaatcatgaaaacttcacaaatgaagtgtaaattttgtgattcttgtcttggttcgca

SEQ ID NO: 47037 - DNA, 291 bp, Zea Mays
tttttattgctcatgattgattttggatattgaataacatttcttctcaaataaaaatccaaataaataatataattattagtcaaaaaataaatatttttataaataattttggtataattattatgaattttagggttatttaaaaatatgtttttgaaattagaaaaagaaattaaaaaagaaaaaaaaaagaaaaataaaaaccctaaactaaaccctaaccataaggcccactaaggcccatgtaatggccgcccctccccctgctgccctaacccagccgccgcc

SEQ ID NO: 47038 - DNA, 493 bp, Zea Mays
ctaaattatgcatcatgctggcttttgtttgtttgtgcaatagatgaaaagagtaatctcattaacggaaataaattaatgtcaaaattaaggatttaatacctaatttgagagtttgaaaaagagaagatatataaaatataaagaaagtttatatatttccaaaattagtacctttaaggtcacaatataatttaaagataaatttggcacaaggtttgaacttaaaatttgaattcaaattgaatttaggaatatagaaaataaaaaaagaaaaaaaaagaaaaaggaaaatataaaagaaaaaggaaaaatgacttctggggtcgaggcatccaattcggcccaagtaaattcaccctcgcgtggcccaggttcctatccaccgcgtgcgcgccgccctagcaggaaggacccaccggtcagtcccttctcaccgcgacgttcaacagaatggcgcgctgacacacggaccccacttggcagccccaag

SEQ ID NO: 47039 - DNA, 364 bp, Zea Mays
gtttaatacctagttttagagtttgaaaaagagaagatatataaaatataaagaaaagtttatatatttccaaaattagtacctttaaggtcacaatataatttgaagataaatttggcacaaggtttgaatttaaaatttgaattcaaattgaatttgggaatagagaaaagaaaaatagaaaagaaaaagaaaaaggaaaatataaaagaaaaaggaaaaatgcctgttgggctcgaggcacccaatttggcccaagtaaattcaccctcgcgcggcctaggttcctctccaccgcgcgcgcgctgccctgccaggaaggacccaccggtcaatcccttctcactgcggcgttcaacagaat

SEQ ID NO: 47040 - DNA, 288 bp, Zea Mays
ttttggatatcgaatagcatttcttgttaattaaaaatccaaataaataatataataagtactagtccaaaaataactattttatttataaataattttggtttcatcattatgaattttagggttatttaaaaatatatttcgaatttagaaaaaggaaagggaaaaaaagaaaaagaaaaaaactaaaacctaacctaactaacggcctaaggcccaacaagcagccgccgcctaaccctaacctagccgcgcgtgcctccttcctttggccgccgccacctgctt

SEQ ID NO: 47041 - DNA, 538 bp, Zea Mays
cctagctctatccttatcgtcctgacgatctatccaacatttgtttctaaccagttttacttttgaaacaggatggtatttatagtttattgattcctctgtggtggtacaagctccgataccagctgtggcggaactgcccaaattattccaacttaagtgcctaagtccaaccttaaaggctagaccacacttaaatgggaataaaatgtcagtccctcggatctagtccgacggggccactaacaggatcaagtaccacgtactcactcgatggtgaggcacagagcaaatacaataaagcataaaaccactattaaggagtattaaatttattacaacatcattggagtgttaacgaaaaaagtgatcattgttcgaaatgcagaggaataaaactaacgataaataaatggagagatggggaagcctgtcccatcactcctcatgctcctcctctattgagttagggtcccactcgactgtccaacccggtggcaagatggacggccaagtcactccagcaaccatgtcctcc

SEQ ID NO: 47042 - DNA, 529 bp, Zea Mays
ggaggtacaagtatctaggtgcagcaagaaaacaggcttggggcaaaataattacagaggtgcacagaacactagcgtttctgtttatgtgctacttttttttttcttttttctcttttttgtgatttttttcaaatatttttttttatatttttctcttttgcagcagcacataagaagaaaacacactaagtttcaaatttttttgtgcaatgacgcgtcctttagaatttctacaagtttgccctaaaatcggaataaatgtttggaaaatgagaagttctgtttccaagccgaatttgggaattttaaaacagcgaatcctgcaaagcccaaaagaatcgaatgcgaaatttaattctgtgcgcttttaaaaaaataggcccggttcgatttccgaggtgaaagttacgactgttttaagtttggactccgaatcagggtttctggcgaggtgttggaagggtgggagttcggtttcgtggatagggtcgaatttagagataagatctattttgtggatagggtc

SEQ ID NO: 47043 - DNA, 343 bp, Zea Mays
ctggaacattttttttgtcttctgtaatcaaattaaaaaaaaatgcacgaacacgaaccatggctgttcgtgattttgaaattgcccagttgatgagttcctgggtttccttccttccctgccgtgaaccaaccaatcaacagtgtgctggctttggtcagggtcgttgccctcagcaagatgaagccaggcgctctgctccatccacgtatggaccaattccctacctagtttgttttttggccgtccgttcgtacacccacggtactgcggctctaaacaacatacaactgcaactcgccgaaacaaaaaaaaaaaaaaaaggagcagagtatgtaggcta

SEQ ID NO: 47044 - DNA, 1099 bp, Zea Mays
cctatcttcattaaacatgaataaacattaacaatattcatattacaatggtatcttcggcttgccaaaaggtgagagagcgagaagagcgcgagagcgattacaattcagcgtgaacagtacggtgttattgttcatctatttataggcacgggacgcagcccggataaaagtacgtttataccctggcaactatctataatcttaacaaggactgttaaggactgtatggtctttattcttctctagttgttatcacgcttgagcttcgtcgacatattcagccgaaatcttttgacctctagcttcgtcaacatgttcaaccgaagttctccgtcctaataccgaagcttcctgtaactattcataatcatgctgaaaatatatggttagtcacattttttaggaccttcagaagaggaaggcccccaacagatgcatacaccaatttacgaagttaccaaattaatatttaatgtatttgagtcttagatgcgcattttgaaatagggaaaactgttgcaggggttagcttaaaattaaccgtagacgataaaaagtagcatgtaaaattggacctttcttttaccttcgatgagtaggagcgagagagcaatagagcacgcagcagaggcgaccttgcgatggcggcaagcctccagcaagcgcgagcatgacgtgggacctcccacatggcgaggacggtggcccgaacagtgcgacagcaggagttttgacgaggtactgcgcagcacggcggcgagcaacagtgggggaaacagccggcggcgtgggcgcgcaggcaaaattgtgcagcagagcagcaactccggcgatgtcgtggctttggcaagaggttccggcgagctgacggagttgggtgcatggagttgagcaggggaggagggtttgacgaactgagcagggagcagctgagtagggctcttagcaccgagtcacaagggaaggttcagggtgcagatcaccggcaaggtgatggccagagtagaagcacgacagtaatttcgctagggtgtgtaggagatagcgagcagaggagcgaaagtggttgcgagctgcgtgatctagaacgattccg

SEQ ID NO: 47045 - DNA, 298 bp, Zea Mays
gttttattcttctccctaaccctacccctaggtcacccaatcatttgcatatacttaaaatgatttgaagcacctcacatagaccatatttatcaccaagttcatctagagaattttttgttaagagaaaaagaaacaaaatgacacaaaaatagaaaagaaaaaggagagaaatagaaatcagaaaaagaaaaagaaaaaaacctttccctccctcggctgggccgacttccagcccatctcgcgcgcgcccacctccctcccctctccttccggcccaggcggcccaagccgcgcg

SEQ ID NO: 47046 - DNA, 282 bp, Zea Mays
atcgaaaacgaggtttaatcttttcccttttttcagttttatatttatgtgtgctttttttaatatcggagctgtttgagtggatgtgatggatgcctatatatatgattgtttggcatataaccatccacgctaaatgatgttgctatatgtagattactatatactagtatatatatcgatgcttgtggtgatatattatgagcataagtatagtaatacggtgtactatattggaaatatttgtaccgtgctaaattaaatgcaaaattttcgtatagt

SEQ ID NO: 47047 - DNA, 547 bp, Zea Mays
ggaatgatgaggacatcctccactattacccgttggcaaagacgcaattggcccagttggcctaattgtagtcggacggcgaccgtgtgagcctcagaattatcccaccttgcttaacttgggaggaggaagccactttaaaagggagagccacccttcccccattgggctagtcttttagggtgattgggcctttccctgagttgggtgtgcttaatgaactgttggtctccgggcaaccctaatttgttgggcctcggccaaccccacctggggtgtatcagaagagtccttctgctcctgctcctggcgtcggtgttcctgctcctcgtccaggcggcggtgcagtctctctaggtgactcgaatgtcctatcaccgtgcggcgcagtgaacgctccacaaggagagagagaaggaaagggatcgccgacttacatgcagtgcatctaagacgggccatctacaaaagatgtcataaccacaagagtgagaacaaaactatatgaccatcaagtaaaccaaaagcaaagtaagataaaaatttt

SEQ ID NO: 47048 - DNA, 116 bp, Zea Mays
cacacacaccatgcccatgctgttgccggccgtgttttgctagatagatccacgtacagcgacgtatatagtacatagtctacacctatagtggagtgcactgcaattttgcaaaa

SEQ ID NO: 47049 - DNA, 906 bp, Zea Mays
atttttcttagttgagttgttggatgaagtatagtgacatgggttaagcaagtattgtgttgtcgttgggctgtcagtgctctatgtggagtttttggcatttcttcgatgaactgtgccgcacataatgttattggcttcttgtcggttttattgctccattagttctgtagattttctccctttcggtggggtgcaaagaatgttagattacatgattatcttttcattatggcaagaacaaggtttaggaagattaggagttttgtttcaatagaactaattgtttcgtggtgctgtgaggtgaggtgtttgatcttcttatacattcatctggtgtggatgtttcaccattaaattaaaatgaattgttgaagttggtaaaggttgtgcttagtgcatattaccccttcatcaaagagtgtagttttaagacattgatgttgatgtatggctgcatccaaattcgatgttgtgaaatcgtagtgttgattgcatctatgacttggtttgagcttcattacatgttggttcatgcttgatgtcaggtggtgtagtttccttagacatttagtctgaggtcgaagttcttgtgttaattaagaccaataatggacccatgttttggaatggtggtgttatatggggtaccatggatgttttgtttggagtggacgaattcgaggacgaattctttttaaggggggtagagtgtgataccccaattttctgaaaagaagttaaacttctttttctcttttctttcatgttctgtggcattggggtttggagtttcaggaggcattcctcagaaaacagtagatcttttggcattttttcgctggggtcgggagctcaaagaaaagagcgagtttgggccattgatctcgatccggtggatgggag

SEQ ID NO: 47050 - DNA, 1229 bp, Zea Mays
atctttccgtggccgtgaagaacacaacaatcggacatcagatcagagagttattgcagtttgattatagcagtttttcagtctcttaattctgtgcagaatctgttcttttaagatttaggcaattttatcaacagaattaaaccatgggtttgtaagaaaagatgtagataatttcataagctttccagattgttaaagagtgcattcatatgaattatgaaacttcagttatgtttgttttactgtggttgtttctgttagcctaacagaaatgagcgggtctgttcactggtaggtttcatcaagtaaatggccgaattggctctcccagctatggagacttttgtagagggataaaagttcttactttcagcagaatttcatgatttttggttgagtagtttgtgagatatcgaattttgaaagttaactatgctgctgtctaaaacagattcagtcagttatcttgttagatgttttagaacttatagatggcataatttaattatccatcgaataccgaagttgtagaatattttgtgtagatactcatggagtatttgtttgatatcaccactgttataattttaaagatacaaaattaacaaacaacattgctgttgtatggtatgtggttcagagtgggaggttttccaccaggtcttggtttcaggtgtaggatcgatttgttgattgttggcaaatgtttgtgaaatatttgtactaagttttatgcccgctagcaggtggctacactccagatcatgcctagtacatttttcttcttcgatgaaggcaagtgaatgtagcggtggttgcttccgttctgacctgttatttctattgcctacactctaatattcagaagtattggattctttcataattggactctatggtgatgctttacttgcttgcattatactgatgctcaatcatatattgatgatgattatgattcgagtatgactcatgagattaattcacactcctgaaggtaaatgaagtattatttgaggttggtattgtatctgaaggtaaatgaagtattatttgaggttggtattgtatctgaaggtaaatgaagtattatttgaggttgtgttgtatgtgaaggaagtgaagtatattgataaatgcagcatgtcatatacattgcatgtagagatggccaaatggacggcacggcacggcccggcccgggcacggccaggcacggcacggtt

SEQ ID NO: 47051 - DNA, 2179 bp, Zea Mays
catctcccctgcttgaccttcacacagcgcacacgcccctgctaagctccaactgcgcgccgccggttgtccctcggctcactccctccagcagtcatggacgtgcgcccctcgagctgtccggcgagtcgcgcccaggccgcgtcgagctcctcctcgggtcaccatctccgagctcgaccccaagctgcagtgcgtcctatcccatctcttagccgagtccctccattaatcggcgtccgtcctcacttctagccatgggacacgcgcccacctcgtagttcctctggctgtcgcagtgttcttagtcatcccggttcccacttgtccctagtccaactaaggaagtccctggtgtcgtctccctctgttcctatctccagtctgtagccggccctagcactgcctctgctggcacccaaatccctagatgtcgccctctcgtctctgcatccgtgagcatggtgccgcgtctctatttccccgttagatcgtgccctctgcgacctcgtcggctgcacctccaccgtttggtcccgagtgtcccaccctgctcgtttcctggagctcgcctggcctctagctcgccttcagcatggtcatcgcaccctccctgctcgctgaagacagtgaagtcctagaaccacgcatacatggtgttcgatgaatggttcataccggatagcctcgtcgaaatcatggctccgagtcgattcagacatagtaagctgatccatttgtttcccgttagtatgaggaatgattagatacattggattaaattactggtcataatgatagtcattatatgctatttttatttaaaaataggttattaatatttatgtaatttatggtaataattattaattagacatttttatatatatatatggtaaagtttaggcggcaatgtaatttagacgaggagtgctttggtggtggatacgaatgactagggtaatttaattgaattaatattggcgatgtgcttgtgatcgcaattgtggcgtagacacatcgtgtaaagctcgggtttaaattacggtttaggcgaaggaggttttggtagacaagtatacggtattggtgaatcgatgacgtgaaaaatagatataatactacatcgactagctgacatgttttgttagggttgttgtgttagattcgactaatcttgagaagcatgattgttgtactcagtcatctgtcgttggccagtatacataagtactctagatatttaagtcattgagaaattagttttaccgaacggtatgttatctgttaatgttgtatctgttagagtaaatattgtgatgtttgatttagttaagtgtgtaatttaagttaattaagacgcaccgtttaaagagttaattagattgttcctatatttattttaagtcgttagtattcaataatgacgagtccaagttttattagacttccgatgaaatattttactaaggatgatagtgcgagttaaataatttattcttacttgatttcagaattagatccaatcagaaaggaggaacgtgagtgttgtgcttggtgtgtatagtttgctgtttcgtgacgtttgtgttagatttggttagtctaaaaaacatgattattgtacttggtgatttgtcgatagctagcatttgcttatgaaatgtcgtgatgccttaccattaagtgtttgattctttactgtgtaacatcgtaatattatcttgcgatatttgtcttgatattcatacatgtgcatcgtgcatctcatgaggtacgctagttgttgggaccatgcttcgtcgccgaaggtcctgcaaaaagaaacagcttcggctgaaactgcttgaacatgatgccgaagacaccgttcacgaagcttcggaactacagcatatccgaagacgaagggtcaaaccgacttaaagatagaatgaccttttagtccataaaggtctgagtcattgttgtaaacttttatgaggggtataattgtaattcctcatgagctgtgtcctgtgcctataaatagtgaacaatattcctttactgttcacgcattcctataattgctaacgcatcactcgggaattattgtcaaggcaaaggtataaatatacctaaacattgtattcatataccttaaattcatataataagacatgtgaatgatgttatt

SEQ ID NO: 47052 - DNA, 481 bp, Zea Mays
gggccggatacggcccaaccgaggggggagggttttttttctttttctttttctttttcacatttccattttctatttttttgtttctttttatttccttttcttttgaatcaacaatttgctaaataattttaagtgtaaagaaaaaatataatctatgtggggtgctctaacaatcaaagtgtatgcatatgacctaggggtgaagtttagggataaaaatagaaataaggtgggggtttaggagattagggttccaaaccttgggttgagatttttgggatgttatagttctctagtaaactcatgaagagatcttggagtatgacgtatatgctccacccgagaaggggactactggtagccaagtactggttatggcttaagtgaagcccattcatataaaccttgcaattcaaggcatagtccattgttcaagttgtgggttggtgttgcttggagttctaggcggaagttcaac

SEQ ID NO: 47053 - DNA, 189 bp, Zea Mays
ataaggttctctccggcaccatgatccctatggatgacgcgacaagggatcgtcgacggcctacgcttatgacccataccttgcaatgataggtggattagtgtggccagcgttagtgtgtcattattgctgtcgctcgagtcccaatcatgtcggtgtgacacaagaggcatgtttaatggagtatgt

SEQ ID NO: 47054 - DNA, 709 bp, Zea Mays
gtcaaatttatctaaaacaaacaaaagtaaagtgaccctgctaaataattacactttggaattcaccctttcaaaaaaaaaatagtaatattaaaataatttgagttaaaacaaatagaaacaaaaattctgtttgtgagtttcaagaaatgaataagatccttatatgagttaagatattcacaagtgttctctaaaagattgagtttaaaatgtctcttaatagagattattccttagaaagtaccttcaattaaaataaataagtaatgaatattagtgcacttttgattgaaccacacacgcaaagtggtattttatttgcatatattgtttgtgtgtatgaattatatatttaaaagcatttagataagtgaataagataaataaataatcagtactaaattctaattacatactcggtctttattggacgatgcattttattgaaactaaaaaaacataaattaaaaaaaacaaaagaaaaagaagaacgtcatatctgttgtcggccaaccaaaaaaaaaacaaaacatctagctaattacgtctagcagccgaagttatctccaacctaaagattgacttcagataaaatagcaacaacccttcgtgaaatcttctcggacaccgagcagctcgccaacaaactctttgctatggaggcatataaatcccggagcctacaccctcgtagacgtccagtaat

SEQ ID NO: 47055 - DNA, 68 bp, Zea Mays
cctgaagaaatctctccatagcaactcaaacattaacctatttgtcccagcatcagttgtgccatcat

SEQ ID NO: 47056 - DNA, 277 bp, Zea Mays
agaagttacatgcatacaagagaagggcataggcacaagaaaaaactacctacaaaggtataggctgatcacacatgttcatttgaggcttggcctctggtttcgtagctatgcctttgtatggattagtgatctacttgtcatttgtgtgatgtctataatgactttgtagatgttaagatgcgtatggtgcacacgcatgctttaatggaggtgattttatagatacctgcacctaatgagcatatctgagaaagatgttcatcataaatgttag

SEQ ID NO: 47057 - DNA, 220 bp, Zea Mays
atctcccgcgcaacaacctctcctctccctcttccacctctctctccccgtggtgccctaggatttggagacggcgatcaccggattttggaccccgagagaacgatccggttgaagagcccgaggaactcgcaggagaagcccctgagcagcagtcgtttggtggaggcaagtgtcccttgacctatctatgtcctattcattatttaattcacctccc

SEQ ID NO: 47058 - DNA, 213 bp, Zea Mays
ctcgaagctagctcggggaccttatgaggctggtgacgccccgctcgcggtagattgctcatcagagcaaaactgcgatgtgatcctgccgcaccgtgattcggcctcatcacgacctcatctctagtgagaaaccatcctattgcccgcttactgttctccaatgcatagcaccgagaatcgtggtgtgcatatccccttaaccacgggaat

SEQ ID NO: 47059 - DNA, 441 bp, Zea Mays
gaacaaaatagtacttaaaaagaatacaatttttagtatgagagaagtcaaaattttaagcttaattacatttacacaatataatattgatatttatatttttaaacatgtttactatgaacatatattttatagtttatgtagcaatatttattcattgtcataaatattaatgatttttatataaatttggtttagtttaaattctcgaaattccttttgagacaacaataaagaaaaaaaactgaatttccaaattcttttcaaggacaaggaaacgacatcaccatcacccgcaacaagacaccaacaacataactgttagatcatctccaatagaactttaaactctggccttattttatggaaaaaaagaaaaaaaaaatgtctccaacagactcttatcttgtctccctagaaccccgcacacgaatcaattac

SEQ ID NO: 47060 - DNA, 266 bp, Zea Mays
ataaaactaatgatcacccaaattcatgtgttactcttctctatctcactctagtttctctcactctagttttctctctctctttctcttttaattagagttagttgtattagtgagggattatttattttattttgcccaaaacatatgagttatggaatgttgcatcgtattgagcctaaatattctttgaattgttgcacatatttgatttggtttgaatttgaaacttgaattgaatttaaattgaagaccctagagaaaat

SEQ ID NO: 47061 - DNA, 282 bp, Zea Mays
aaattgggaataaacctaatatgaaatctagaatttaaagatgcaatagaaaggaaaagagaaggaggaggaaaataatatacaatataaagaggaatatatataaataaatataaatcaagatagctcttcatgctgctaatttgatgtgtacaaaattcacaacaaaatgggaatttaaatttgagatttaaaaataaaaagaaagaaaacagaaaagaaaaagaaaaataagaaaaaagagaaacctaaaacaccacatgagccgttatccaagtagcc

SEQ ID NO: 47062 - DNA, 783 bp, Zea Mays
ataacataaagccctacatgattctaatactgattaacactaattactcccgaaaagttcccagaaactgctaatactgctgctgttcatccccctgaaaatctgtttttttggacagccacatacccggattcaaacggtgataactttcaatttataactccaaatggagcgcataaatactcgttggaaaggtaaggtaaagttctacatgatccccaaactgatttcccttaattcctcacgaaaaaacacagaaactgctagactactgctgttcacccaccacctaaaattctggacagccacatacccggattcaaacggtgataactttcaatttataactccaaattgagcgcataaatactcgttggaaaggtaaggtaaagttcttcatgatccccaaactgatttcccttaattcctcacgaaaaaacacagaaactgctagactactgctgttcacccaccacctaaaattctggacaaccccctctacccaatcgcaaacgcaacctctaatcaattaaattgcagcgcaaatgaacaaggaatgaacacaaaaatcaccttggattctccccctttccttcctcccttcttccctccaccaaaacgattgaagactcgcaccacgacgacgatgatccgagcggcaaggattggcaccttgggaggaggggattggggggggggcggctagggtttggtggctgcaaaaattgagagaggaagagatgggcaggggggcggcagccaaggggaggaggagaagtgggg

SEQ ID NO: 47063 - DNA, 499 bp, Zea Mays
attatcataagctgccttacatcatagacatagggggtatttatactagtaacaaccagccttagcgaggtataaacatgaaacaaaagtattttcacgtgctaatgtgaaggagcctcttcgggagatctgcagagctgatttctgtgtggctgtttgacttctgtgcacccttcagtattttgacaataacttcttctaggaatcttcaaatgacgtggcgttggatgcgttggaaagctgacttgataagctttctcaccatatatagcatgcttaatgaaacttcgtagaatgatgcagcttaatacgaaaacttggtcatcaagcagactgttgaccttttgaccagtcagcactaaagtaggtcggctgcctttctggtagatttgattaagtcggctttagaagcattggaaactagacttcaagagctttccaaaaagtacttatggaccttcatagcttttgggaatcaaaagatatgactgtttcttct

SEQ ID NO: 47064 - DNA, 377 bp, Zea Mays
gttagtaacaaatagcaatgcaagtgtccaaagtacccgtcctagctgctggccaagaaatttattagaacagatggaggaagacacaaaggaggaaacaaggatctaggtatagcaagaaagcaagacggaaataagatgaatcatagagttacacagattaatggtgttcctgcttatgcacacacttatctctttttttctgatttttttcttttttttgttttttgtgcggatttttttgtgcactagccttttatattctcttttttcacaaaattatgtaaaaacaagatagaactcaagagtatcaaaaaaaatctcgtccgtatattatagattttttactctaacttcaacagactgtttgacaaata

SEQ ID NO: 47065 - DNA, 308 bp, Zea Mays
gcgagattcctttaagtggggtaggtttgtaacatcccaaaattctaacccaggtttgaaaccctaatctacccccccttttttcttatcttctatcccaaaactcccttagatttctcccatcatatgcatacacttggttagatcacaagcacctcactttgattttattttccaacccctagattatccactaaatcatttgttcaaaaagaaaagaaacaaaaatagaaatgagttgttaaaaataaaaaggaaaaagaaaaagctcttcttccccctgctgggccaattctggccgatgtcgc

SEQ ID NO: 47066 - DNA, 490 bp, Zea Mays
ctttctgccatctcgctctagctctccaaagcccaatcttaatttagggtgtttgtttattcactggtctacttcaaatcttaatcttcctgctaagtgaagggtcatgtttggtagtcttgtctctgcgctggtgattaggatagtggttcgtgttcttttctactactcttagggtcatcaggtgatggatggctttggtggacgtaaagcgactggaaagctcaggaataatcgaaagcttagctgcatgtatccaggaattgattgttattccaaggaattgaagatggtatatgttcattttttcagagaccaaatcagcagcatttgcagttcaagggcattttgcttgacacacacacacacacccagtgatatatactggggaagatatatctttgacaaattaatatccatgactaattgactatgtaatgctctttatcaaagtaggttagctactagctagggctggctagcgcataag

SEQ ID NO: 47067 - DNA, 701 bp, Zea Mays
atgatgacaagaactttaagcttagcgaaacactgaaaactcttcgggacagatgctcagctttgcgacgcaatgttcctctcggttgaagggcattttcaattctgttggagctacatccgaggaagttagtcattctactgaagatatttgtaacactccaggttccacaaacaacccggtatgctactgtactacacttccgacgtccatatataaaatttcggcagcatcccctttgcaagattgcataaaagagggagcaacaaggtataaacatatatcatgactaaaacatactaagtattattactcggctaacaaggaaagataaacatacgacctgaactgaattaaccagtgcgcatgaccatataaaaaaataaacaaacttcctttgacaataagtttctaattaaatcatggctgcgcctgggcagcgttattgtgagagtgaaagtggacgtgctgctactcccctcattcccaacatgtatcaagtacctgcattgagtaatgcaagagtgagatgacacatctcagcaagtaaaataatatcaaacagtttaaccacataagaacattgttttaccaccacttaattccacaaccttcttattacgaaggtgcagcacgtatacaacgtacaacgcacctagttaccacacctcgtaggtagaaaccacaatagtaacatagta

SEQ ID NO: 47068 - DNA, 201 bp, Zea Mays
cgcttctatatatttggttttgaaggtagttgtgttctgtaattgtctctatttgtcaatttcattttagaagtaattacttttcttttttattttctattgttgttaaattgtgctctgaaatcttttttatgttaaacatgaggagaatgctaaattgccaaatgaattcataatgcagacttaatctcttgtgatgtg

SEQ ID NO: 47069 - DNA, 352 bp, Zea Mays
agttgttggtgatggtaagtgtgtgcaacgacccgctggttctcggctggttgagctctagacattccgtccctggtggccttggtctacggatagtcccttgtttggtgtgcgcagtcttcgtcgtgaaacaagcaatagaatcttcgtggttgttgtgtccgtccacgacctcttcctcttgcgccgttgccgcggccttggggggtattactgacgacgagtgggctctccagctaggtgttgattggctatggtgtgcacctgctgatgattgcgattgtcccggtcggagtctggctgcgccggtctggtccaggttctactggactgcggagggtccttgggcttc

SEQ ID NO: 47070 - DNA, 223 bp, Zea Mays
tagaaattgaaatcgccttatagggcacaaattagggtttctagggctcttattagggttttgagtgttctagggtttgtgtgccactcaaatccatcaagtttagtctcttatgaacatttccactaacgtttgatataatactcaatttggtatcacacatacccacatatttctataccttggttaagtaccatattctaaggtttagaagcacttcaag

SEQ ID NO: 47071 - DNA, 334 bp, Zea Mays
ggatgatgtaattttttatgcatatggctaggtgaataaataaatggaacacccatatgtatggataatgggccggctaggaagaattggccaacaagctattttttgttttttttcttttcctttctttttttgattttagttctattgtcatattcaaatttaactaaatttttaattcaaatagtgtcggcgtttcgaccccgaggggtccctggaccgacgagtaaatttgtcgctgcgcgtcccagcccagatgggttggcgcgagatggaacacaagggaaaacgtggctcgtattatcccgcgccaggggggtgtgctcgtagtagg

SEQ ID NO: 47072 - DNA, 671 bp, Zea Mays
ggaaaacattgtcaaatcatgtttttgaggaccttcggaggacgaaggcccccaacactccttgagtaagattacaaccttttgttgttcctatatgtttttaagagataacaataatacatttggctcttcttccatcacatattctgctttcatatcaggatgaaggtgatgtcttataatgtacaaatccttgtacttataagcatcatgtagtggctcaaccctctcattagtagggagtaatgcacttagaatattctttgaggctaagctgatcttgatatcaaatgcccaagtaggatagttgtgtccatcaagagcaagttcttcaaactcacgggccatggttctacacaagcaaccagagattttctttaggaaaacatcatgggtgtgttgtaatatgtgtggtgttcacaacatatatgtattcttgatcgtattggatttaagaaaaacccaattaagatgaataaaatgcaatattgcatagagtaatgatgatttaaggtctcaactacgaagtgatgcaagagaacaaaaaattcatgatgaagttaatgatgtagcatataaaatattcaaatgaaattaagtagtaacttaattagatgaatataaggatatcatcaattgtttatggaattgaataaataaatattcttgct

SEQ ID NO: 47073 - DNA, 232 bp, Zea Mays
aatttgttggtgtattgtatcaaaaaattaaattttgtgtgcatatttgaggtggtctgccttcattttgatgataatgattgtcctccagtacaacttgtcatatcattctgtcacagtgcctactcatgattgaaggatgatatagaaaatgtggtggttgctcattaaaaaaatccggtaaggcaaagacatgatttatgatctcgagtcttctatttctaaaggtaag

SEQ ID NO: 47074 - DNA, 814 bp, Zea Mays
ctgacgtccatatataaaatttcgacagcatcccctttgcaagattgcataaataagggggggcaacagggtataaacatatatcatgacaaaaacatactaagtattattaattggctagcaaggaaagataaacgtacgaccgaaactgaattaaccagtgcgcacgactatataaaaaacaaacttcctttgacaataagtttctaattaaaacatggctgcgcctaggcagcgttattgtgagagtgtaagtggacgtgctgctactcccctcattcccaacatgtatcaagtacctgcattgagtaatgcaagagtgagatgacacatctcagcaagtaaaataatatcaaactattcaaccacataagaacattgttttaccaccacctgattccacaaccttcttattaccaaggtgcatcacgtatacaacgtacaacacacctagttaccacacctcgcaggtagaaaaccacaatagtaacatagtaatgtcacacttcatatattcctcatgaatgcaaatgtctgcaaatgcaaggatgacttctgccttcatacctctaaggatatgaagctgcatcgtacccctcctcgggcaacgtacgatgctaaaaatgtaccggtacggtcggaccataagatcacgacataacttcaaaatgcaagatggatgatgcgatgtgcatgtcatgcctacaacacttcatataacgtgattcaaaaagatacttcaacttcatctaagatgggaatcaaccacatatatcataaccaaattatgatcatccacaatattagacaattg

SEQ ID NO: 47075 - DNA, 392 bp, Zea Mays
tcagcatgtcatatattattgcaggtggtttcaacttcagaatagagatcttcttctatgacaagagtaaaggtgtaacccgaaggtgacaaaaatgggcgacaaagctatagtcaagggactttggctcgggttgatgacgaagaccaaatacaacagtgaccaaaaaaggataaagactatttagtccttaatgtttcgtattataattgtagacggatgacaaggacataagtgtacttttactcgggctacatcccgtgcctataaatacatgaatagtagcatcgtactattcatgctggattgtatttactttctcgtgtcttcgccttcgagcaagccgaaggtatcaatgtaatatgaacattattgatatgcgtatatgtttt

SEQ ID NO: 47076 - DNA, 414 bp, Zea Mays
ccaatactggtagttcaaatatctataagcacttttttttatacaaatcaatactagagaaaatgtggcatcttgaagggtatggcgcaggctgaaatgatgccatcgtgtagtagctggagtagtggagcccaggaccaagaatatattttaatgaaatataaaaaggcgaatttgaatacaagcacaataagcacgtactaggatctattttaatgaaatataaaaaggggaatttgaatagaagcacaatgagcacgtacgtactagggtttaatttgaagaacctaacccacgcgtggatataaaagtcaaaacaactagtattaaaaacgttgaaatccaagatatagattagcatacgagtacgagtacacatatgcgtccccttatgctttgcgaatgcgcatggag

SEQ ID NO: 47077 - DNA, 233 bp, Zea Mays
aagaaagaagccatatatacaataaaacactggttcatttgcggctttctaagatatgtgtgtgacgacgacagattagaacaagatacccgcgatgctacttacagataaacaatatataccattgtatatatattgttctaatatacaatggtcgtaggtccaatcagtctcagtagaagctatcaaaaggtttctatgaacagctaacactatatgcatgcatatgcaaa

SEQ ID NO: 47078 - DNA, 562 bp, Zea Mays
caattctgcagataattaacgaatacggtattttatttgaagaattcgatggagcgagcttacagccttatactgacgccttaatcaagaatggataccgacaacacctggtcacaatattcgagttggaattcatgcaacatgtgaggaaacaactggtattacatgtctggacttaatatccgtgtgtttggttgtctgtatttgctggtgcttgcatcacgcaatgcaatgagttgatgtatggttgttgtcaaccagactctacgcgtgtgagatgtgtgtttggttacttatatgcagatatagagtcaggtttacatgatacttaaagcaccctgtaccagactctgcagacgcgagcaaattagtcgtatctcttaagccagacttccgccggcgtggcgctacgtggagaaaccaaccaaatgtacaggttttgctaggaatcagcagcaccgccaaagggactggactgtcctcgtggctactgatcactctctctctgtgaccagacgccatgactttgagcaagcttactccgaacgaacagacacctgac

SEQ ID NO: 47079 - DNA, 330 bp, Zea Mays
aaggactcgaaaaagctaaggctagataacgcaactcgcaagctttgtggatgtaaagtaaagccagtaagtaaatcgggcgatgagacgcacagaatcttggaagggacctcaccactcacactgacggcacggcgccgggacggtgacctggcacccttccccaatccccatcttttgcacggagccagggacggcctcaggggagtgggacccccgggtgcgcggactctaccgaccccccgtattctggttcctgctcactccgatggcgatgtccggacgccggagggcgaccgagggtcggctgacgggggaggtaggattccg

SEQ ID NO: 47080 - DNA, 355 bp, Zea Mays
tgaaaatccaaataaataatataataattattggtccaaaaataaatattttagttataaataattttggtataattattatgaatttttataatttttaaaatatatttatttatattttgaaatagaaaagaaaaaaaaataaaaaacccaaaccctagtcgctcggctggccaaacaggcccagccgaggcccaaccgcgcgcgccgccaggggagcgtgttctcccccctcccatttgtcacgcccgttcgactgagaagccgttaattcgttgccatttctcttctcctctcccccattttctctccccgttaatggaggtaacgtcgctattaatgcctgagtgatgac

SEQ ID NO: 47081 - DNA, 261 bp, Zea Mays
tcaggtttcatctattcacctcgctctaggcggctttcaattggtatcagagcccggtgcttcattagagtctatcaactcgaagtgatgtcgggagaacacgccaagagggagataaccaccgacgaaaagcccgaaggcttaggacggaagaatgatgaacgtactccgtcaaaggaggccggcgacaagcacaaggataaattcgcttcctcgatcaagtcacataggaaaggtgataagaagaaaaagaaaatgaag

SEQ ID NO: 47082 - DNA, 1658 bp, Zea Mays
gtcattcatatgttatcattatataaatttggatattaaatatgatatttaattacatttataccttcggcttgacagaaggcaaaaatccaagtgttgcgtgcgagcgattacaggatagcgtgaacagtatgggggtactgttcatctatttataggcacaggacgcagcccatggggaattacattcatgccctttgcaaaggtttacaatcataatacaaattatcatgggtcagttggtcatttcatctttaagtcggtgcatttggaaatatgctctgaagccttttgattgatagcttcggcttcgtgtcaacttccgaaggtgtttcttcttatgagaccttcggcgacgaagcagacccccaacactatataataggagttctgtacaaaataaataattaattacattataaggagacaacggtctagcaacccaaagttgactgggagacgacggcctagacctctcacgaactcatcacaacatcctccatgcctcatcctgcggtacctgttcttgacctatggggggtgtgagacagcaagagtgagctcatatacgttcatagctcaacaagttgtggggaataatgtgcatgaactcgccaaaggtgggagctcacgtgaagtgtaaggcttaccaaagaggatggttagagatgagcattgcttttaaagtgggtcaaaattttattagcaattactaagtgtaagtaaataccaacccaattaagtagtagaacaaaagtaataacaacacctgcgatgcaatgcatatgacaaattgaatttagttccataaattaatcatgtgagggtccgagctgctcatgaccgtgagcacggttgatataccagttttacactctgcagagtctgcgcatctttacccacaagtcatgttacccatctgccacggggttgtacgggccccatacacctctaccaaggaagcgaggcagggtaacactacggggcctttacaaagttccactagcttcagaaaacccgctacagtttataggaagctccaatgcagggatttctcgcctgaccgccatcgcaggaaaatcaacccaaggacctccctacactgaccactcccctactgcccttgcccctttcgggtaaggtagtcctccactagctttcctagttaatcagccaagggcatcccatactacccttgtggtagcactgttttcccgggtggtcgctccatgttccaattaacataatgatcttatcatgaacagtaaataacaactgataacaaaagtataatcatgaaaaatgtttatctctatacccaaatctacatagagcaatagcaggtactacccaaatattcagtggtgaacaaggtataaagatagtcaaactaaggtaacctattgggtcccatcaaaattaatctatgcagatcattatgattaattagaacatgactgggtaaaaagaagtgatcaagggcataacttgcttgggacttgagattccaggtaccaacttgctcttcaggtgacacgtgtcctcactgctaaacatagcaatacagacaaacatgtataggcaaaattaacatcacatcaaacataagaataaactgcataataatattctacgctgcgtaacgagatcataggaac

SEQ ID NO: 47083 - DNA, 581 bp, Zea Mays
accggtactcgcgcagcagagctggctgcccacgggcatgcggatccgcggcggatccccaaccctggtgagggattccagtcgtcgcttccatctacggcgctcgagctcgaaaccaccgtgcaccgcgcattgggatggagctccccggccaagtccgaaggtggaatgggctagcggccaccatcatcctaatggaatcggccgacggcgcaccccctatccccagcgccaagcttaagattcggtttatggtgagggtcatcgggtgcggcgttcaccttatagatcgatgcgaggagatctcggtcaggaggttggaactgctctccgaattcccacgcgacatccacggcgttagcagcgcgcgcgagctgcgaggcctgttacgcaggaaaggggaaggagcatctaacctcgtgggcccacaggttatagggtgtggacgcgcgagctatggcccagagagtctgacaggtgtgggggggtaggactgccagctccatatggcttgcaatcggaagtgggctacgcacggtgaggttggtgggccgaagggcggagaaaaacggcccaggtag

SEQ ID NO: 47084 - DNA, 244 bp, Zea Mays
gccaacacaaacataaaaccgtcatcacaaacataaatatccatcacaaacataagtgttcaacacaagtatcaaactcaaacataagtatcaaacgtcgcaaggtctcacataagtctcaaacacagacataagtgttatacataagttctgaagtataaaacaatgaaaacacaacactcatggaggtgggcggtttgaccggggctgcgttgggctgaacccttccgaaggcgggttgttg

SEQ ID NO: 47085 - DNA, 1192 bp, Zea Mays
ctagccgccactttgatggagccagacgcaccctcgcttcccctgcacagccatcgccgccgccattccttctccctcctccctgctctagccaccaggattcgaagccgaggacccgcgacaccaggccgagcacccctgcccgaatgtgccgagcgcgcgaccccgccaggaagccccagccgcgaccctgcgagacgacccgccgcccttcgccctgacgcgctccaacccgcgcccctgcagcgaccgagccgccccatgcgcctagtgacaccgtcgcgccgctcgccctgccgcactcggccggcccctgcatcgcgcacgcgctgttccgcgtcaggccgaccgcgaccgaaccacagcccgcgccgtgacaacaccgacgcttcggctggacccgaaatcgaagctgtcattcctcttccctccccattcctctccccgttaatggtgataatggcgacgttgtgatggccgtcgtttcttcttcctccccggcaccctctcattttccctctcctcctctataaattagacagtcatgctcatgagctctccctccccaaactcgccatctctttctcgctctctttgctctcgccataggccgcccccgcatcgtcaaacgtcgtcacaagagcttgtgcccatcgcgccggagctcgtccgcgcagcacctcggcacccgcagcaacgccacgtgcccgtcgtcgagcccctgctcacgtcgtgcccagctcgccgtcgtgaagctcgtcgtgggaccattcgcatccgtacgccgttcgccatccctggagcctcaccggaattcgcgtccaacgccgagcctcgtccgcaccgcgaccgaatccctccattcaccacaaggttgaagacaacccgaatatttttataactccaaaatcatgttttaaattaattcatgaatttggtaattattcgttgtgatttggaattcatgcgtaaacgattgattttgagtatttgtgcgatgaattagtgaatgtttttagacgtgatattggtttacgatttctttagaatttgggattggaaagaggaatgataggttttggtagaccatgtgttagtgatgaaaacactagataaataatatgttagttaattttgtttatgacgaattttagaatttatctaaaaaattatattcataagtgcatttaaa

SEQ ID NO: 47086 - DNA, 315 bp, Zea Mays
cttgattcctaaatccagcatacccttgagagtcttttctttagtcggataagtcttgctgggtaattccataatcaaggttttattccctgttgtttttcaggttatagttttgtgctgttgctgatggtgttaagtgccggtgggctcggccttcttataagtctaagtaacccttctatacgtcttactgaggatggtcacttgagctagcatatatttcaaacttatacttttgtaatcactctgatgaatataatgaaaaaaatttgtaacttgtaaaattttggtaataatatttccgctgcaaaaata

SEQ ID NO: 47087 - DNA, 887 bp, Zea Mays
cttgattcctaaatccagcatacccttgagagtcttttctttagtcggataagtcttgctgggtaattccataatcaaggttttattccctgttgtttttcaggttatagttttgtgctgttgctgatggtgttaagtgccggtgggctcggccttcttataagtctaagtaacccttctatacgtcttactgaggatggtcacttgagctagcatatatttcaaacttatacttttgtaatcactctgatgaatataatgaaaaatttttgtaacttgtaaaattttggtaataatatttccgctgcaaaaatattggtgtgtgtgatttgtgctacttaatatcgcggttctggttgtaggtggtttatccgatgtccttggggcaatcgaacggatcctgttaaattatatggtacacatgcatggccgtctgaggtctttaggacaaggacaggtgcatgtgggcccgataccttgggaggttctgccacaaatgaccctagccgaattactgacacacggattcttgaagaagacatgttgagccgaatcgacttgatgttgagaggcaagatttcgaatgttggtgctcccttatcgtattatgcctggaatcttgtaatacccaaaaatgtatacaaagagaatagagtaatctccttatttttgtgactaccatttattggcacatgttaaacaaacatatctaaaataaaacaattaacaaataacacactactaaattatgcatcatgctggcttttgtttgtttgtgcaatagatgaaaagagtaatctcattaatggaaataaattaatgtcaaaattaaggatttaatacctaatttgagagtttgaaaaagagaagatatataaaatataaag

SEQ ID NO: 47088 - DNA, 269 bp, Zea Mays
gccagaggcagtaataaaatcaatcgtaccccggtctcgagtcggcaagcctgagcagcatcaggacacaaccataacgagcgttcctatgaggccgtagggggagggagcagtgaaagctcgcacgggcgcaccgggtgggtggccagccgccagctccaggatcggaagcgattgagagaagcaagcgcgagtcatacgcgcggcgccgtgatggtgaggacgaggcaggcaacagagaagaggaggaggtgaggcatggagaagcg

SEQ ID NO: 47089 - DNA, 305 bp, Zea Mays
ggattcgctgtttttaaaattctcaaattcggcttggaaataggacttttcattttgaaaacatttattccgattttagggcaaacttgcagaaattccagaggacatgtcattgcacaaaaaatctgaaacttggtgtgttttcttcttatgtgctgctgcaaatgagaaaaatataaaaaaaatatttgaaaaaaaaatcgcaaaaaaaagaaaagagtagcacataaacagaaacacaatgttctatgcacctctgtgattattttgccccaagcttgtttcttgctgcacctagatacttg

SEQ ID NO: 47090 - DNA, 312 bp, Zea Mays
ctcaaacttaatactttaattgcacaaatatggtttgagaatgaattagtcacaagtttgaatctaaattagaatttaaatttgaattggtgaaataatgggaaaacagaaaaaaaacaaaagaaaaaaaagaaaactgtatttgggctcaaactccctgagccggcccaccactagccacccgcgcgcaaacgtgttatctgccacttacacgtgggcccgctcggccagtggctcactcgcgagcgtccgctgcttgtgccactggtccgtgggaccctcaagtcagctcgtctcccacctccttccccg

SEQ ID NO: 47091 - DNA, 264 bp, Zea Mays
accagtttttctccatgttccaaatagctttagggctaggtgactcaaccaaacttatactcctcatgtggccctataactttgttataataaccatcttctaaatggttttagatcagaagttacaagggttcaaatttgactagtttatattattttcagcaaattccaaaatgaacccaaaactgaatttttgtacttaactccaaaatcttccacacaacttgggaatcttcaaataagaaagttattcacttttccaag

SEQ ID NO: 47092 - DNA, 503 bp, Zea Mays
aacaacacttctgacatctatatataaaatttcggcagcatcccccttgcaaaattgcataaatgagggggcaacagtgtataaacatatatcatgacaaaaacatactaagtattattaatcggctagcaaagagaagttaaacatacgacgtgaagtgaattaactagtgcgcacgactagttaaaaaaacaaacttcctttgacaataagtttctaattaaatcgtggctgcgcctgggcggcgttattgtgagagtgaaagtggacgtgctgctactcccctcattcccaacatgtatcaagtacctgcattgagtaatgcaagagtgagatgacacatctcagcaagtaaaataatatcaaactgttaaccacataagaacattgttttaccaccacttgattccacaaccttcttattacgaaggtgcaacacgtatacaacgtacaacacacctagtcaccacaccttgcaggtagaaaccacaatagtaacatag

SEQ ID NO: 47093 - DNA, 1341 bp, Zea Mays
atacaacctattgtggttgttcgaggaaatgagatggtattggttatattgggactactgagttctatatctacaagtatttctgatcttgattgtgatttttttaaaatgttgattaattcaatttgtggtttaaatatctcatcaaaacaattagcttgctgagatgttacatctcactcttgcattactcaatgcaggtgtttgttgctcatcaaggggagtgggaagtagcagcacatccatcttcactctcataataacgctgcctaggcgcagtcatgatttaattagaaacttcttgtcaaaggatgtttgtttttaagtagtcgtgcgcactggttaattcagttcatgttgttatggttgtcttcccattgctagcagattattaatgtctattatgttttcttctcatgatatctatttatactttgttgcttcccccgtttatgcaattttcaaaggagatgctgtcgaaattttatatatgaatgttatatgtgtagtttagtagcattctggggtgtttgtggatcccgaggtgttacagcttcttcatcaactttcttcacccagagagtggcatagaactgagccaccacttcgtcgttccagggatattccatagtcattatgttcttcaacccctttctctctaagttgcggagagctgatgtcatgtcaacatctcccatattctcacacccctcccagtcaaaaacgatgtctaacgactgggtgcttcttattcatgatggctgaattataaaaatcagcctcaaaaaggttctagaaccgagggtcctggacaccaggatgtctgggtgtgagagagggattagtgaaccttaagcgttgaagggctccacccccttcaacgagaagtcgaccgaaggttcattcggccacgggacatagtcgccggatgcatgtggagaccggtgatgaggagagcgtcggacgatggaggttcgacctcgtcgtcgaacgctccatcctcctcctgcaatggagggtatccagcggaggaggtgctttggcgaggacgagtggcgccaacctttcgacgcccctggcgcgcaggttgcgagggcatcgagggtccctccccttccaaacggccagagccttgtcctctcttggagagagaacgacgaggcggaggagaaggaacaggtgattcctcctggatttcgtcggagtcactgctgaactccaccaccaaaggattgccgtgacgcaccatcttgttgagaagctccgagaagatgaacaggtgaaatgcaagtgttttaggaggctcaagtggctggaggactgagggcttgagtgattgag

SEQ ID NO: 47094 - DNA, 140 bp, Zea Mays
gtccggcagctgggtatattcttcctactatatacatgctctctgtgtgtaattcagtataatacccagctatagctgcaccctctagcactacgccctctctagctctccgcggtgttctagctattggcatattgcag

SEQ ID NO: 47095 - DNA, 199 bp, Zea Mays
atcaccttgggttctccccctttccttcctcccttcttccctccaccaaaaacaatcgaagatttgcaccacgcgacgtagatccgagcggcaacgaaaagcaccttgggaggaggagatggggggcggctagggtttggtgagtggctggaagagtttggaaaggaggagatgataggggggcggcggccaaaggtgg

SEQ ID NO: 47096 - DNA, 918 bp, Zea Mays
gtgatcgctccatgttccagttaacaatatgatcttatcatgaacaataattaaacaacaacataattagaacatgatcataataaaatacttgtttcccgaaaccaggtagagcaatagcaaagctaccgaataattcatctgtttgcaaggtggggaataaacaatgctagggaaacctattaggtcccatcaaattgacctgagcatgtcacagtgattaacaacgaacattattaggtaaaaaagagtgatcaagggcacaacttgccttagactcgagattcctaggtactgacttggtcttcaagtgactcgtaaccttgctgctactcgtggaaatacaaataaacatggcataggcaaaattaacatcacaccaaacataaaaacaaacaacgtaagaatatcctacccgttgctatgaggtcgtaggttcgagaacgactaaaattggagttataatgaatgatatatgagtttccgaagttttatgtgcttgaataaattaaacataggctaaaccaattaagtgctcgattttgaccatattttgcataacaaaataaggttattaaattgtagttaatattaatacgaacctaatgcatctagtatggataaaaaaggaataacaatgaattaattatgaatttaataagattttggaattatttctatactagaaaccattttctatatgaatttacttgatttatttaatccatgtactgtgggtcctatttaccagaagctcagggtctcttctataagaatgaggacttgtattaaactactctatacacagtgtgggtcgcgggttatttacagcagcgaagggatacgagcagaatctggttcagcgtcccctcatcgagggccaggattagatctgacccatccccacaccaatacact

SEQ ID NO: 47097 - DNA, 495 bp, Zea Mays
gcgctttctacttccactctggtctgctcaatctccattgctcgcccccaggttcgtttacctccaaagctgatcgagcactacggcgcgactcatcaatggcagtcgcccagccggaacgacgaccagcgcaccaatagcccaaacaccatccacaccccacaaccaccatgattaataggacagtttgattaagttaacttactggcaatcgatggtgcctgagagcagacgagtgcccgcggccgcttggtcgtgaccacggcgtcgttgagcccctctcgcccaaggcgaggaataaggttctgttactttcgacggtgacgatttctcctgtttgcaccatggcgaatcaatcgatcctcacccgtttatgccctacggtcacggattcgccatgatgcagatttccatagctccaagttggccgcctgggtggtgccgctgcccgagtcccatgtgggtgcgtcacacgtggtggtgtgggcgcaatcg

SEQ ID NO: 47098 - DNA, 377 bp, Zea Mays
tcggcgcggggcagagagtcgaggttactcggcggggagggcgagcggtgtcttggcggccggcggggctctgctcgggataggaagcgagtgaggagagagagagggaaggagaggtggggagagaggagggagggtgacggcggcttccaggagagcaggggacaagggcggcgtctaggggtgatgttggctagggttagttgttgggcctaatgggccttaggttagttaggttttgttttttttcttttcttttttctaatttcgaaatacatatttaaatactcctaatatttatacaaattaacccaaaattatttataaatagaatatttattcttgactaataagtatattatttttgtgaattttta

SEQ ID NO: 47099 - DNA, 78 bp, Zea Mays
aggcgctggcccagtttctgccatccaccaggcgtcctcagaatacggtgcagggctgccgagcagcgagtagcaagc

SEQ ID NO: 47100 - DNA, 280 bp, Zea Mays
acatgcgatcgaggttttggactgcgggttggccgcctggccgcgcgctcccatctcatgccagcggcggtcgcggtgctctaggctgacacacgcgacgagcgcacagagaccgagtccgaggtgccactgcagccgcgtcgctttggtgctcactgccgccgccggcttttctaccttcttcttcttgggaattgggatgctctccgctgctccggtccgttggctcgtggggccatcgattgcactgccgaactggctggaactacgcgtcgcaaag

SEQ ID NO: 47101 - DNA, 132 bp, Zea Mays
tagacacctcacatatatataacatgttcatcaattattttgtaaatgatatgcatatagtttcgttttgctggaatatggtagctcgtttagctcgcgagctagctcgttaacgaaccgagctaggatgtc

SEQ ID NO: 47102 - DNA, 3400 bp, Zea Mays
ccacccccctttttctcccttggcttggacacccctccctttcccccttggctggacgcccctctcctcccattgcagtcgccctccattgcttcctcctctctagatcttcccctacgcagcaaggatcgagaagaggaggagcacgttgaattgaagaggaagagaggatcaaggagatgttctaccccagctcttcttgcatattttcttggggaaaccctaggtaaggatgggatccttgttcctccctgtgcttttggaggttgtggatcatggggattaaaggattagatgtggggttaggttttgacctcgaatttagtttctgcagaatgacagattcgataatttctgctcatggcagcttttcatggtcttagtggcctcaaaaaaataaaaagtctatctatgagttgtagacaatttgtagatctttctatggccgcgaagaacacctcaatcgaacatcagatcagaaagttattgcagtttgattatagcagtttttcggtctcataattctatgcaaaatctgttctcttaagttttaggcaattttatcaacagaattaaactttaggttggtaaaaggagttgtagataatgtcatcagctttccatattgttaaagagtgcattcatatgaattatgaaactccagttatgtttgttttattgtggttgttcctgtttgtctgacaaaaatgagcgggtctattcactggtgggtttcatctaataaatggccgaattggctctttcaactatggagacttttgtagagggataaaagttcttacttccagtagaatttcataatttttggacccatgttttgaacggtggtgctatatggggtaccttgggtgttttgcttggagtggtcgaattcgaggatgaattctttttaagaggggtagagtgtaatatcccaaaaaaatgttgaacaaaagttgattttcagtgcgtggatgagggaaagggttgtgggtcattggatgcaaagtcagaagccatctgaggcgtcgtttctttgtcccacaaaaccctaggtggccaccccttttccctttttccctctcttggccgccacccccctttttctcccttggcttggccgcccctccctttccccttggctggtcgcccctctcctcccattgcagctgtcgtccattacttcctcctccctagatcttcccctacgcagtaaggatcgagaagaggaggagaacgttgaattgaagaggaagagaggatcaaggagatgttctaccccatctcttcttgcatattttcttggggaaaccctaggtaaggatgggatccttgttcctccatataattatgtgcttttggaggttgtggatcatagggattaaaggattagaggctggattagatgtggggttaggttttgacctcgaatttagtttctgcggaatgactgattcgtcaatttctgtttattgcagttttctatggtcttagtggcctcaaaaaaaataaaaagtctatctatgagttgtagaaaatttgtagatctttttgtggctgcgaagaacacctcaatcggacatcagatcagaaagttattgcagtttgattatagcagttttttagtctcataattctgtgcagaatctgttctcttaagttttatgcacttttatcaacagaattaaactttaggttggtaaaaggagttgtggataatttcataagctttccatattgttagagtgaattcatatgaattatggaactccagttatgtttgttttactgtggttgttcctgtttgcctgacaaaaatgagcgggtctattcactggtgggtttcatctagtaaatggccgaattggctcttccaactatggagacttttgtagagggataaaagttcttactgccatcagaatttcataattttggattgagtagtttgggagatatcaaattttgaagttaactatgctgctatgtgaaacagattcagtcagttatcttgtaagatgttttagaacttatagatggcagaatttaattatccattgaatactgaagttgtagagtactttctgtagatactcctagagtattttttttatatcaccactgttataattttaaagatacaaaattaacaaatagcgctgctgctgtttggcatgtggttcagggtgggagtctttccaccgggtcttcgtttcaagtgtaggagcgatttgttgattgttggcaaatgtttgtaaaatatttgtactaagttttatgccctttagcaggtggctacactccggatcatgcctagtacagttttcttcttcgatgaaggcaagtgaatgtagcggtggttgctaccgttttgacttgttttttatcgcctacactctaatattcagaattatggaattctttcacaattgaactctatggtgatgctttacttgcttgtattatactgatgctcaatcatatattgatgatgattatgattcgagtatgacccatgagattatttcacacccctgaaggtaaacgaagtattatttgaggtttgtattgtatctgaaggtaaacgaagtattatttgaggtttgtattgtatgtgaaggaagtgaagtatattgataaatgcaacatgccatatacattgcatgattcacttgcatctgaagttttgtcgtgacctatggtccgaccgtaccggtacaacttagcatcgtatgttgcccgaggaggggtacaatgcggcttcatacccttagaggtatgaaggtagaggacatatgcattgcattcatatgcattcattgaattgatatttgcagatgatgtggttttatactctcagaggtatgaaggtagaggacctacacattgcattcctatgcatacattgaagtgatatttgcatatattgttgacgcagggaagtgttatacaacctattgtggttgttcgaggaaatgagaaggtattggttatattgggactattgagttctatatctacacgtatttctaatcttaattgtgattcctttaaaatgttgattaattcaattggtggtttaaatatctcgtcaaaacaatttgcttgctgagatgtttcatctcactcttgcattactcaatgcaggtgcttgatgctcatcaaggggagtgggaagtagcggcacgttgcacacactgtttaaagaaccaaataattagctttggttattgacttttgaggttcatattttgaaatatgatgtaggcataagctggttcattcgtggttaatcgtctttgatgagaaatatatcatattagtatgattcattttgtattgatatatacctcttttgcttctgcgatgcttataattacaaaggagacgttgccaaatt

SEQ ID NO: 47103 - DNA, 364 bp, Zea Mays
aaacgttcaagcagctccaaaagaaataagtggcaaaaggagatagaaaagagggaggcaaatggagctgggagacggaaaagactggcagtaaaactgtagagccgattagacaaaaggagaaaaaagaaatgaaaaaaaatttgggaaaaatgaatccaatgattttagtcgaactagatatttagccgaagcagcaagctcgaagatactgtattccaatttgtagacaaagctgactagaccacaaacaaatagatctggcagtgtcaagcctgttccacatcttacaaatgtgtagggaggatgggaatcacgttgcaaatcataacgcgtgtaagcttttccaggagacaacatgaac

SEQ ID NO: 47104 - DNA, 974 bp, Zea Mays
aaaaaaatgttgccaaaggttgatcttcggtgcgtggatgtaggaaaagggttgtgggccgttggatgctaagtcggagtcatctgtggcgtcgcttcttttctcccgcaaagaaaaccctagtggtggtcttttcccccttttgcccctacttggccgccaccccttcccccccctcccacacttggccgcccctctcttcttttcccttgggctggctgtcctctcctcccatggcagcccctctccacggcttcctcctccctctagatctccccccacgcagcaaggatcgagaagaggaggagcacattgagttgaaggggaagagaagatcaaggagatgttcttccccatctcttcttgcagaatttcttggggaaaccctaggtatggatgagatccttgttcctccctgtaattatgtgcttttggaggttgtggatcatgggaattaaaggattagaggttggattagatgtggggttatgttttgatctcgaatttagttttctgcagaatggcagattcgacagtttctgttaatcccagttttccgtggtcttagaggcctcaaaaaaataaaaagtctatatataagtcgtagataatttgtagatctttccgtggccgtgaagaacacctcaatcggacatcggatcagagagttattgcagtttgattatagcagtttttcagtctcttaattctgtgcagaatctgttctcttaagatttaggcaattttatcaacagaattaaaccttcggtttgtaagaaaagatgtagataatttcataagctttccagattgttaaagagtgcattcatatgaattatgaaactccagttatgtttgttttactgtggctgtttctgttagcctgacagaaatgagcaggtctgttcactggtaggtttcatcaagtaaatgaccgaattggctctcccagctatagagacttttgtagaggg

SEQ ID NO: 47105 - DNA, 286 bp, Zea Mays
attaggtcccatcaatttaacctaaatgtgccatggtgattgatagaatcatgaatattactaggtcaaagaatatgatcaagggcataacttgccttcttgtaacacccaaaatcctattttgggattcataagagtttttgccaaaagatttaagttacaatgtcttttaatagatcccttttcctttatgaagtctatctctctaaaataattttatggattggtatgcaaaacctagatctgaaacttaaaactaaaagttggaataataactaaaagaaag

SEQ ID NO: 47106 - DNA, 217 bp, Zea Mays
ctggatcgttgtcttcttatgatgtaattaattaactattttgtatagaactccattatatagtaaaggtgtgacattcatttctataccatgagtcatcatatgtgtgagacttgatcctagcatatatttgattcgcgctaaggtttggcccttaaatccgggtgtgacagaagtggtatcagaggcaatgttgactataggacgtaacctagat

SEQ ID NO: 47107 - DNA, 359 bp, Zea Mays
ttaatatttccatcttatcccaaccactttgcttatctcctcataaagtaacaaccatgacctaatccaaattacttatatcttatctagtctaatctagtcataccaatctattctagatcccatctaatctactatgatctaatctaaagagagttacctaacaagttagttaatactggtggaatagattagaaccctactcttataacacatgtttaacccaaattggatccttagaccaagtccgccatgcacaacaacctaacctacatattgggctgcatgacgtacctagcccaacctagaagcaaaacaacaagccagactcttcctaaactgatttagctcataatcac

SEQ ID NO: 47108 - DNA, 258 bp, Zea Mays
gtcaaagcagttgcttttagttagtcaggtatttattattaatggaagccaagttttatcatataaccaacccgtgaaccatttcctcatcgaggaaacaccattatcatcatcgaaccagaataataaatagaaccattgtgtctcagatcatttgtatctctaatcaaagaggatctcaaggccgctcataaccgtgagcacggctgatatatcagtttctaaccctctgcagaggtcgcacactttacccatgag

SEQ ID NO: 47109 - DNA, 487 bp, Zea Mays
aagggcatcccatttcaccctcatggttgcactgttatcccgggtggtctctcaacgaacaggtccttacggagaggtactcgggaaacagcccgagtccccttaaatgccacgagtatatcatcatatcgagaataaaatcgtagtatcatcattgtatctcatcatgttcattgattaaagtaaagcgctagcatgtagctaaccatagtaacccaaaaggtaaatcaaggacaaggtaaatagaaagctagtaaatccttaggtttcaattaagtagtgcgggacagtgaattataaacagataggacataatgggtcagaggacacttgccttcaccaaactgatgctcaggtcttcaatctcgtggaactcaaagaactggatcacttggttgcccacgcttgatctttgattcctcgaagctcgaaaacggatcgcaatctattcgcgacgcaaagcgaagacaaacaggcacaagcaaac

SEQ ID NO: 47110 - DNA, 152 bp, Zea Mays
tacctagcggcatgccaggaaccctcgcgctgtcgtctgaagccgcaacgctgcttggaattccttctctatcttctccttgtagcggtggaacatcacaacaaactgatcccacttctctgcgaaacggctaaaactctcttcgagccgag

SEQ ID NO: 47111 - DNA, 463 bp, Zea Mays
gaggaaatgagatggtattggttatattgtgactactgagttctatatctacaagtatttctgatcttgattgtgattcttttaaaatgttgattaattcaatgtggtttaaatatctcgtcaaaacaattagcttgctgagatgtttcatctcactcttgcattactcaatgcaggtgcttgttgctcatcaaggggagtgggaagtagcagcacatacaccttcactctcataataatgctggccaggcgcaatcatgatttaattagaaacttcttgtcaaaggatgtttgtttttatctagtcgtgcacactggttaattcagttcatgtcgttatggtcgtcttcccattgctagcagattattaatgtctattatgttttcttaacatgatatctatttatactttgttgcttccccgtttatgcaattttcaaaggagacgctgtcgaaattttat

SEQ ID NO: 47112 - DNA, 194 bp, Zea Mays
gtctggctttgcctttcttgacatacaacacctttccaaggcgagccacttcttgccttaattgctcattttcctttgcaacctcatccgaacatgtttatgcaacaatattctcaacaagagcttggttgcaaggggttagaatcatcaattaaatcaaagcaggaagtagaagcatctttcttaataatttc

SEQ ID NO: 47113 - DNA, 3785 bp, Zea Mays
caatgtttctatataattcatagtttaagacctaatggaatggccacacaagtgctctaaatagggcaccaatcgctgaaattcagttgtctgttaactgaacaaaattcagtccatgtaaacactgacagcccacttttgagtaacttttactccatgttctgggtcagatcaggcctaatgcacataacaaaatttgttcactgacatatgctcttcaactctcccatagcaaccatggtccaaagctgcctagaacaggcaacacacagccccaaaatggcactaaaaacactgatttcagaattaggcaactattcgaagtctgaaaatccagaagtctgacagtcccactttgaacacctttttctcctagttgcatatggttttagggctgctacatttcataaacattgttctcctatagttactctacaggtttgttatagcaactgtttccaaaatactcatggattaaatgttacagggatccaaaaacagataaacaaaattgttttgggctgattccaaaatgacccaaatctgaacttttgcaaattacttcaaattctcccacaccacttggagagctccaaatatgaaaattattcacttttccaagctccacgacttttatatacagacttttagcaaaacatagctaaatcttaaaatccacttttgggctagtttatagttgaaattggacttgatctgcttcaagtgcttcatcaatttattgcatcctactaaaaacaaggttaaccttaagctcaaaccaaactttggtgtatatagctcatgtccaaatttcccttggtttaaaagttgtttgcttatactagatttcaaacaaggtctctgaacttctcttgctctcttcgaaacgacacaacctcgcccttttctccaagttccaaatgcttctgaggccaagttgcttaatcaaattggtgctccaaatgttgctccacaagtttggtacaatgtcccttagaacaatatggattccaaaccatcaaagccctaacactaagccctacactcaatacaaaacatcccaattttgcaaattgttgacctagtgaatgcattctaggtgtatcaagcaagttaatgcaaatgttgatgatgacatgtcagagttttagtaatcgtaacaccaggggtgttacatccttcccccctaaaaaggaatctcgtcccgagatttaaactctaagccaagtaatggaaaaggaagtgtatcactggtttatttccccattacttttaaaagacaagaggcatacctctgttggtttacattaagaacgaaacacaccagacctaggtttacaagacactagaaactcaggaacatgcttttctagattctcctccaattctcatgtggcttgatcttccgtgtgttttggttccaccgtatcttgtaaaactcgataactttcttcgagtggcccgatccttttgatccaaaacctttatggaatgttccgagtaggttaaattcgattgaagattgacatttgaaatctcaagaacatgttcggggactcgaagaaacctcttcaactgatacacgtggaatatgttgggcactgttgaaagattctctggcagctgcgccttataagacagaggtccaccaaaatctctattccaaatcttggttcatcttactacttctagggtaattggagttccggactgcaactcgatcgcaaattccacgaccctttccggaggtaaaccaagcagattcttggggaacacctctagaaacttcttaacatcgggtatattctttacttctttcacttaaactcttgatgcagacgaaccttattatctcccaaaacagcttgactaaccaccttattataaccttcagttgaactggttgtcatcaggagctgaagcttcacattaaaaccacataggaagtattaccttttcctctcactagtatccacaaaatccaaaccatactgggataggtgtgtaaacctctcaaaatcctccattatactctctctcttttttgcatacattctgacctaagaactcattgaactttatttccataagggctttcaaaatatgatgtgcccgaaataccacacgaaactcaacccaagaacttaacgtccttctgcctacagcgcaaggtattctgcccaccaactaaacttggcttccagtcttttaaaaaaaagggaaaggtagcatagaaaggcaaagacaggtagcatgaacagggtagacgaaacacgtactaaacctactacatggggggtttaacttaaagttatatgtcatgatgcatgctcgtccgtcctattcgttctcacaatcttgccagcatatagtggcttgcacgctctatggcggtggcatacctactcagtccggagttaactagtcgtaatttcctagagtttagtcagtgtacctgcagaaaattccattacagcccaaaccccatgatgcaattcacacatttggtcacagtttatactccatatatttctatatggacgccagctcctcattaagcgccgagccacgcataggcgccgctgccacactttaaccacagggcagtccattgtggtaactatgcattacacttctcagcactcccatgtttgtatacccatacacatccatggggtattgaatcctagaaaagtaattactccacgttgcaaccttcatatatacatatgtagaatatgtatatagtctagtgccacatttaagcactcccctagaccgacgtttgttcggtcatgctctcacaactcacctttacctgagcgtcgatccattcaaaactgaatggtactaaaaataacattacacatgtatgcattacccttcccaggttgtgggttagtggttagcatcttaaactaagccacctgatagtccttagttttaaccacatattttttttacacttctactatcaggccttgattatagattcttaagtttataaaaaccatttagactcaaaatcattttgaagtttatcaaaggattactataatatccatgctaatgggggatcgctccgataccacgctgtgacagccctcccaagttatcgggcccacgtgcaccaatccttgccttaatggcctcgggtggctgtgcacgtgtaccgggtaacttaacaaggctatcgagttcgccaactggaactcatcatcccaaggatctcccacataacaggtatattacagtaatcacatttgatacacacacattggagatagagcggaaggcttttacaaagtacactttacattccagaactcaagttttacaaggtagaaagagatgtatttattacaagtcctgatagtacccaaagtgcataacttattacaataattggaacggtgaagcctttccataagagatacacataaacattctaagcttcaaggcctccacatgaagtaactaaccaaaagataaggaaataaaacttctcctgcaaaaacaacaggggataaaaccctgagtatgcaattactcagcaagacttacccgactaaagaaaagactctcaagggtatgctagttgattgggaatcaaggtaaggtttatcaatgatcaaagactccttttgcagaaaagcttgctaccagttgatccttaagccaagttttatttcactagttaggttattacctgcatctatatttgcctagtctatttcaagcacttggcctatactagctgcattttattcattctcatatttcac

SEQ ID NO: 47114 - DNA, 469 bp, Zea Mays
aaaaacaacaggggataaaaccctgagtatgcaattactcagcaagacttacccgactaaagaaaagactctcaagggtatgctagttgattgggaatcaaggtaaggtttatcaatgatcaaagactccttttgcagaaaagcttgctaccagttgatccttaagccaagttttatttcactagttaggttattacctgcatctatatttgcctagtctatttcaagcacttggcctatactagctgcattttattcattctcatatttcacttgctaactacgatgatggtcaccgggatgagtctccataaccgaggagcaacgacgattcgaaccgattatacccagctggggatctctaaccacacgacatatgtagcacttaacccttgcatacgtcaaccgttcccacggagtcctccactacatgaacaggtccgcgccacccgagagcacattacctacc

SEQ ID NO: 47115 - DNA, 344 bp, Zea Mays
caaagttttgctaggcgctaggcggaatctaggcgatgacccttagcctagggactagtccagcctaggcttgcctaggcgatgctaggcgtttttctaggcgttttgccaacttatataataatatatacatttatagataaaaaaatagggaaggaccagtagacatacaaccgtgtaggagagaagcaagcagtgggagagaagcaaacatgagaggagagaagcaggggtccagcgtccggtaggggtccggcgtcagccgtgctggagagaagctgcagccgcgtctctggcgtcagccgtgcaggagagaagggagaagcaagcgtcgaaaggggaag

SEQ ID NO: 47116 - DNA, 356 bp, Zea Mays
cgcccctcccctctctcttccactcttgcagccgccccaatccctctccttcttccccaagtgattgcagcgccacccctcaaccctagccccccccctcttcctctccaaggtggagcctccccgcttggtgtccgtcgtgtgggtgcgagtcttccatgggagtttggagggaggaagaaggaagaaaagaaggaggaaaggaggaacccaaggtgattttcgtgatcattttgttgtatttgtgctgcaatccaattggttacatgtttacctatgcgatttggtagaggtgctgtccagaaatttagtgggtggacgaacagcagtagttctagtgatttctgggaattttt

SEQ ID NO: 47117 - DNA, 968 bp, Zea Mays
ctcgttgcctcctgcgagtctgtggctgtgaatcttctaaggctgtgtccaacaaggaactgtaaatgagtctgtaccctatatgtagtagcggaatttatcgtcctggaagcctccaacaacgtccgctaaaacaaacgctaaaatagaggtcggcttccggagccgctaaacctggaaggctactgtgcgtccgctatccgtgttcgtcgatcctgtgctgtcgcacccgtggcagatctccgacgaggaggacgaccgcgtgaccaccgacgaggaggacgggcacgcagtcaccaggcacgggcgcgcagccaccagggacgcaggcacggcttctcatcggaaggagaagaagagcacgcgcggctgccggctggacggacgaccgcgcgaccaccaacgaggaggacgaacgcgcagccaccggagacgcaggcacagcagctcatcgaaagaggagaagagcacgcgcgtctgctgccggctggacggacgaccgcgcgaccaccgacgacgaggacggccgcgcagccaccggggacgatgcggctcgaacgacgacgactaggtggacctcacggtgctcggcgacggtggcaggttcgtctcggtcgtcttgctcgccgtgctcctagtcatccccgcatcccccgccatggtgcacggccatctacaggagcacggcaaggaagacaaatgctcttggaggagacgtacacgcaggagcaccattcccatctagtgcatatcacatgtttgacgtaatgtctatgtagaagaatacagacataatcgatgcccaatacaagttattttacgaaacatgatcagatagcaaacaattacaataatgtgtcactggtcgggtgtgctgttgatgtctgctctaggtgttgattatgctgttaatcggagtacttttttttgccatattgtcgaaatagttgaacatatgcaataattcg

SEQ ID NO: 47118 - DNA, 377 bp, Zea Mays
ctccgggcaaccctaatttgttgggcctcggccaatcccacctgggctgggtctatcagctagtttctccagaaagaggcaaacgactcaacacaactagcaaaagccccaaaaggctcaattttcctcccgaaagaccaaatttctcccccttgatagaggaaccgagaaatatcaaaatctctcccccttgttgacatgtgaactcatcaagcacaaacaagggtagaaagaaaaacttcccctcatcaagagaacaccccctgagaaaatgcagaaatgcaatagagagtaggaaatggagaaaatacaggagcttcaggagtataacaaccagaatgtaaaaatgttctaagtggtatgttgctaagtgtgca

SEQ ID NO: 47119 - DNA, 185 bp, Zea Mays
taagaataagatggtaaaatcatgtgcaggactgtgatgtggggcccacttatttagcgtgattattgttcttatgttgccacttgtgtgcactctacagtacttatttagattgttatctgattcaatagttggcccgagccaaattagttttttgttttgccacatttgacagaggaaacaca

SEQ ID NO: 47120 - DNA, 58 bp, Zea Mays
ttccccgtcccgggcgcctataaaaggaccgcccgagctccctcctccacaccggcct

SEQ ID NO: 47121 - DNA, 180 bp, Zea Mays
cacgagacagttacctccatttgcatcaccttgccccttccaaagaaagcctcgtctcctcttatcgattgccttaaaaacccatttagggagttctaatgcaagcataagatagatagggacagaagacaacactgtcttaaccatgacaagacgaccagcccggctgagaagattggc

SEQ ID NO: 47122 - DNA, 357 bp, Zea Mays
gacaacataaaataacaaagaatatattaatgctcaaattagaatttgaatcctaaaggaaattctagatttgaaacaagaggggtaaatacttacatataagatcaaacaaaaatataaattaattaagtcaggttcatattggtattcagaattatacagtagatttaagtatgaactccacacataagttcaaatttgggatttaaatttgaaatttaaaagggaaagtaagaaatataaagaaaaaaaagaaaaataaaagggtgaaaccagtgcctgggccggctcaacccattcggcccaattggcttcatctcgcgcgcggcccattcttcccactgtgctggctcgttt

SEQ ID NO: 47123 - DNA, 805 bp, Zea Mays
ctgtatgcatgcatgcggcatgcatctccaaattttggtcgcatacgacaatcatggcagttttccgcatgcagagttgtgacagattttctgtggctgcaatccggagctctctttgcggctagccctcatccggtagtattgcaccacatcaggttgaatctgttgtttattaattacgcactaacatttatattataaattcattttgtgttgttccaattgtgttagcttcgtagttacgtcgtttacatgttaaaaatattaatttatcgtaacacacgttttaattaatatactatgatggtcattaaaatatcaatttaatataaactaatttataatttgaagttgttattttataaatatacgttaacgtgattaatactatcacaaatgtttcgatttattacttgctcaatataatcgcgacatctgattagcggttctcatatgtcgcttgtttataatctgcaaattattatttagtcaatatattatgggtcgtaaaccattctcgactcgtttcagccgtgccaacttcgtaacaacgtcgatttcgtattagtaacgttattttatcaggccgcaagttttaactatttaattagttattcattcgatacttattaaaaacgaccttctaactaaaactactttatagtttctaactcgcccttttaaaattaaatgctaacttgattaataccgacttaaacacttttcatttaatacctgtttagtataatcgcgatatcttttagtgattatcgcgtgtcgcgagtgctgtcgtgcacgctgtctg

SEQ ID NO: 47124 - DNA, 190 bp, Zea Mays
ctgaagaaacaggactcgaccagccaaccagcgtcaacagcatgcttccagtcggggacatcatgcgactcacaaccagaattatgacagaccgaaccacagacagagcaagccacaagaaaaaacaccactgcctcgcccacaacctactacccaaaacagtcatcaaaagcagttgggcgacccatag

SEQ ID NO: 47125 - DNA, 369 bp, Zea Mays
attttctataagtctttgaattttgttgatgcatttattttttttttaaccttatcaaagttcttcaagataaattacttcctaggggtgagatgactatctgcccttctgcaagttctaggtctcttggttactacagtcaaattgattaggatgataagggaataagcttcaagttgttcgcttggttctaattcgaaatgacttgtattgttttttacagtgttttgtctctatggattgcagctggaacagttcgaacaactagctttaatccaaagaaaacatgttacttatttatttgtgtaccgtcgtaacgcacgggtattgaactagtaaaaataattttattcttcaaaataacctcac

SEQ ID NO: 47126 - DNA, 300 bp, Zea Mays
cgcggctgtgtttcgtttcgaaccgttggtacgtgcacagcgtctctcacgcatcgtacagtacagtagtgtcaaaaaaaaaaaaacaggagcgtgcagttatctgatcctaattcctgtaacctgaggtacattctgggagtccgagctatttctttcaatcaacgttcgcgttagaaatttgtttgatgacgatgttgcctggcgcattggacaaaagagataacttcttttattttgggaccatatacgactaggctattcgcaagagattgtaaaaagtagaaaatttagagtgta

SEQ ID NO: 47127 - DNA, 111 bp, Zea Mays
cgccccctctgacgcatatataggtcaccgtgaacccctgtgccaatccagtagccatggcgtgcagagatggaagggagagagaggaattggcctgccactcaaatcgtt

SEQ ID NO: 47128 - DNA, 174 bp, Zea Mays
cacaggtcaagaacaggtaccacaggatgaggtgcatggaggatgccgtgatgtgttcgtgagatgtctaggccgtcgtcgcccagtaaactttgggttgttggatcgttgtctcctcacgatgtaattatttatttattttgtacagaactcctattatataataaagttgtg

SEQ ID NO: 47129 - DNA, 389 bp, Zea Mays
attcatttattattatcttcatcaaacatgaataagcattaacaatattcatattacaatggtaccttcggcttgtcaaaaggtgagagggcgagaattgcgcgagagcgattacaatccagcgtgaacaatacgatgttactgttcatctatttataggcacgagatgcagcccagataaaagtacatttatatccctagtaactgcctataatcttaacttgaattattgaggactataaggtctttagcccctttcagtcatcttcagcttgagcttcgtcaatatgataagtcgaaggtccttggcttttagcttcgccgaccactcttcatctcccttcattccatcataagagaagttcttcatcccaaagccgaagcttcct

SEQ ID NO: 47130 - DNA, 224 bp, Zea Mays
gttgacttggccttcggttgcttgttctcttgggatgtggaaatgaaaacgcgtttcttcttcttcttcttcttcttgtttttaaatttaaaaactgtataaaatttgtttttcactttgtcttgttgaaaataatacatcggcccattttgcctgatttctctaaagttttatagcgctgttaatagctagtgatttaagtgctctattatagtggaaatcgt

SEQ ID NO: 47131 - DNA, 441 bp, Zea Mays
gcagattcttactgcatttctaactgtatccggtagcgcatgctttacagctttcgagtgcggacagccttataccgtatgcattgggccaccagtttttttttttttttttacagggctcccactgtctaaaaggctcgtttggttagaagaacgggagggactgaggtaaatccgtccggttgatttggtgaccagaaattacgaggattataggagattgaggagaaaactagtgatcaaacaaatcattaatccatgcttaatcaaataaaatataataatttcagtcttacaaaaatctaatattcaaaaaacaattaacaaaacaatgtaaggctgagatgttgtactaaatatgagtaaatatgtgtttgatttgttttttgctacgattctgtctccaaaagctaaacgggctaaatctacttaacatttttt

SEQ ID NO: 47132 - DNA, 405 bp, Zea Mays
gtaaatatatagtaaatccattaacaatctttaaacaaacaaagctatcctaatcagagcgcttaaaaccatgaggcaacataaaacagtcatgtcacttgtgtcattttttttcttttttttcttgaatacgcaggagttgtgtatcattatattaatagaagaagagtgtacatagtacataaggccaaaaaaggccgttacatagttacatgagggaaactgaagaagtggagacaacaacaacaaaacagagaacgaccaacagacaacaccatatggccactaaccagcacagcagcactaggcaacgacagacccttggccccaaccatctcccaaggattaatttcaattcctgacataatcataatcgaagagatgcttggcctaactccattgaac

SEQ ID NO: 47133 - DNA, 709 bp, Zea Mays
ataatatcattgtacttctagctatccttgagtgcgtgtgggtgtgtgggtttgtttggcttgtatgaggtttcttatcctcaccttttttcctcttaatataatgatacgcagctctcctgcgttttcggaaaaaaaaagacgtttaaccatagaatcaacgcagggtgaatgaagtggtgtcaaacatctgacgttctatatgaaaagagggtaccacataaactagaagggacgacaattagacttgctagttgtatgatgcagaatattggcctacaaaaagacgacatgttcggcaaataagtgttgtggaaatgtgtatgttgtgctggatttgtggttatacaagaaatgattgagtccggaatgatgatatatgttataggctagaggtagcgccaattaagaaaaagcttatccataatcggttgagatagtttagacatgtccaacaaagactttcagaggtgtcaatgcgtagtgggatcacgtgggagataactctcaccactagaccaagtatgcccttcatacaagataatatctatttcctacaaattagaagatcttgcttatcaaatctcattgtggtacattctgtttgcattttgtgtgggacatctccggcaacgccaaggttcggtgtccagcgggagtaaaatggctgagggttctatggctgtaggttggatcattcagttaaggc

SEQ ID NO: 47134 - DNA, 280 bp, Zea Mays
cggggactatgttctttggaactggacctcggtaaaacaaatcaccatgttcttccgcttgattctcatttgatttgttttcgccctctctctcggacttgattttagttctgacgctaaccccgacttgtagtgtgtgtttaaagttgaaaatttcagattacgcctattcacccccctctaggcgactttcagaacatttttgggtaaaaagtggtcaagggcacaactttccttcaatgagctcctgctcaacaacttctatctgctgggcaccagg

SEQ ID NO: 47135 - DNA, 308 bp, Zea Mays
ctgggcgaaagtctcacccccgacgaatgctgatgattgggccatcagagcgaaagtgtcacttggcacgctaatggtcccctagcacactaactgccatggtttcgagaacaggaagacaataagatctgtgtctgttcacgggacgctaccacggactcgctccatatggtgaatcattgggactccatgagagattaagacacgaagttatactggtttggattcacaccctacttcaatgtacgtgttacaacaggtgtgtttgtgtgaagaagaaagagggttctcccttttgtagttcaagg

SEQ ID NO: 47136 - DNA, 281 bp, Zea Mays
aaacctaattaatctaggattagcaaatatttatcctagcatcacgttgatgaattatatgaactaattaggcttaatagattcgtcataccgtctagtatacatatgtgcaatctgttttataaatacactacatttaataatacttttaactaacataaaacatcctacgtaacatggactaaaatttagcccattgcggctacgtgcccctcagcgatcgacagcgaccactgcaattagtcaaaatacgtgagatctgaaaaatccaaaaaaaaaaa

SEQ ID NO: 47137 - DNA, 360 bp, Zea Mays
gacgtggccggtgtgctttggtgcggggctccgggcgatccgccgtccgcgtgtggccatgatccgctcagggaacgcttggcctatcgacggtaggcgatcggagcgcacgggcgccggcgcgcgtcgttctccgttcatgcgggccatgtggccgcgctctcgtctggcgctatccgcgtgtgagatgtgtgtgctgcggtgccgtgcactgtagggcacgctgcagaggcgtagcaggatttttccttagggccaacacatatataactatatatatatatagttataatattaataaatagagtatatatatatatatatactctactgtatttaagtgtaaattttttcgtatgt

SEQ ID NO: 47138 - DNA, 479 bp, Zea Mays
atggtcttcgtattgttcattatttgttttcagcatatcggaggtgcatacatattgtcgtggtttcggaaacgagggacaataagatttgtgttcggtggaggatgctagcgtggacttactccgaatggtgaatcgctgttattcaacgagagatctgagacacgggggttatactggttcggtttcgcaccctactccagtgtagtgttgatcgtagtattgctttgagcatgtcacaacaagtgtgcttgtgtgcctagaggaaagagggcctacccttttatacctcaagggttggaccttataagggagatctgtttttttacatgttggcttataactgggtatgttagtatctctttagttgctttttggagtgttggcataaatcatcaaaaaagagagattggaagggaaatgtgcccttggaccatttctatttagttttagcgattaaatgctcaacacaatgtgtt

SEQ ID NO: 47139 - DNA, 279 bp, Zea Mays
tgggtctccacccagttccgtcgcttgatctgtgccctccgatgtgataatggccgtgagttcgacaaccacgcctctcgctctttcttcctcacccacggcgtccagttgcgtctctcgtgcccctacacctccgcccagaacggccaggcagagcgcatgattcgcaccaccaccaacatgatccgctgccttctcttccaggcgtctttcccagccacctactgggcagaagccctgcacaccgccacccacctcctcaaccgcctcccatcgaag

SEQ ID NO: 47140 - DNA, 122 bp, Zea Mays
gtgtttcccctggctagctcctccccacccaccgatctcgacttcctccttgagtctgatccaagtacccatccttcccaggcacctcgcctcgcacccttgcccgcaccttgcgcagcttc

SEQ ID NO: 47141 - DNA, 1945 bp, Zea Mays
ctaaggccaacaaaaggcaaggggaataataagacatggagggtaggggcatgagcataataaaggatggagctaaagcaatgattgtaactgacaagggagagaatgcgaccaaggtcaggataggtaaaacaccattctcaaatcgagatggaaaagatgatatctcaaaaggtaggcataagataacatcatggaaagatctagagattacaaaggtaagggaggtgaaaggcaaaaacacaccaaaagatagagttaggacaagacttgcaacgcgatagaggaaaaagggaatgaacaagagcgggataggcaagacatcactcttaaaatgaaatgggagaggaggctttaaaatgcaggtgcaagataagcatcatggtaaagatcaagggatgacaagggttaaggtgataacagacaaacacaaccaaggatgtattttagacaaaacttgtgaggcatcaaagaaggggaagcaatcaatggtgaagtaggtgaggcattatcctcaaacagcgatgaaaaagagcaggctttaaagggtaggttcaagataagcatgtgggcaagggcataggtatcacgagggtttaaaggtaataatggacaaggatgtagaagaggaggtaaatgggtataagaaccaaggatataaataccatagagggtggagttaagacaggacgtgcaagtgaaaaaagagggtacgtccaagggccagataggtaaactaccactctcaatttgaggtgtaagagcggagattttttgtgagtatgaataaagatgagtatcaaggcaagatcgatggatggcaaggtgatggtgatagaaaatcaaaacacagcaaaggatggaattaagacaacacttgtaaggtgaaaagaagtgaagagaaatcaagggagaggtaggtaactcgcaactctcaaactgggttgaaagaaaggggaggatttaaaggataaatttaaggtaagcatttaggtagaagacataaatatcgcaagggccaaaggcgataacagacaagggtgtaagagaaaagataaaggcatagaagagcaagtggtacaaatacaataacgaatggagttaagtctaggcctacacgcggtaaagaagaggatatagtcaagggtgagataagtaaaacatatctctcgaattgagatagaaaagaggggatttcaacaagcagacctaagataagtattaaggcaagatctacagatggtaaggatgatatcaaacaaaagctcaacaaaggataaagttaaggtaagacaagacttgcaaagcgacaaagggaaaggaaacgaataagagcaggatagggaaaataacactctcggattgaaatggaataagtgaggctaagaaataggtaaacatcatggtaaatatggagagaggtcaagggtcaaaggtgataataggcaaggatataaaggaagaggtaaacgtgcataaaaaaccaggaatctaggtacaatcaagaatagaaataagataagtcttgcaagaggtaaagtataggatataaccacgggtgagataagtaagagaccacgcttgaactaaggtgggagattggaggttttagataacgaacatagcgtaatcaccaaggtaagattgagagatgagaagggtaaaggcaataagaagcaaaagcacaacaaaggatgaggttacaaactcgcgagccaaagaagaggatacgaccaagagaaagaaggtatgagaccgaagaggggcgattttaaagggcaggtatgagacaaacatcaatgtaggatatagaggtgtcaagggtgcatatgataataattaaaaagcataataaaggatatagttaagacaagtctcgcaaaatgaaaaagtggagaaaacaatcaagggtaagatcggtaaggttccaacagaagggttgaag

SEQ ID NO: 47142 - DNA, 466 bp, Zea Mays
aaatgtttaaataggtagtagaggtacaagggtaagtgctttagattaagggataagggtattaaaaatgcaaggatacgagcatgtcagtaacaaaatggaatagagatggtcaaatagtagcaatttaataatggatgaggaaagagtcccaaaagactaaaggctatggtagggggcatctacaaagatgtcgcaagcacaagatgagatcagatctaatagattgatagaagtatagaccatactagaataaaatactttttggcaagtgggcatataggagcacaacatagaattagtcgaggtgactaatattttgaagcaaaatcaaggatgagatgaagtaataatcaataagtccttaaaacgaccaatgctactctaggtcagcggtcctacagtcagcacggctttgataccacttatgtcacacccggttttaaaaggtaaaccgaatgcgaac

SEQ ID NO: 47143 - DNA, 264 bp, Zea Mays
ctggcggttacgaggagttcggctgtttgttacgatatcaagctgagaggagagcatgtccgggatggcccgcacgtcagcgccctcacagatgcaagcgcttgcgggtcacacctaaccagcggcgaacgcggcgcgtggctgttgctccattccgttttagctgcgaggaggacgaacgagctgaccctcgtgctcatgcacaatggctcgccgtgaaggacaattgggttgctggtgaaggcacgtgacgacttctcatct

SEQ ID NO: 47144 - DNA, 1756 bp, Zea Mays
aatctggacggcggatgcgcagggacggtgaatcctcgacgaagcggcggccaggaaaagggacccgcggccacgacggcgggcgggagtggaaggactgcgacagcagccggagaagaggaaggagctggccgcgaggacagcacagcgacggcgcgacggcgacgaaaaattggatcagggtgggcttagacgtaaaccctaaccctaacctcctctgataccatgtgactaaccttggattaggcgagataatcacccccacgggtactgtagcatatatataggcatataggcaatatgggccttatgggccttaacaaaaatatccatctctggtggtgttttctttctgctctttgtggatctagaaaaaaaacaatggaatctagagaaaagttcgatgcaaatgcctgatcagtgtgagaaatgttgtctgctgctttctctctagtagtttcagtctcaaccagtctcgacgcattagttctcactttttaaaggaacaaatgggagaatctacttccttaaaagatgacccattctcaagcgctctccgcgatcccgctcttcgcccgccctacggtcgacgcgtggtgccacgggcccgaaactttcctttgattcaacggagcattgcgtcccgtaactattggcgtccgctgtccacgtcgtcccgtcctgccgcgccacacccgcaccccaaaccctaaacatcatttcagtattttggttggtgtcctttatgttgcggcgcgtactggttaggttgttatttagtatcgcattgtctccatgttcaaacatggtctactctactaacttcaagaagccatagatcgtccaataaaacatagcaatctgaaaccatacttcagagttccaaaataactgatatagtttctcacttattttatggcaagtgagctgttaccaaggccactttagctcttaagtcttaacgctctgcaaaaaccctctaatccaaccagaagtcctcagcatccttggctggttcctttaatgtatgccagtgatagaaaagatgcctttggatcataccatagatacttctcaccacactttgtacagccaagggatttccttgccccaacatccccatttttttttggcaaaaacagtattggaacaagatcatattcatacaaaaattacggtgtcttaggagtcaaaatagtttgtcgtacttaccttacatgcatggtttatataaaggtcgacctccacataatcagtattggctgtaggtcattccactatcatgtactcaatggcagcatcaacatcaccatccatttctcccaaaacctgtatggtggtagcagatttcacactagaagaaaaatggctaataacaaggaatataaatattctcctgcgtgttctagaaaaacaaggaatctaaattaaagacacaactgaactgcaaaaaaatttgatcgatcatatagttcatacatgctcagctatagcagtgtcagaacgttcagttctagtcatgaccaatttgactggtgtgtggtcataggttgacctgtgtgaagatttcttcacctcctttcttctagcttttggtgaagttggcgtcctgctcgtgtagccttaccctacctatgtactcttacgcattagttttgcaacacaggtcatgcattttgcctgtagtcaaggatggtgaaggtccaatcatgtgcatatttttggttttctcttgttaggatgaagagatctggat

SEQ ID NO: 47145 - DNA, 290 bp, Zea Mays
atcctcatcctcaattcctcttaaagttggtgaaatgttcttgtctttcttgtaataaaagtgcaagtgacactctttctcatgcatgccaacttggtcgtcatacacatcttcccttttatgcgtcatcatcacgtgtcgctcataactttcagttaatacattgtgatctttggacctcatgttactagtgtctctggtcactattaagttgcatgcaccaaccaattcaacccaaaagcttaagctgataggaggaagtgggcaattcacttatattatattctaac

SEQ ID NO: 47146 - DNA, 591 bp, Zea Mays
tgagccttgggtttcaggttaggaaaatattcataattatataaaggaagatgctctgaatatgaatcttccaagtaaagtagcagattatggcttcacaatccaaagagatggaatgaatcattgctcaaaaaaaaacatgatagcagtcaatttaaaacatgacgaggacggatttaaaacatgataacacttactagttcaagatatgtttgcagatctcatcgttgatcttatcagacgtaaacttgtgttttcgcaacttcctaagagaggtaaaatgtgtgtttgcaggcacaagcctcttgccaaacactggagaaatcatatcctgagaggacatgttgtctttgcccaacctcttttttcgtttgaggatatttttctccagcttgctctttctcaggtgataatgatcctttggaatcatccatctttcatacacagtctgctcagatgactcactctgctcaggctcttcgtcagatggggatgaagcttcgtcattctttgtgtcagttgatagtacatgctcttcttttttaccttactctttctcaactgaaatatgttcatcctctagagtcttat

SEQ ID NO: 47147 - DNA, 5929 bp, Zea Mays
ttggatgaggtgctggacgcaggggattcgggggtgcctgcatgaaacattgtgatgttaactgaagaccaacatagcaactgaactgaactcattttaactgaactgaactcaactcaactgaaactctgctacaccgaatcccctgctaccctgctacactgaatctcatgcaaccctgatacactgaggccctgtttgggaacaaagttttgaaaactacagtttttgaaatactacagtatactttagtcatgacaataccgcagtttacaataccacaattttgaaaactgaggtccagacctaagtttagaataccttaaaacaactatagtatttgcaatacttcagttttgaaaacagagattttagccagcttgtcaaacaccattatgtatataatactgcagtatttgagaatactgcagtattcttccaaaactgtgaaaaaacttcactcccaaacaccccttgaaacttaacttcttttcaactgaattcttaatcagacattggttaactatgctgctaccctgctactaactcaggccttccagtactccttttcaactgttacacagttacactactacaatctggtaactgttgattcacccatgtttttcaactatgctactactttcctaacctgaaactgaacactcttttcaacgagcactgcattaagcagactttgcctaccgaagttcacttcagtttcagacaatgaattcaaatagatgtgcccggacattgcttaactcgatcatctaatgtaaacaccccaaatctggattttgggattcaagaagaatttccaaggaacttagattaaaatgtcatttaatacatgttttcttattttgaaattatgttcttaaaaataaataatagtagtactaaatcttgaggtctcaaatttagatttgacttttttagtttaaattataactttgaaactcagaaaaataaataatagaaagattttctattttgagtgaatattcctttcaataatattacacttagaggcatttatttaaataagtaataaataaatgagtaaaatatgacttgcatctcatgctagagttatattgtgcattggacttgaagtttcaaattcaaaacctgatttgaatttaaacatgaaatttgaaaattgaatcagaaaatagaaaaaaaaacaaaagaaaaatgaaagactcacccgcgtcctgggctgaggctccctcctcggcccagctaccaccgcctagccagaccaaatcaggcatcacgcgccgcgtctccaggccgctgccaggtgggccccgcacgtaagcgggcaatcgtgctacgcgcccgcatcctgctcacgctaccagctgggacccgcgcgtcacaaagccatctcgcacgcaggtattctctcttggagtcgatgtcgtgtggggcctacaggtcggagctctcttctccgttcgttaggttgcgctgcaacaaaccccaccacaatcgtcgggcagctggatcccctaccgggttgttacgattcgatcgtcggtgtataaatacagccctgtgaccctcttcgcatccattgtgagccgacgccgtgggtgcctcatcgaagccatgtagagagcgccaccgagagagggagtagagagagatgaagtgccgccagggtcggaaagcaagcaggaccaaagtgtgggccacgaagagggttcagaggtgttcgtcagagactcaagagcctgttagtggcgttttcaagcctggtggcggacgacgtatggtggaattgctcgccggagtcgctggtagccgaggatccggcttgcgtcgggggtgggagtccctgcgccatattcgtcggtgaagtatgtcctaccacttttgccatcgattcctctacgttttgcaccgagtagtgaccagagtggagcacgggggcatcagggtgtgcaccggtggcgtcaccatcgtggctggcaaagcaccaccgctgcttgctggtgcagggaggaagacaagtggtggtcgttgaacggccagggtgcggtcaagatcagattgaataaataccatttcgcattttgaactatggccgtagatctgagatcccacaatcccagtcacgcaccattcatgttatattgtaaaccgttgatctaagctcggagggccgtagtcccataccccttcatgatctaatctaggctctcggctttggatccaacggccagagcgagcccgagttcactcatctgggggtatttgctaaatagccctcggggttctgagcaaattacccgcagtccaagttagtccaaaggataaagcaagtaggtcttgtttttaacaaataattttttttctcgaaagcgcaggggaactgcgccttaaactatattaagatgaaaaaaggtcagtagaagaccgaaatacaaaatacaataactttttagaaataaaaccctagacttttagaatacctaacccatcgtccaaggaatttttaattaatataaaataaaatctgaaaatgatttttgcatataagaataattctagaaagttcataaaatcaataacttcttcgttctagctccaattgtagtggttctcgaacctcgatctcatagcaacgtgtagaatattgttgagtggtttgtttccatctttggtgtaatgttatttttacctattctttgtctgtctatatgtattgctatgtgtagaagcgaggttacgaggaatctaaagctccaattggagaaatacctggaattgcaccagaaaagcaagtggcccttgatcacttttctttacctaaaatgttctctataatcaccgtgacatgcccaagttaatttgatgagacctaataggttaccctagttttgttcaccctacaccttcaaacaaatgaattattggatagtcttgttattgctctacctagttttggaattaatattatatctaaattatgatcatgttccattattattgttggtttaattattattcatgataagattatagtgttaattggaacatggagcgaccactcgagaaaacagtgctaccacaagggtgtaatgggagcccttggctgattaattaggaaagctagtgtgagttcatcttttcccgaaaggggcaagcgaggtgtggggagctgctgatatcgggaggttctcgattcgatctgtctgtgatagctttccggaccagggattactatatcgccccctcctgcctgattccgtagcaggttctctcatgctagtggaactttggaaaggcctcgtagtgctaccctgcctcgcctcctcggtagaggtgtatggagtccgtacagccccgtggcagatgggtaacatggcttgtggttgaagatgtgcaacctctgcggagtgtaaaactggtatatcagctgcgctcacggtcaagagcggctcggaccctcacataagtaatttatggaattaaacttaatctgcatatgcattgcattgtgggatttattatcaatcgtgatcaattatttaattgggttgatatctacttacatttagtaattgctaataaaattttgaccaacttattaaaatcaatgatcagccttaaccattttctctttggtaggccatacacttcacatgagcctcaccgtaagtgagctcatgcatattattcttcacaacttgttgagcgatgaacgtatgtgaattcactcttgctgaactcacagcatgtcaagaacagataccgcaagatgaggagcctgaaggatgttacgatgagttcggagacatctaggctgtcgtctcccagtcaactatggttgtggaggatcgtgtcgtcatatgatgtatttatttagctattttgtatagagctcctattatgtaataaaaatgtgacgttgatttctgtatcataagtcatcagacttgatcctagcacacatttgagacacgcacgggtttgcccttaaatccaggtgtggcatctaacaaactaacagagggccatggaggatttcctgggtatgcacattttgtcagagagttcatctaaccaactgttagtacatcattcaaggccactgatttagtggacatgcacattttggtcacattggtcacattttcatttacattgggaagcacattggtcacaccatacctggagcccagttggaagctgggaccgtgcaccggcgacgatacacctggatggggccgaggaccgagaagccgggctcaaccgtcgcggggaaaccggggaacaaggcgcggggcttaagcggcgctggaactctgaggaacggggcgcccggcgcaagcaacgcgggattgccaataagtactaaagaactataccatttatttacactgtatgcagagcactactataaacaaccaatttaacaagtacacaaggtaactacatggttggaattgccaataaggagcatttaaattttgaagacttagataaatgatatctgccaagaaaacttatataaaggatgctgaacttgagcaatatgcacacacacacaatctcaactccttttagctgaagagaaaattacaaattcaatttgccactgttttacttataatattgagattctctttaacttaccaactggaaagaagtttctggtagtgtaaatttctttgtacatatattttcctggatgtcttgactgaaaggtggaaagcaaatcctccaattctccaaaacttccaagctgcaaattttgccatgtatcaaaagtcccaaatacactagaaactgggaagtgcttcgtaataacttaccatatgctaaatgttttcttaaaataacaaataaaatcaaatgattttcgcgcaatgtgaaaattcaaagtcacgcttaatgaaaaagatgcagcaataggttgcatgcacacataattagaaaaaatttacgctaggtgtccatgtacacatgtgacaaatgatagcctgatgcaaacatccatcttaaggagatgcagtaatctcttagaacttcacaatcatacatgcagcagagcagtaacagaatgtcacgaagccataacagcctaacagctctaagctaattgatgctaaggaagcacatccgattggcataacacgaggaagaagtagctatggattttgccaatgttggggaatatctcggagcatgtcaccagaacacagatccctgtggctgcggaactccatgaaaactagagaactataccattcatttacactgtatgcagagcactactatagacaaccaatttaacaagtacacaaggtaactacagggttgggattgccaataaggggcatttaaattttgaagacttagataaatgatatctgacacgaaaacttatataaaggcagcttaacttgagctatgagcgcgcacacacaagctcaactccttttagctgaagagaacattacaaattcaatttgtcattgttctactcataataatgagattttctctttaacttaccaactggaaagaagtttctggtagtgtaaatttcttggtacatatatattcctggatgtcttgacttaaaggtggaagcaaatccttctccaattctccggagcttccaacctgcaaattttgccatgtatcaaaagtcccaaataccaacaatctagttccaggtcatattccatgctctatcccaatgaatccaacactgctgttctaccaacagagcaatcaaaagtaacaaggcagcaataccgaattaggtaacgggaggctacaaataactacccactgctgctggcagtattccatggatgaaatgtttccagttccaaaacatggaacaggaacaaatgtgcaagcactcaacaaaacttgtgcggacgaaattggaagcatatga

SEQ ID NO: 47148 - DNA, 315 bp, Zea Mays
cctccccatatccaaatcgcgcaggagcaggtatcccaactaggcggttatcggtcttctcgtgtgcgcagtttgtcttcgctcgcgttgcgaatagaacgcgatccgtttccgagcttcggtgaattgacagtcaagcttcgacgaccaagtgatcattctcttcgagttccacaaggttgaagaccctgagcatctgtttggtgaaggcagtcctctgacctattatgttctacttacttataattcactgtcccgcattacattattgaaaacctaagggttgactagctttctatttacctttatccttgt

SEQ ID NO: 47149 - DNA, 1825 bp, Zea Mays
aacggagattgcgtgctctgttaactaatcgaatcccccaattccgttttcctcttcttcgccaatccaactcccgtcttccttcttcctcttccttgttcgaatccaagtaacctacccaaaccgccaacccccaccccaaggaaggaaccctagtaccctacccgtgagaaccgccgccgcacaaccccggacgtggtggcaggcgaccgatccggatccatcatcccaagcttcctttctgtctcctcttcatccatctccacaaggataatcaaggaaggaaggccatggttttgttcgaacttgacccggacatcatccgatggggtcttcaccatctcctccccgctccggctggatactctcctcattgtcgcacccaaaccacccctaccacaccttgtacagcttttgctcgccctcctcatcagcccatcggagacatgggtacctcaagctccgttgagatcaaggtcgagcatgtcgatggggttgacaacgacgcgatcatcgcacaagccctccaggaggaattgtccaatgtcgccttcgccgaagcgtccgggccaacctctgccgctgacaatcaacaacattctgctgttctcacgcagcaatggcttcgcccacgcgccgtgcatgtagaaccagaggcagggaccagggaggaacctttcagcacctgctcaagccctggagatgacaataacgtccaggacagccagcaatgcttgatagagctcatggataacttctctgtcattgacggtgaagtgggcaaaagattgaacaacatggttcctgttcctcatgttcctaaaactaatggagagattccttctgttgacgaagccatttcagatcatcaaagacttcttgacaggttggtggtgtacggtttggttgatctcaaggttaaaggagatggcaactgccagtttcgagcgctgtcagatcaattttaccgaactcctgaacatcacagatttgtccggcagcaagtggtgaagcagcttgaatcgcatcctgagatttatgcaggatatgtccctatggactacagggaatatctcaaaaagatgtcaaagagtggagaatggggtgaccacgttacattgcaggctgctgcagactcgtacggtgtaaagatcttcatcctgacatcattcagagatacatgttatattgagattcttcctgttgttgagaaatccagaagagaggttttggctatctaaactcagaagtcctgttgtgcagttatatgcttgagtttttgggctgaggtgcactacaactccatatatcctgaaggagagttgccggttttggagtttgacaacaaaaggaaaaggtggtggcccttctagctaggattcccaggacagactagatagagcagctttaacagactgaggcctttctgttgggctgtgacactgactgatgacgaaaacgagcccatgggtggtggacggaactgcattggccttgccctccttgcccacacgatagacatgtacagtgcgtagtagatggtactatttgcctacttggtaacccattctcagatatatcttttatctctattactataataaagcaccaacacgtaatgggccgatacgggacgatacaatcggtctgaatgggccgatacaattggtttgagtagccaacgtgggccacctccctccttccggccaccacccttcccctcttctctttgtcgtcgcctcttctcgctcgctcccaatgtccccattgctactgaccccctcccgttcctcgtgcttgccaccacgtccccacttattacctc

SEQ ID NO: 47150 - DNA, 2225 bp, Zea Mays
cccaattccgttttcctcttcttcgccaatccaactcccgtcttccttcttcctcttccttgttcgaatccaagtaacctacccaaaccgccaacccccaccccaaggaaggaaccctagtaccctacccgtgagaaccgccgccgcacaaccccggacgtggtggcaggcgaccgatccggatccatcatcccaagcttcctttctgtctcctcttcatccatctccacaaggataatcaaggaaggaaggccatggttttgttcgaacttgacccggacatcatccgatggggtcttcaccatctcctccccgctccggctggatactctcctcattgtcgcacccaaaccacccctaccacaccttgtacagcttttgctcgccctcctcatcagcccatcggagacatgggtacctcaagctccgttgagatcaaggtcgagcatgtcgatggggttgacaacgacgcgatcatcgcacaagccctccaggaggaattgtccaatgtcgccttcgccgaagcgtccgggccaacctctgccgctgacaatcaacaacattctgctgttctcacgcagcaatggcttcgcccacgcgccgtgcatgtagaaccagaggcagggaccagggaggaacctttcagcacctgctcaagccctggagatgacaataacgtccaggacagccagcaatgcttgatagagctcatggataacttctctgtcattgacggtgaagtgggcaaaagattgaacaacatggttcctgttcctcatgttcctaaaactaatggagagattccttctgttgacgaagccatttcagatcatcaaagacttcttgacaggtaaaccaaattttagagtgtgtgtattagacagagctgatgtgccatagtagtagataagacatttggaaaatgttaccaacaccaaaccggtgtttgtgcttctctctccttttatttttattcgtgattatgtatgaccatgtcagtggatataattgcttacctcataaatggcatatgcgacttgaatgtaatttcttcttttccaaaaggttggtggtgtacggtttggttgatctcaaggttaaaggagatggcaactgccagtttcgagcgctgtcagatcaattttaccgaactcctgaacatcacagatttgtccggcagcaagtggtgaagcagcttgaatcgcatcctgagatttatgcaggatatgtccctatggactacagggaatatctcaaaaagatgtcaaagagtggagaatggggtgaccacgttacattgcaggctgctgcagactcgtacggtgtaaagatcttcatcctgacatcattcagagatacatgttatattgagattcttcctgttgttgagaaatccagaagaggtaatgtttattttctaatttaattgttatcgagttgttgtacctgccctcacatcaaaatctgagtattgtttgcctaagtaaaccttctcactctgtatatatctcgggcatatttcccaatgggtgtttttgttgatgagcagaggttttggctatctaaactcagaagtcctgttgtgcagttatatgcttgagtttttgggctgaggtgcactacaactccatatatcctgaaggaggtactagatgtcgccatttagtgtgttgatgtatgtttgttgagtgtttaatttcgttgtcttctgttgctgcagagttgccggttttggagtttgacaacaaaaggaaaaggtggtggcccttctagctaggattcccaggacagactagatagagcagctttaacagactgaggcctttctgttgggctgtgacactgactgatgacgaaaacgagcccatgggtggtggacggaactgcattggccttgccctccttgcccacacgatagacatgtacagtgcgtagtagatggtactatttgcctacttggtaacccattctcagatatatcttttatctctattactataataaagcaccaacacgtaatgggccgatacgggacgatacaatcggtctgaatgggccgatacaattggtttgagtagccaacgtgggccacctccctccttccggccaccacccttcccctcttctctttgtcgtcgcctcttctcgctcgctcccaatgtccccattgctactgaccccctcccgttcctcgtgcttgccaccacgtccccacttattacctc

SEQ ID NO: 47151 - DNA, 2171 bp, Zea Mays
ctccttctcacatcacatgggactggactgggagtgccaatgcctccagcccagcttgcctgccacctggtcttgaccctctcctggataggaggagcagcagccagagggacatcaaactgtgctgcctgcgtgtgtgtcttctttcttgcctctcccttcttcaacctttgctagcttgccagggagggagtccatgaattccagcagaagcctcctctcttcgcccctctttgctagctcgtctccaaacttcaggagcagtgcttccgtctcctcctccccatccccatcccgcaccacagttccaatgatacatgacaccagcagcagcagagcatccacggcgtgccactactcgccgtcgcttgtggcagaggagcagcttcacggctccaaagacaccttgaccttgaagggcgagaaggctttgctcgagttgcttctaggcatggctctggaccagcacgttgacggcaggaagctcattacccaacaggaggctgaggatagtgatttcgagagctatttgagagaagcaacaagccgagtgctttaccagccaacattcatcagtgaagaggatgatgatgatgattctgtttcggagagctcttcagcatcattggccaaaccagctggaacattggatcttggcaagctgacagaggaaccacagttggatgtaccacagcctcaccgccgcagtgtggatccaaaccattcgtatgatcaagtgtttattagatccactcggttactggagaggagatccaagaaacgcaacggcggccacagggctttggataatggtgtggcgtgcagtggtgtgaactcaaagagaaaagacaagtttggcagagttcttgatccagacgagccttttaggttgtttctacgggatcgagagacgacagagttcttgacagcgaaagaggagaaacagatgttcagtcaaatacagaatcttatgaagctggagggggctcagcgtaacctgcaagctcagtgtggtcgtgaaccaacagttgaagagtgggctcaagccgtaggaatgagctgcagggagctgcaatcctgtgtgcgcaccggaagacggtgccgagagaagatggcccgctccaacttccgccttgtgatacatgttgctaggaaatatgaaggatgtggccttgacattcaggacctggttcaggatggatgctgtgggttgatgaaaacctttgagaagttcaacccgagcaagggatgcagattcccgacctacgcgtactggtggatacgccagtcgatcaaaaagtccatcttcaagaattcaagactaatccggttgccggagagtgtgtatgcacttttgaggaaggtgggcaaagcgaggatggaatgcataatggacggggagcagccgacgaacgaggtggtggcaaggcgtgctggcatcacgattgaaaagctggcgaaactgagagcgaaaaccaggaaagtacggtccatgcaggatcgagtctggtcagacgacggtgtgacataccaggagatcaccgaggaccccaacattgaaggtcctgaggtgagcgtggacaggctgatgatgcggcagcaggtgcgcagcttcctgacggggatcctgagcccccgggagaaggagatcatcgagcaccggttcggcatccacgacggccagcccaagaccctgcatgtcatcggcgacatgtacggcctgtccaaggagaggatccgccaggtgcagaacaaggccctggacaagctcagaaacagcatctcagcacagggcttccacgtctactttgatttgctaacttaagactcttcaacacgcaaacattacatgtacaatgacattccattctgccaatgggtatattatgtatagatagacgaagaattcatgtttttttcctttcccttttgccatttgacattcattcatccttgtactcaacaatggatactcatacatggttgtttgaggagcaaagcttactttaaatgtatggatgtacgtttaagtgcacatatgtttatgaaacctctctttgtttcagtgtttctgcacagcacctaatggcaacattgaagaaactcgcaagcaccatcatcttcacaatgtatcagagcagcacagagacttttggactctttgatcgcat

SEQ ID NO: 47152 - DNA, 2145 bp, Zea Mays
ctccttctcacatcacatgggactggactgggagtgccaatgcctccagcccagcttgcctgccacctggtcttgaccctctcctggataggaggagcagcagccagagggacatcaaactgtgctgcctgcgtgtgtgtcttctttcttgcctctcccttcttcaacctttgctagcttgccagggagggagtccatgaattccagcagaagcctcctctcttcgcccctctttgctagctcgtctccaaacttcaggagcagtgcttccgtctcctcctccccatccccatcccgcaccacagttccaatgatacatgacaccagcagcagcagagcatccacggcgtgccactactcgccgtcgcttgtggcagaggagcagcttcacggctccaaagacaccttgaccttgaagggcgagaaggctttgctcgagttgcttctaggcatggctctggaccagcacgttgacggcaggaagctcattacccaacaggaggctgaggatagtgatttcgagagctatttgagagaagcaacaagccgagtgctttaccagccaacattcatcagtgaagaggatgatgatgatgattctgtttcggagagctcttcagcatcattggccaaaccagctggaacattggatcttggcaagctgacagaggaaccacagcagtgtggatccaaaccattcgtatgatcaagtgtttattagatccactcggttactggagaggagatccaagaaacgcaacggcggccacagggctttggataatggtgtggcgtgcagtggtgtgaactcaaagagaaaagacaagtttggcagagttcttgatccagacgagccttttaggttgtttctacgggatcgagagacgacagagttcttgacagcgaaagaggagaaacagatgttcagtcaaatacagaatcttatgaagctggagggggctcagcgtaacctgcaagctcagtgtggtcgtgaaccaacagttgaagagtgggctcaagccgtaggaatgagctgcagggagctgcaatcctgtgtgcgcaccggaagacggtgccgagagaagatggcccgctccaacttccgccttgtgatacatgttgctaggaaatatgaaggatgtggccttgacattcaggacctggttcaggatggatgctgtgggttgatgaaaacctttgagaagttcaacccgagcaagggatgcagattcccgacctacgcgtactggtggatacgccagtcgatcaaaaagtccatcttcaagaattcaagactaatccggttgccggagagtgtgtatgcacttttgaggaaggtgggcaaagcgaggatggaatgcataatggacggggagcagccgacgaacgaggtggtggcaaggcgtgctggcatcacgattgaaaagctggcgaaactgagagcgaaaaccaggaaagtacggtccatgcaggatcgagtctggtcagacgacggtgtgacataccaggagatcaccgaggaccccaacattgaaggtcctgaggtgagcgtggacaggctgatgatgcggcagcaggtgcgcagcttcctgacggggatcctgagcccccgggagaaggagatcatcgagcaccggttcggcatccacgacggccagcccaagaccctgcatgtcatcggcgacatgtacggcctgtccaaggagaggatccgccaggtgcagaacaaggccctggacaagctcagaaacagcatctcagcacagggcttccacgtctactttgatttgctaacttaagactcttcaacacgcaaacattacatgtacaatgacattccattctgccaatgggtatattatgtatagatagacgaagaattcatgtttttttcctttcccttttgccatttgacattcattcatccttgtactcaacaatggatactcatacatggttgtttgaggagcaaagcttactttaaatgtatggatgtacgtttaagtgcacatatgtttatgaaacctctctttgtttcagtgtttctgcacagcacctaatggcaacattgaagaaactcgcaagcaccatcatcttcacaatgtatcagagcagcacagagacttttggactctttgatcgcat

SEQ ID NO: 47153 - DNA, 2174 bp, Zea Mays
ctccttctcacatcacatgggactggactgggagtgccaatgcctccagcccagcttgcctgccacctggtcttgaccctctcctggataggaggagcagcagccagagggacatcaaactgtgctgcctgcgtgtgtgtcttctttcttgcctctcccttcttcaacctttgctagcttgccagggagggagtccatgaattccagcagaagcctcctctcttcgcccctctttgctagctcgtctccaaacttcaggagcagtgcttccgtctcctcctccccatccccatcccgcaccacagcagttccaatgatacatgacaccagcagcagcagagcatccacggcgtgccactactcgccgtcgcttgtggcagaggagcagcttcacggctccaaagacaccttgaccttgaagggcgagaaggctttgctcgagttgcttctaggcatggctctggaccagcacgttgacggcaggaagctcattacccaacaggaggctgaggatagtgatttcgagagctatttgagagaagcaacaagccgagtgctttaccagccaacattcatcagtgaagaggatgatgatgatgattctgtttcggagagctcttcagcatcattggccaaaccagctggaacattggatcttggcaagctgacagaggaaccacagttggatgtaccacagcctcaccgccgcagtgtggatccaaaccattcgtatgatcaagtgtttattagatccactcggttactggagaggagatccaagaaacgcaacggcggccacagggctttggataatggtgtggcgtgcagtggtgtgaactcaaagagaaaagacaagtttggcagagttcttgatccagacgagccttttaggttgtttctacgggatcgagagacgacagagttcttgacagcgaaagaggagaaacagatgttcagtcaaatacagaatcttatgaagctggagggggctcagcgtaacctgcaagctcagtgtggtcgtgaaccaacagttgaagagtgggctcaagccgtaggaatgagctgcagggagctgcaatcctgtgtgcgcaccggaagacggtgccgagagaagatggcccgctccaacttccgccttgtgatacatgttgctaggaaatatgaaggatgtggccttgacattcaggacctggttcaggatggatgctgtgggttgatgaaaacctttgagaagttcaacccgagcaagggatgcagattcccgacctacgcgtactggtggatacgccagtcgatcaaaaagtccatcttcaagaattcaagactaatccggttgccggagagtgtgtatgcacttttgaggaaggtgggcaaagcgaggatggaatgcataatggacggggagcagccgacgaacgaggtggtggcaaggcgtgctggcatcacgattgaaaagctggcgaaactgagagcgaaaaccaggaaagtacggtccatgcaggatcgagtctggtcagacgacggtgtgacataccaggagatcaccgaggaccccaacattgaaggtcctgaggtgagcgtggacaggctgatgatgcggcagcaggtgcgcagcttcctgacggggatcctgagcccccgggagaaggagatcatcgagcaccggttcggcatccacgacggccagcccaagaccctgcatgtcatcggcgacatgtacggcctgtccaaggagaggatccgccaggtgcagaacaaggccctggacaagctcagaaacagcatctcagcacagggcttccacgtctactttgatttgctaacttaagactcttcaacacgcaaacattacatgtacaatgacattccattctgccaatgggtatattatgtatagatagacgaagaattcatgtttttttcctttcccttttgccatttgacattcattcatccttgtactcaacaatggatactcatacatggttgtttgaggagcaaagcttactttaaatgtatggatgtacgtttaagtgcacatatgtttatgaaacctctctttgtttcagtgtttctgcacagcacctaatggcaacattgaagaaactcgcaagcaccatcatcttcacaatgtatcagagcagcacagagacttttggactctttgatcgcat

SEQ ID NO: 47154 - DNA, 5222 bp, Zea Mays
ttttcactcatattttgagaattacgaaggaaatttaagctcgtaacaggagaaagaggaggaggaaagtgggaatagaatagaggagaggagagggagaggactggactggtactcgcagtcgcactagtgctaggcgcatccggcatccccatcccttgcctccgaatcggatcgccgcccccgctgccgctgccgctgccgccgagcggaagcagccatcaccccaaaccctagccagccatccaactatggagccgcccgccgccgccgccgccgactcctcgcccgatccgacgccgcaggaccagtttcctgccccgtccccttctccctccgcctccccggccaagcgctccgcctggaagcacccctcccccaacggccccgccgtcatggatgccaaccactggcccgcgctctccgacgccgccaagggcatcaagctcccagactcctcgtcttcctcgcctgcgcccgtcgccgccccatcggccgttgccaattcctccagttcgcaaaagcacggcgcccatcacgtccgccacaagtccgccaggcgtggcggcggcggggagcactctccacgagaccatcctgaccggaccacagccacgggttgggaccacgccggcggcggtgggggtaggggtgcccagaggaaccataataacggaggcggcaggagaggcaacgccgccgctgcctctgccgccggaccttctcaccatggtgccggtggcagcggcggaggtggaggctttggtgccaggcgaagaggggcctacgagccgcccttctatcgtggccctccaccaccagtgggcatgggccactacatgcgaggtgccccaccaccaccacctcctccgccgcccatgaccgtcgctccaccgttcatgggcccgccaccgccgccagtctcacccatgcgccccttcgctggaccaatggtgttccatgacatgtcatctcctgtatcccccatatacttttatgggccaccaccaccagaggctcttaggggactggctattgcgcctcctatggttggtccacctgcttatccttacttccaagcgcagcctgagccacagcctgagcctcagcctgatgctgagcctgacgtagaagaggaacgtgtcaagctgctcaagcagatagagttctacttcagcaaggagaacctgtgctcagatgtttacttgaggcagcagatggatgatcaaggctgggttgatatatctcttatagctggcttcaaaaaggtccaagggctaaagaaggacctgcaatatataaaagagacggtgcagtcctcatctattctggaaatgaaggataacaagatcaggaagcatgatgactgggtgaaatgggtgatccctcgtgagagcaatcctgatgtcccgtcaagctcagcatctgtaccaaggcctgatgtcaataatctgacggcacatcttggaggcatggatctgcaggattctgctagctctgctggcgctgtggagccgaagcataatgatgtggtccagaacggatcgccttctggtaatgaagaggctgcagtagctgaggacagctctgatcagcagtagttacaacaaggcagtggtttggattcacaccatgactgcaggggttttgtcggtgcgcgaatgacagggcacaagtggtaacttttttttggcaacttttggaggggaggcgagaggcgtattagactgacaagcgaacgtgtttactggcgttcaggtaagattttggtttaccttgttatattcaggggtagcgatgaagatttggggcagttggtggaatggagatgaagcagaatagtgggaaaacgaaggtggtgatatctggaggcgcctaggaccgaggacaaagattatgtgtgataagttagtagcccccctgtggttgtttactggggggggttgcgtttgcacacgggcgcttggatgctatcatgctgttgttacgatgaactagttggttttcgtctgcgttaggatgggggatgttgtaggacctccgattttttttatggaggagctgaacttggagagccagggagttttttttttttttggacttgttgttttgtggcatgatggtgttaaattgaagtaagaagatgctcattctgctgtatggtattgatgtgttgtggggttgaaggtgggtaaaaaatgggagggggattgctgtatggtcaggtcttgaatggctagcatactaggtaggagcagcgaccgcattgcattctctttgtcacctgtccaacaagcttctgttttggacggcatcctacaatagggcaccaacagcagacttggtacgtagtagtaaagccagtaactgttttgtgcatccatgtcggtgcgttgccatcatagacgtacctttgcctctgctgtttgtacgtcaaaggaatcagtcagggcgttcgttgctttgattgctggctggatcggattatatatcgtctcggcagctagggcggccagcaccagccatgactccttcgcttctcctctccctcctgctggtggcggcgaggtgctgccatggctggtcgtcgttccagaagccggcggtgactgcggtgatcgctttcggagactccattgtggacccggggaacaacaacgggctgcatacggtgatcaaggccaaccatccgccctacggcaaggacttgttcaaccacgaggccaccggacgctactccaacggcctcattccaaccgacctaattgcccaggagttgggtgtgaagctgctgcttcctgcctacttgggcgtggatctgagcccggaggacctgctcaccggcgtcagcttcgcgtccggcgccaccgggttcgacccgctgactcccctcgtagtgagcgtcatctcgctggagcagcagctcgcctacttcgacgagtaccgcggcaagctggtggatatcgccggcgaggatgagacggcgaggatcatcgacggcgcgctgttcgtagtgtgcgcgggcaccgacgacgtggccaacacctacttcacgacgccgttccgcagcgcggagtacgacatcccgagctacgtggagctgctggtgggcggcgccgaggagttcctccgcaacgtcagctccaggggcgccaggaagatcggcttcgtggggatgccgcccgtggggtgcgtgccgtcgcagcggacgctgggcggtggcctcgccagggcgtgcgagcccaagcggaacgaggcggcgcagctgtacaacgccaggatccaggagatggtcgccgacgccgaccgagacttggcgacgaccacggtggtgttcctggacatctaccgcgtcctggacgacctgatggagcgcggggacaagtacggcttctctgagaccaccaggggatgctgcggcaccggcaccatcgaggtcacgggactctgcgactcccgcttcgtctccgtctgcgacaacgtctcgcagcacgtgttcttcgacagctaccaccccaccgagagagcctacaggatcatcgtcaaggacatctttgacaactacggacaagtgctcatcggatgatatatatatctaccttgcttgagcgatcgagcatgcatgttcatcttcttcatctttatgtacgttcggctagctggcccaaagcctcaaggaggcccatttatcttcttcttactcctcctcgccccaagaataattaattgtaagcatgatctgcggaatcagacggggatggtctggtggaagtctacatatgggccgctggcacgatacaaacccaccaattgatttggtttggtttggcccatatggccacttcctatccatccatccatccattccttcttcttcctcctcctcctcctcctttattctctctccagggaaggcaagctcggccagacctccctcttcaataagaacaagttgaagaaagatgtccacgtacctggtgtcctgctgcctccggccaccgtcagcgggggcggagatgcccaaggcggcttccgccgcctcctcctcttcattggccccgccgcccgacaccaagagagtcggccgaagagactttgtgctcaggagcagtgagattgccacgctcgccgccatcttccacttcagtggcagcaaaccaagctaccttggcgttcagaagagtcctccgtcccttgctctctgccctgcaaccaataactgtgtttccacatcagaggaaataagcgactcaaatcactatgctcccccatggaactacaatcccaaggatgggcggagcggtaaacccataaccaaagaggaggccatgaaagaactaattgaagtcgtcacgaagacaaagccggacaacttcactcctcgcatagtagagaaaaaagatgattatatccgagttgaatatgagagtcctatatttgggtttgtagatgatgtggagttctggttccctcctggcaacaagaccatggttcagtatcggtcggcgtctcgatcaggatttatcgatttcaatgccaacaagaagagagtaaaggagctgagattggctttggaaaagaagggctgggcttcagaaagcaacttctgaattgaagtgagaagggtggaagaggtgcaggtgcatgctactcagacgagccagcacaactgggaactgggattgggtactgcccacgcaaaggcaaaaaagtctctttgtgatggtccctcgttctcattcaggtcagcgattacctagtttgtgtactaggcagcgtaagctagctgctggtgggtggtggtggccatcatgaggattcaggatgcatgatgatcttccatgggtggtgccgggggcgcactaagggaaaaaaaaaaggatattacatggacagcaaccaccctggctagctaataccaagaaatcattcatatactcctagtctcctaccaagaaaaaagatatatttattatgcatcttcttgccatccgtgcatcctactacatgcatcggatctgtccttgcgataatgagatatgcatattcgttcgatatgattgatagatagtcgacccagagatgatttaggtctctctctctctctctctctctctctctctctctctctctctctctctctctctctctctctctctctctctctggcattagttggatgcatggttgacttgtttcatgcatggattctattatagtgc

SEQ ID NO: 47155 - DNA, 5207 bp, Zea Mays
gaaatttaagctcgtaacaggagaaagaggaggaggaaagtgggaatagaatagaggagaggagagggagaggactggactggtactcgcagtcgcactagtgctaggcgcatccggcatccccatcccttgcctccgaatcggatcgccgcccccgctgccgctgccgctgccgccgagcggaagcagccatcaccccaaaccctagccagccatccaactatggagccgcccgccgccgccgccgccgactcctcgcccgatccgacgccgcaggaccagtttcctgccccgtccccttctccctccgcctccccggccaagcgctccgcctggaagcacccctcccccaacggccccgccgtcatggatgccaaccactggcccgcgctctccgacgccgccaagggcatcaagctcccagactcctcgtcttcctcgcctgcgcccgtcgccgccccatcggccgttgccaattcctccagttcgcaaaagcacggcgcccatcacgtccgccacaagtccgccaggcgtggcggcggcggggagcactctccacgagaccatcctgaccggaccacagccacgggttgggaccacgccggcggcggtgggggtaggggtgcccagaggaaccataataacggaggcggcaggagaggcaacgccgccgctgcctctgccgccggaccttctcaccatggtgccggtggcagcggcggaggtggaggctttggtgccaggcgaagaggggcctacgagccgcccttctatcgtggccctccaccaccagtgggcatgggccactacatgcgaggtgccccaccaccaccacctcctccgccgcccatgaccgtcgctccaccgttcatgggcccgccaccgccgccagtctcacccatgcgccccttcgctggaccaatggtgttccatgacatgtcatctcctgtatcccccatatacttttatgggccaccaccaccagaggctcttaggggactggctattgcgcctcctatggttggtccacctgcttatccttacttccaagcgcagcctgagccacagcctgagcctcagcctgatgctgagcctgacgtagaagaggaacgtgtcaagctgctcaagcagatagagttctacttcagcaaggagaacctgtgctcagatgtttacttgaggcagcagatggatgatcaaggctgggttgatatatctcttatagctggcttcaaaaaggtccaagggctaaagaaggacctgcaatatataaaagagacggtgcagtcctcatctattctggaaatgaaggataacaagatcaggaagcatgatgactgggtgaaatgggtgatccctcgtgagagcaatcctgatgtcccgtcaagctcagcatctgtaccaaggcctgatgtcaataatctgacggcacatcttggaggcatggatctgcaggattctgctagctctgctggcgctgtggagccgaagcataatgatgtggtccagaacggatcgccttctggtaatgaagaggctgcagtagctgaggacagctctgatcagcagtagttacaacaaggcagtggtttggattcacaccatgactgcaggggttttgtcggtgcgcgaatgacagggcacaagtggtaacttttttttggcaacttttggaggggaggcgagaggcgtattagactgacaagcgaacgtgtttactggcgttcaggtaagattttggtttaccttgttatattcaggggtagcgatgaagatttggggcagttggtggaatggagatgaagcagaatagtgggaaaacgaaggtggtgatatctggaggcgcctaggaccgaggacaaagattatgtgtgataagttagtagcccccctgtggttgtttactggggggggttgcgtttgcacacgggcgcttggatgctatcatgctgttgttacgatgaactagttggttttcgtctgcgttaggatgggggatgttgtaggacctccgattttttttatggaggagctgaacttggagagccagggagttttttttttttttggacttgttgttttgtggcatgatggtgttaaattgaagtaagaagatgctcattctgctgtatggtattgatgtgttgtggggttgaaggtgggtaaaaaatgggagggggattgctgtatggtcaggtcttgaatggctagcatactaggtaggagcagcgaccgcattgcattctctttgtcacctgtccaacaagcttctgttttggacggcatcctacaatagggcaccaacagcagacttggtacgtagtagtaaagccagtaactgttttgtgcatccatgtcggtgcgttgccatcatagacgtacctttgcctctgctgtttgtacgtcaaaggaatcagtcagggcgttcgttgctttgattgctggctggatcggattatatatcgtctcggcagctagggcggccagcaccagccatgactccttcgcttctcctctccctcctgctggtggcggcgaggtgctgccatggctggtcgtcgttccagaagccggcggtgactgcggtgatcgctttcggagactccattgtggacccggggaacaacaacgggctgcatacggtgatcaaggccaaccatccgccctacggcaaggacttgttcaaccacgaggccaccggacgctactccaacggcctcattccaaccgacctaattgcccaggagttgggtgtgaagctgctgcttcctgcctacttgggcgtggatctgagcccggaggacctgctcaccggcgtcagcttcgcgtccggcgccaccgggttcgacccgctgactcccctcgtagtgagcgtcatctcgctggagcagcagctcgcctacttcgacgagtaccgcggcaagctggtggatatcgccggcgaggatgagacggcgaggatcatcgacggcgcgctgttcgtagtgtgcgcgggcaccgacgacgtggccaacacctacttcacgacgccgttccgcagcgcggagtacgacatcccgagctacgtggagctgctggtgggcggcgccgaggagttcctccgcaacgtcagctccaggggcgccaggaagatcggcttcgtggggatgccgcccgtggggtgcgtgccgtcgcagcggacgctgggcggtggcctcgccagggcgtgcgagcccaagcggaacgaggcggcgcagctgtacaacgccaggatccaggagatggtcgccgacgccgaccgagacttggcgacgaccacggtggtgttcctggacatctaccgcgtcctggacgacctgatggagcgcggggacaagtacggcttctctgagaccaccaggggatgctgcggcaccggcaccatcgaggtcacgggactctgcgactcccgcttcgtctccgtctgcgacaacgtctcgcagcacgtgttcttcgacagctaccaccccaccgagagagcctacaggatcatcgtcaaggacatctttgacaactacggacaagtgctcatcggatgatatatatatctaccttgcttgagcgatcgagcatgcatgttcatcttcttcatctttatgtacgttcggctagctggcccaaagcctcaaggaggcccatttatcttcttcttactcctcctcgccccaagaataattaattgtaagcatgatctgcggaatcagacggggatggtctggtggaagtctacatatgggccgctggcacgatacaaacccaccaattgatttggtttggtttggcccatatggccacttcctatccatccatccatccattccttcttcttcctcctcctcctcctcctttattctctctccagggaaggcaagctcggccagacctccctcttcaataagaacaagttgaagaaagatgtccacgtacctggtgtcctgctgcctccggccaccgtcagcgggggcggagatgcccaaggcggcttccgccgcctcctcctcttcattggccccgccgcccgacaccaagagagtcggccgaagagactttgtgctcaggagcagtgagattgccacgctcgccgccatcttccacttcagtggcagcaaaccaagctaccttggcgttcagaagagtcctccgtcccttgctctctgccctgcaaccaataactgtgtttccacatcagaggaaataagcgactcaaatcactatgctcccccatggaactacaatcccaaggatgggcggagcggtaaacccataaccaaagaggaggccatgaaagaactaattgaagtcgtcacgaagacaaagccggacaacttcactcctcgcatagtagagaaaaaagatgattatatccgagttgaatatgagagtcctatatttggggtaggcggcggcggtttgtagatgatgtggagttctggttccctcctggcaacaagaccatggttcagtatcggtcggcgtctcgatcaggatttatcgatttcaatgccaacaagaagagagtaaaggagctgagattggctttggaaaagaagggctgggcttcagaaagcaacttctgaattgaagtgagaagggtggaagaggtgcaggtgcatgctactcagacgagccagcacaactgggaactgggattgggtactgcccacgcaaaggcaaaaaagtctctttgtgatggtccctcgttctcattcaggtcagcgattacctagtttgtgtactaggcagcgtaagctagctgctggtgggtggtggtggccatcatgaggattcaggatgcatgatgatcttccatgggtggtgccgggggcgcactaagggaaaaaaaaaaggatattacatggacagcaaccaccctggctagctaataccaagaaatcattcatatactcctagtctcctaccaagaaaaaagatatatttattatgcatcttcttgccatccgtgcatcctactacatgcatcggatctgtccttgcgataatgagatatgcatattcgttcgatatgattgatagatagtcgacccagagatgatttaggtctctctctctctctctctctctctctctctctctctctctctctctctctctctctctctctctctctctctctggcattagttggatgcatggttgacttgtttcatgcatggattctattatagtgc

SEQ ID NO: 47156 - DNA, 5186 bp, Zea Mays
gaaatttaagctcgtaacaggagaaagaggaggaggaaagtgggaatagaatagaggagaggagagggagaggactggactggtactcgcagtcgcactagtgctaggcgcatccggcatccccatcccttgcctccgaatcggatcgccgcccccgctgccgctgccgctgccgccgagcggaagcagccatcaccccaaaccctagccagccatccaactatggagccgcccgccgccgccgccgccgactcctcgcccgatccgacgccgcaggaccagtttcctgccccgtccccttctccctccgcctccccggccaagcgctccgcctggaagcacccctcccccaacggccccgccgtcatggatgccaaccactggcccgcgctctccgacgccgccaagggcatcaagctcccagactcctcgtcttcctcgcctgcgcccgtcgccgccccatcggccgttgccaattcctccagttcgcaaaagcacggcgcccatcacgtccgccacaagtccgccaggcgtggcggcggcggggagcactctccacgagaccatcctgaccggaccacagccacgggttgggaccacgccggcggcggtgggggtaggggtgcccagaggaaccataataacggaggcggcaggagaggcaacgccgccgctgcctctgccgccggaccttctcaccatggtgccggtggcagcggcggaggtggaggctttggtgccaggcgaagaggggcctacgagccgcccttctatcgtggccctccaccaccagtgggcatgggccactacatgcgaggtgccccaccaccaccacctcctccgccgcccatgaccgtcgctccaccgttcatgggcccgccaccgccgccagtctcacccatgcgccccttcgctggaccaatggtgttccatgacatgtcatctcctgtatcccccatatacttttatgggccaccaccaccagaggctcttaggggactggctattgcgcctcctatggttggtccacctgcttatccttacttccaagcgcagcctgagccacagcctgagcctcagcctgatgctgagcctgacgtagaagaggaacgtgtcaagctgctcaagcagatagagttctacttcagcaaggagaacctgtgctcagatgtttacttgaggcagcagatggatgatcaaggctgggttgatatatctcttatagctggcttcaaaaaggtccaagggctaaagaaggacctgcaatatataaaagagacggtgcagtcctcatctattctggaaatgaaggataacaagatcaggaagcatgatgactgggtgaaatgggtgatccctcgtgagagcaatcctgatgtcccgtcaagctcagcatctgtaccaaggcctgatgtcaataatctgacggcacatcttggaggcatggatctgcaggattctgctagctctgctggcgctgtggagccgaagcataatgatgtggtccagaacggatcgccttctggtaatgaagaggctgcagtagctgaggacagctctgatcagcagtagttacaacaaggcagtggtttggattcacaccatgactgcaggggttttgtcggtgcgcgaatgacagggcacaagtggtaacttttttttggcaacttttggaggggaggcgagaggcgtattagactgacaagcgaacgtgtttactggcgttcaggtaagattttggtttaccttgttatattcaggggtagcgatgaagatttggggcagttggtggaatggagatgaagcagaatagtgggaaaacgaaggtggtgatatctggaggcgcctaggaccgaggacaaagattatgtgtgataagttagtagcccccctgtggttgtttactggggggggttgcgtttgcacacgggcgcttggatgctatcatgctgttgttacgatgaactagttggttttcgtctgcgttaggatgggggatgttgtaggacctccgattttttttatggaggagctgaacttggagagccagggagttttttttttttttggacttgttgttttgtggcatgatggtgttaaattgaagtaagaagatgctcattctgctgtatggtattgatgtgttgtggggttgaaggtgggtaaaaaatgggagggggattgctgtatggtcaggtcttgaatggctagcatactaggtaggagcagcgaccgcattgcattctctttgtcacctgtccaacaagcttctgttttggacggcatcctacaatagggcaccaacagcagacttggtacgtagtagtaaagccagtaactgttttgtgcatccatgtcggtgcgttgccatcatagacgtacctttgcctctgctgtttgtacgtcaaaggaatcagtcagggcgttcgttgctttgattgctggctggatcggattatatatcgtctcggcagctagggcggccagcaccagccatgactccttcgcttctcctctccctcctgctggtggcggcgaggtgctgccatggctggtcgtcgttccagaagccggcggtgactgcggtgatcgctttcggagactccattgtggacccggggaacaacaacgggctgcatacggtgatcaaggccaaccatccgccctacggcaaggacttgttcaaccacgaggccaccggacgctactccaacggcctcattccaaccgacctaattgcccaggagttgggtgtgaagctgctgcttcctgcctacttgggcgtggatctgagcccggaggacctgctcaccggcgtcagcttcgcgtccggcgccaccgggttcgacccgctgactcccctcgtagtgagcgtcatctcgctggagcagcagctcgcctacttcgacgagtaccgcggcaagctggtggatatcgccggcgaggatgagacggcgaggatcatcgacggcgcgctgttcgtagtgtgcgcgggcaccgacgacgtggccaacacctacttcacgacgccgttccgcagcgcggagtacgacatcccgagctacgtggagctgctggtgggcggcgccgaggagttcctccgcaacgtcagctccaggggcgccaggaagatcggcttcgtggggatgccgcccgtggggtgcgtgccgtcgcagcggacgctgggcggtggcctcgccagggcgtgcgagcccaagcggaacgaggcggcgcagctgtacaacgccaggatccaggagatggtcgccgacgccgaccgagacttggcgacgaccacggtggtgttcctggacatctaccgcgtcctggacgacctgatggagcgcggggacaagtacggcttctctgagaccaccaggggatgctgcggcaccggcaccatcgaggtcacgggactctgcgactcccgcttcgtctccgtctgcgacaacgtctcgcagcacgtgttcttcgacagctaccaccccaccgagagagcctacaggatcatcgtcaaggacatctttgacaactacggacaagtgctcatcggatgatatatatatctaccttgcttgagcgatcgagcatgcatgttcatcttcttcatctttatgtacgttcggctagctggcccaaagcctcaaggaggcccatttatcttcttcttactcctcctcgccccaagaataattaattgtaagcatgatctgcggaatcagacggggatggtctggtggaagtctacatatgggccgctggcacgatacaaacccaccaattgatttggtttggtttggcccatatggccacttcctatccatccatccatccattccttcttcttcctcctcctcctcctcctttattctctctccagggaaggcaagctcggccagacctccctcttcaataagaacaagttgaagaaagatgtccacgtacctggtgtcctgctgcctccggccaccgtcagcgggggcggagatgcccaaggcggcttccgccgcctcctcctcttcattggccccgccgcccgacaccaagagagtcggccgaagagactttgtgctcaggagcagtgagattgccacgctcgccgccatcttccacttcagtggcagcaaaccaagctaccttggcgttcagaagagtcctccgtcccttgctctctgccctgcaaccaataactgtgtttccacatcagaggaaataagcgactcaaatcactatgctcccccatggaactacaatcccaaggatgggcggagcggtaaacccataaccaaagaggaggccatgaaagaactaattgaagtcgtcacgaagacaaagccggacaacttcactcctcgcatagtagagaaaaaagatgattatatccgagttgaatatgagagtcctatatttgggatgatgtggagttctggttccctcctggcaacaagaccatggttcagtatcggtcggcgtctcgatcaggatttatcgatttcaatgccaacaagaagagagtaaaggagctgagattggctttggaaaagaagggctgggcttcagaaagcaacttctgaattgaagtgagaagggtggaagaggtgcaggtgcatgctactcagacgagccagcacaactgggaactgggattgggtactgcccacgcaaaggcaaaaaagtctctttgtgatggtccctcgttctcattcaggtcagcgattacctagtttgtgtactaggcagcgtaagctagctgctggtgggtggtggtggccatcatgaggattcaggatgcatgatgatcttccatgggtggtgccgggggcgcactaagggaaaaaaaaaaggatattacatggacagcaaccaccctggctagctaataccaagaaatcattcatatactcctagtctcctaccaagaaaaaagatatatttattatgcatcttcttgccatccgtgcatcctactacatgcatcggatctgtccttgcgataatgagatatgcatattcgttcgatatgattgatagatagtcgacccagagatgatttaggtctctctctctctctctctctctctctctctctctctctctctctctctctctctctctctctctctctctctctggcattagttggatgcatggttgacttgtttcatgcatggattctattatagtgc

SEQ ID NO: 47157 - DNA, 4356 bp, Zea Mays
gaatagaatagaggagaggagagggagaggactggactggtactcgcagtcgcactagtgctaggcgcatccggcatccccatcccttgcctccgaatcggatcgccgcccccgctgccgctgccgctgccgccgagcggaagcagccatcaccccaaaccctagccagccatccaactatggagccgcccgccgccgccgccgccgactcctcgcccgatccgacgccgcaggaccagtttcctgccccgtccccttctccctccgcctccccggccaagcgctccgcctggaagcacccctcccccaacggccccgccgtcatggatgccaaccactggcccgcgctctccgacgccgccaagggcatcaagctcccagactcctcgtcttcctcgcctgcgcccgtcgccgccccatcgcaaggagaacctgtgctcagatgtttacttgaggcagcagatggatgatcaaggctgggttgatatatctcttatagctggcttcaaaaaggtccaagggctaaagaaggacctgcaatatataaaagagacggtgcagtcctcatctattctggaaatgaaggataacaagatcaggaagcatgatgactgggtgaaatgggtgatccctcgtgagagcaatcctgatgtcccgtcaagctcagcatctgtaccaaggcctgatgtcaataatctgacggcacatcttggaggcatggatctgcaggattctgctagctctgctggcgctgtggagccgaagcataatgatgtggtccagaacggatcgccttctggtaatgaagaggctgcagtagctgaggacagctctgatcagcagtagttacaacaaggcagtggtttggattcacaccatgactgcaggggttttgtcggtgcgcgaatgacagggcacaagtggggtagcgatgaagatttggggcagttggtggaatggagatgaagcagaatagtgggaaaacgaaggtggtgatatctggaggcgcctaggaccgaggacaaagattatgtgtgataagttagtagcccccctgtggttgtttactggggggggttgcgtttgcacacgggcgcttggatgctatcatgctgttgttacgatgaactagttggttttcgtctgcgttaggatgggggatgttgtaggacctccgattttttttatggaggagctgaacttggagagccagggagttttttttttttttggacttgttgttttgtggcatgatggtgttaaattgaagtaagaagatgctcattctgctgtatggtattgatgtgttgtggggttgaaggtgggtaaaaaatgggagggggattgctgtatggtcaggtcttgaatggctagcatactaggtaggagcagcgaccgcattgcattctctttgtcacctgtccaacaagcttctgttttggacggcatcctacaatagggcaccaacagcagacttggtacgtagtagtaaagccagtaactgttttgtgcatccatgtcggtgcgttgccatcatagacgtacctttgcctctgctgtttgtacgtcaaaggaatcagtcagggcgttcgttgctttgattgctggctggatcggattatatatcgtctcggcagctagggcggccagcaccagccatgactccttcgcttctcctctccctcctgctggtggcggcgaggtgctgccatggctggtcgtcgttccagaagccggcggtgactgcggtgatcgctttcggagactccattgtggacccggggaacaacaacgggctgcatacggtgatcaaggccaaccatccgccctacggcaaggacttgttcaaccacgaggccaccggacgctactccaacggcctcattccaaccgacctaattgcccaggagttgggtgtgaagctgctgcttcctgcctacttgggcgtggatctgagcccggaggacctgctcaccggcgtcagcttcgcgtccggcgccaccgggttcgacccgctgactcccctcgtagtgagcgtcatctcgctggagcagcagctcgcctacttcgacgagtaccgcggcaagctggtggatatcgccggcgaggatgagacggcgaggatcatcgacggcgcgctgttcgtagtgtgcgcgggcaccgacgacgtggccaacacctacttcacgacgccgttccgcagcgcggagtacgacatcccgagctacgtggagctgctggtgggcggcgccgaggagttcctccgcaacgtcagctccaggggcgccaggaagatcggcttcgtggggatgccgcccgtggggtgcgtgccgtcgcagcggacgctgggcggtggcctcgccagggcgtgcgagcccaagcggaacgaggcggcgcagctgtacaacgccaggatccaggagatggtcgccgacgccgaccgagacttggcgacgaccacggtggtgttcctggacatctaccgcgtcctggacgacctgatggagcgcggggacaagtacggcttctctgagaccaccaggggatgctgcggcaccggcaccatcgaggtcacgggactctgcgactcccgcttcgtctccgtctgcgacaacgtctcgcagcacgtgttcttcgacagctaccaccccaccgagagagcctacaggatcatcgtcaaggacatctttgacaactacggacaagtgctcatcggatgatatatatatctaccttgcttgagcgatcgagcatgcatgttcatcttcttcatctttatgtacgttcggctagctggcccaaagcctcaaggaggcccatttatcttcttcttactcctcctcgccccaagaataattaattgtaagcatgatctgcggaatcagacggggatggtctggtggaagtctacatatgggccgctggcacgatacaaacccaccaattgatttggtttggtttggcccatatggccacttcctatccatccatccatccattccttcttcttcctcctcctcctcctcctttattctctctccagggaaggcaagctcggccagacctccctcttcaataagaacaagttgaagaaagatgtccacgtacctggtgtcctgctgcctccggccaccgtcagcgggggcggagatgcccaaggcggcttccgccgcctcctcctcttcattggccccgccgcccgacaccaagagagtcggccgaagagactttgtgctcaggagcagtgagattgccacgctcgccgccatcttccacttcagtggcagcaaaccaagctaccttggcgttcagaagagtcctccgtcccttgctctctgccctgcaaccaataactgtgtttccacatcagaggaaataagcgactcaaatcactatgctcccccatggaactacaatcccaaggatgggcggagcggtaaacccataaccaaagaggaggccatgaaagaactaattgaagtcgtcacgaagacaaagccggacaacttcactcctcgcatagtagagaaaaaagatgattatatccgagttgaatatgagagtcctatatttgggtttgtagatgatgtggagttctggttccctcctggcaacaagaccatggttcagtatcggtcggcgtctcgatcaggatttatcgatttcaatgccaacaagaagagagtaaaggagctgagattggctttggaaaagaagggctgggcttcagaaagcaacttctgaattgaagtgagaagggtggaagaggtgcaggtgcatgctactcagacgagccagcacaactgggaactgggattgggtactgcccacgcaaaggcaaaaaagtctctttgtgatggtccctcgttctcattcaggtcagcgattacctagtttgtgtactaggcagcgtaagctagctgctggtgggtggtggtggccatcatgaggattcaggatgcatgatgatcttccatgggtggtgccgggggcgcactaagggaaaaaaaaaaggatattacatggacagcaaccaccctggctagctaataccaagaaatcattcatatactcctagtctcctaccaagaaaaaagatatatttattatgcatcttcttgccatccgtgcatcctactacatgcatcggatctgtccttgcgataatgagatatgcatattcgttcgatatgattgatagatagtcgacccagagatgatttaggtctctctctctctctctctctctctctctctctctctctctctctctctctctctctctctctctctctctctctggcattagttggatgcatggttgacttgtttcatgcatggattctattatagtgc

SEQ ID NO: 47158 - DNA, 3996 bp, Zea Mays
aattgattcccctttcaaatttgtgccctgccatcctcgtgggataacaagatcaggaagcatgatgactgggtgaaatgggtgatccctcgtgagagcaatcctgatgtcccgtcaagctcagcatctgtaccaaggcctgatgtcaataatctgacggcacatcttggaggcatggatctgcaggattctgctagctctgctggcgctgtggagccgaagcataatgatgtggtccagaacggatcgccttctggtaatgaagaggctgcagtagctgaggacagctctgatcagcagtagttacaacaaggcagtggtttggattcacaccatgactgcaggggttttgtcggtgcgcgaatgacagggcacaagtggtaacttttttttggcaacttttggaggggaggcgagaggcgtattagactgacaagcgaacgtgtttactggcgttcaggtaagattttggtttaccttgttatattcaggggtagcgatgaagatttggggcagttggtggaatggagatgaagcagaatagtgggaaaacgaaggtggtgatatctggaggcgcctaggaccgaggacaaagattatgtgtgataagttagtagcccccctgtggttgtttactggggggggttgcgtttgcacacgggcgcttggatgctatcatgctgttgttacgatgaactagttggttttcgtctgcgttaggatgggggatgttgtaggacctccgattttttttatggaggagctgaacttggagagccagggagttttttttttttttggacttgttgttttgtggcatgatggtgttaaattgaagtaagaagatgctcattctgctgtatggtattgatgtgttgtggggttgaaggtgggtaaaaaatgggagggggattgctgtatggtcaggtcttgaatggctagcatactaggtaggagcagcgaccgcattgcattctctttgtcacctgtccaacaagcttctgttttggacggcatcctacaatagggcaccaacagcagacttggtacgtagtagtaaagccagtaactgttttgtgcatccatgtcggtgcgttgccatcatagacgtacctttgcctctgctgtttgtacgtcaaaggaatcagtcagggcgttcgttgctttgattgctggctggatcggattatatatcgtctcggcagctagggcggccagcaccagccatgactccttcgcttctcctctccctcctgctggtggcggcgaggtgctgccatggctggtcgtcgttccagaagccggcggtgactgcggtgatcgctttcggagactccattgtggacccggggaacaacaacgggctgcatacggtgatcaaggccaaccatccgccctacggcaaggacttgttcaaccacgaggccaccggacgctactccaacggcctcattccaaccgacctaattggtactatgttatgttatgttatgtacacagacaatatataattattatgcatggttgcatgcatgcatgcagcccaggagttgggtgtgaagctgctgcttcctgcctacttgggcgtggatctgagcccggaggacctgctcaccggcgtcagcttcgcgtccggcgccaccgggttcgacccgctgactcccctcgtagtgagcgtcatctcgctggagcagcagctcgcctacttcgacgagtaccgcggcaagctggtggatatcgccggcgaggatgagacggcgaggatcatcgacggcgcgctgttcgtagtgtgcgcgggcaccgacgacgtggccaacacctacttcacgacgccgttccgcagcgcggagtacgacatcccgagctacgtggagctgctggtgggcggcgccgaggagttcctccgcaacgtcagctccaggggcgccaggaagatcggcttcgtggggatgccgcccgtggggtgcgtgccgtcgcagcggacgctgggcggtggcctcgccagggcgtgcgagcccaagcggaacgaggcggcgcagctgtacaacgccaggatccaggagatggtcgccgacgccgaccgagacttggcgacgaccacggtggtgttcctggacatctaccgcgtcctggacgacctgatggagcgcggggacaagtacggcttctctgagaccaccaggggatgctgcggcaccggcaccatcgaggtcacgggactctgcgactcccgcttcgtctccgtctgcgacaacgtctcgcagcacgtgttcttcgacagctaccaccccaccgagagagcctacaggatcatcgtcaaggacatctttgacaactacggacaagtgctcatcggatgatatatatatctaccttgcttgagcgatcgagcatgcatgttcatcttcttcatctttatgtacgttcggctagctggcccaaagcctcaaggaggcccatttatcttcttcttactcctcctcgccccaagaataattaattgtaagcatgatctgcggaatcagacggggatggtctggtggaagtctacatatgggccgctggcacgatacaaacccaccaattgatttggtttggtttggcccatatggccacttcctatccatccatccatccattccttcttcttcctcctcctcctcctcctttattctctctccagggaaggcaagctcggccagacctccctcttcaataagaacaagttgaagaaagatgtccacgtacctggtgtcctgctgcctccggccaccgtcagcgggggcggagatgcccaaggcggcttccgccgcctcctcctcttcattggccccgccgcccgacaccaagagagtcggccgaagagactttgtgctcaggagcagtgagattgccacgctcgccgccatcttccacttcagtggcagcaaaccaagctaccttggcgttcagaagagtcctccgtcccttgctctctgccctgcaaccaataactgtgtttccacatcagaggaaataagcgactcaaatcactatgctcccccatggaactacaatcccaaggatgggcggagcggtaaacccataaccaaagaggaggccatgaaagaactaattgaagtcgtcacgaagacaaagccggacaacttcactcctcgcatagtagagaaaaaagatgattatatccgagttgaatatgagagtcctatatttgggtttgtagatgatgtggagttctggttccctcctggcaacaagaccatggttcagtatcggtcggcgtctcgatcaggatttatcgatttcaatgccaacaagaagagagtaaaggagctgagattggctttggaaaagaagggctgggcttcagaaagcaacttctgaattgaagtgagaagggtggaagaggtgcaggtgcatgctactcagacgagccagcacaactgggaactgggattgggtactgcccacgcaaaggcaaaaaagtctctttgtgatggtccctcgttctcattcaggtcagcgattacctagtttgtgtactaggcagcgtaagctagctgctggtgggtggtggtggccatcatgaggattcaggatgcatgatgatcttccatgggtggtgccgggggcgcactaagggaaaaaaaaaaggatattacatggacagcaaccaccctggctagctaataccaagaaatcattcatatactcctagtctcctaccaagaaaaaagatatatttattatgcatcttcttgccatccgtgcatcctactacatgcatcggatctgtccttgcgataatgagatatgcatattcgttcgatatgattgatagatagtcgacccagagatgatttaggtctctctctctctctctctctctctctctctctctctctctctctctctctctctctctctctctctctctctctggcattagttggatgcatggttgacttgtttcatgcatggattctattatagtgc

SEQ ID NO: 47159 - DNA, 4043 bp, Zea Mays
tgcagctacgtgagacatgccatactgataccacacattggcgtattttggcagcaactccccgcgcgcagctttcttaaaccccgaaaaccaaaaataaaaatccccctttcttctcccccgactcccctcttccttctttctcgtccgatcagagtcacttccacctagccgccgccgccgccgccgctaccagagtcaccgcggccgctgcttctagggctgcgccttctcgcgcctccggagccttccctgctccccgcgatccccgctgccccccatccccacccccacaagcttccttgacctgctcactccaaacgctgccgccatggcggagaagctcagggatctgagtcagccgatagacgtgacgctgctcgatgccacagtcgccgccttttacggcactggatctaaagaggagaggagcgccgctgatcagatactacgtgatctacaaaataatccagacatgtggctacaagttgtacatattctgcagaattcccagaatctcaacaccaagttctttgcactacaagtacttgaaagtgttatcaagtacaggtggaatgcattgcctgttgaacaacgtgatggcataaagaattacatatccgatgttattgtgcagctttctagcaatgaagttacctttcggcaggagaggctttacgtcaataaactcaatattattttggtgcaggtcctgaaacatgagtggcctgccagatggtcatccttcgtacctgatcttgttgcagctgcaaagagtagtgaaactatatgtgaaaattgcatggctatattgaagcttctaagtgaagaaatttttgacttctcaagaggtgaaatgacacaacaaaagatcaaagaactgaagtcttcacttaatagtgaattccggctcattcatgagctatgcttgtatgtcttatctgcaacgcaaaggccacagctcatccgtgctacattggcgacactccatgctttcttatcatggatcccaattggattcatttttgagtcaccgttgctggagacattactgaagttcttccctatggctgcttatcagaatcttacacttcaatgcctaacagaggttgcagcacttcagtttggtgatttttataacgtgcagtatgtgaagatgtatacatttttcatgattcagttgcaggctattcttcctcctgaaaaaatcccagatgcatatgctaatggttccactgaagagcaggcatttatacaaaatctcgcactcttcttcacatccttttttaagaatcacatgcgtatactggaaacaactcaagaaaacagtgctgctttgcttatgggtctcgagtaccttattggaatttcatatgttgatgatacagaggtttttaaggtctgcttggattactggaatgtatttgtcttagagctatttgaagcacacaatgaaatggaacctgcagcagccgtaagcatgatggggcttcagacgcgaatggttcctggaatggtagatgggactgtcactgctgttcatcagaggagacaactttactccgcttcactctcaaaactgcggatgctgatgatttgtcgaatggcaaagcctgaggaagtacttattgttgaagacgaaaatggcaatattgtacgtgagacaatgaaagacaacgatgttcttgttcagtacaagatcatgagggaaacactgatctatttatctcatcttgatcacgaggatacagagcaacagatgttgaagaaactaagcaagcaattaaatggagaagactggagttggaataaccttaatactctctgttgggctattggatcaatatcagggtctatggtagaggagcaggagaatagatttctggttatggttattcgtgatttgctaaacctatgtgaaatcacaaagggaaaggacaataaagctgtgattgcaagtaacatcatgtatgttgttggtcagtatccaagatttctcagggcccattggaagtttttgaaaactgtggtcaacaaattgtttgagttcatgcatgagatgcatcctggagttcaggatatggcatgtgataccttcctgaaaattgttcaaaaatgcaagcgcaagtttgtgacacaacaggtgggcgagaatgaaccatttgtttctgagcttctgtccaaccttgctacaacaatcgcggatcttgagccacatcagatccatacattttacgaatcagttggccatatgattcaagctgaatctgacaacactaagagagatgaatatctcaagagattgatgagccttcctaatcagaagtgggcagaaataattggacaggcaagccaaagcattgatatcttgaagaaccaagatgttatcagatcagttctcaacatcctacagacaaacacaagtgttgcgagctcccttggaccacacttcttcccacagatttctctaattttcttggacatgctaacagtctacagaatgtacagtgagcttgtatcaagcacgatcgctgaaggaggaccatttgcctcaaggacatcatttgtaaaactattgagatctgtcaagagggaaaccctaaagttgatcgagacttttgtggacaaggcagaagatttaccgcacttaggaaagcagtttgttccaccaatgatggatcctgtccttggtgattatgctagaaatgtacccgatgcaagggagtctgaagttctgtctttgtttgcaacaatcattaacaagtacaaaggggaaatgcttgaggatgtgcctcgtatatttgaggctgttttccagtgcactcttgagatgattactaagaactttgaagattatcctgagcaccgcctcaaatttttttctttgctccgtgcaattggcacccattgcttccaagcattaatccagctttcaagccagcaattgaagcttgtgatcgattcgattaattgggcgttcagacataccgagagaaatatcgcagagactggccttagtctattgttggaaattttgaagaactttgaggcttcaggattccaaaatcaattctacaaaacctactttttgacaattgagcaagagatttttgcagttctcacagacacattccacaaacctggtttcaagcttcatgttttggtgctccaacacttattttatgtggttgatagtctaactgagcctctatgggattcttcatcagtaccatatcaatatacggataatgccacgtttgttcgagattacaccataaaactcttaggaacatcatttcctaacatgactgtagctgaggtgaccaagtttgtggatggccttcttagttcaaaacttgatcttccgagcttcaaaaaccatattagagatttcctggtgcagtcgaaggagttctcagctcaggataacaaggatctatacgcggaagaggctgctgcccaaagagaaagggagcgccaacgaatgcttgccattccggggctgattgcccctagcgaattgcaagacgagatggtagattcgtagtgttccttgttttgattctgctttctctaatgtagcttcctgtttgttggtctggcctcgggagccctcgtctttcaagtgcgagttttcttccaggactgggaatggactagtcagttttgccgcaggggaggttcctggaaccgctgttgggtcttcagcagctgtgcttgcctggatgtgttaacagcggctcttaacattgatttgctgtctcatcgacaagctgtgtatcgagaaactgttcggtatttctgccagctgtggaggcacattcgaaaacggaatagatttttttgttttttttgtgtgtctgtgtgtgtgtgtgttagggtttagggttcaataggtcgatccttactgtgttggtttgttagaaaccgcctgaataaacttagaatattcaacttagaataaacttagaataaacttgatggcttatgtaaataatctattaataaaatacatgggtttttatttaaaacgatatatttca

SEQ ID NO: 47160 - DNA, 3934 bp, Zea Mays
tgcagctacgtgagacatgccatactgataccacacattggcgtattttggcagcaactccccgcgcgcagctttcttaaaccccgaaaaccaaaaataaaaatccccctttcttctcccccgactcccctcttccttctttctcgtccgatcagagtcacttccacctagccgccgccgccgccgccgctaccagagtcaccgcggccgctgcttctagggctgcgccttctcgcgcctccggagccttccctgctccccgcgatccccgctgccccccatccccacccccacaagcttccttgacctgctcactccaaacgctgccgccatggcggagaagctcagggatctgagtcagccgatagacgtgacgctgctcgatgccacagtcgccgccttttacggcactggatctaaagaggagaggagcgccgctgatcagatactacgtgatctacaaaataatccagacatgtggctacaagttgtacatattctgcagaattcccagaatctcaacaccaagttctttgcactacaagtacttgaaagtgttatcaagtacaggtggaatgcattgcctgttgaacaacgtgatggcataaagaattacatatccgatgttattgtgcagctttctagcaatgaagttacctttcggcaggagaggctttacgtcaataaactcaatattattttggtgcaggtcctgaaacatgagtggcctgccagatggtcatccttcgtacctgatcttgttgcagctgcaaagagtagtgaaactatatgtgaaaattgcatggctatattgaagcttctaagtgaagaaatttttgacttctcaagaggtgaaatgacacaacaaaagatcaaagaactgaagtcttcacttaatagtgaattccggctcattcatgagctatgcttgtatgtcttatctgcaacgcaaaggccacagctcatccgtgctacattggcgacactccatgctttcttatcatggatcccaattggattcatttttgagtcaccgttgctggagacattactgaagttcttccctatggctgcttatcagaatcttacacttcaatgcctaacagaggttgcagcacttcagtttggtgatttttataacgtgcagtatgtgaagatgtatacatttttcatgattcagttgcaggctattcttcctcctgaaaaaatcccagatgcatatgctaatggttccactgaagagcaggcatttatacaaaatctcgcactcttcttcacatccttttttaagaatcacatgcgtatactggaaacaactcaagaaaacagtgctgctttgcttatgggtctcgagtaccttattggaatttcatatgttgatgatacagaggtttttaaggtctgcttggattactggaatgtatttgtcttagagctatttgaagcacacaatgaaatggaacctgcagcagccgtaagcatgatggggcttcagacgcgaatggttcctggaatggtagatgggactgtcactgctgttcatcagaggagacaactttactccgcttcactctcaaaactgcggatgctgatgatttgtcgaatggcaaagcctgaggaagtacttattgttgaagacgaaaatggcaatattgtacgtgagacaatgaaagacaacgatgttcttgttcagtacaagatcatgagggaaacactgatctatttatctcatcttgatcacgaggatacagagcaacagatgttgaagaaactaagcaagcaattaaatggagaagactggagttggaataaccttaatactctctgttgggctattggatcaatatcagggtctatggtagaggagcaggagaatagatttctggttatggttattcgtgatttgctaaacctatgtgaaatcacaaagggaaaggacaataaagctgtgattgcaagtaacatcatgtatgttgttggtcagtatccaagatttctcagggcccattggaagtttttgaaaactgtggtcaacaaattgtttgagttcatgcatgagatgcatcctggagttcaggatatggcatgtgataccttcctgaaaattgttcaaaaatgcaagcgcaagtttgtgacacaacaggtgggcgagaatgaaccatttgtttctgagcttctgtccaaccttgctacaacaatcgcggatcttgagccacatcagatccatacattttacgaatcagttggccatatgattcaagctgaatctgacaacactaagagagatgaatatctcaagagattgatgagccttcctaatcagaagtgggcagaaataattggacaggcaagccaaagcattgatatcttgaagaaccaagatgttatcagatcagttctcaacatcctacagacaaacacaagtgttgcgagctcccttggaccacacttcttcccacagatttctctaattttcttggacatgctaacagtctacagaatgtacagtgagcttgtatcaagcacgatcgctgaaggaggaccatttgcctcaaggacatcatttgtaaaactattgagatctgtcaagagggaaaccctaaagttgatcgagacttttgtggacaaggcagaagatttaccgcacttaggaaagcagtttgttccaccaatgatggatcctgtccttggtgattatgctagaaatgtacccgatgcaagggagtctgaagttctgtctttgtttgcaacaatcattaacaagtacaaaggggaaatgcttgaggatgtgcctcgtatatttgaggctgttttccagtgcactcttgagatgattactaagaactttgaagattatcctgagcaccgcctcaaatttttttctttgctccgtgcaattggcacccattgcttccaagcattaatccagctttcaagccagcaattgaagcttgtgatcgattcgattaattgggcgttcagacataccgagagaaatatcgcagagactggccttagtctattgttggaaattttgaagaactttgaggcttcaggattccaaaatcaattctacaaaacctactttttgacaattgagcaagagatttttgcagttctcacagacacattccacaaacctggtttcaagcttcatgttttggtgctccaacacttattttatgtggttgatagtctaactgagcctctatgggattcttcatcagtaccatatcaatatacggataatgccacgtttgttcgagattacaccataaaactcttaggaacatcatttcctaacatgactgtagctgaggtgaccaagtttgtggatggccttcttagttcaaaacttgatcttccgagcttcaaaaaccatattagagatttcctggtgcagtcgaaggagttctcagctcaggataacaaggatctatacgcggaagaggctgctgcccaaagagaaagggagcgccaacgaatgcttgccattccggggctgattgcccctagcgaattgcaagacgagatgactgggaatggactagtcagttttgccgcaggggaggttcctggaaccgctgttgggtcttcagcagctgtgcttgcctggatgtgttaacagcggctcttaacattgatttgctgtctcatcgacaagctgtgtatcgagaaactgttcggtatttctgccagctgtggaggcacattcgaaaacggaatagatttttttgttttttttgtgtgtctgtgtgtgtgtgtgttagggtttagggttcaataggtcgatccttactgtgttggtttgttagaaaccgcctgaataaacttagaatattcaacttagaataaacttagaataaacttgatggcttatgtaaataatctattaataaaatacatgggtttttatttaaaacgatatatttca

SEQ ID NO: 47161 - DNA, 4053 bp, Zea Mays
tgcagctacgtgagacatgccatactgataccacacattggcgtattttggcagcaactccccgcgcgcagctttcttaaaccccgaaaaccaaaaataaaaatccccctttcttctcccccgactcccctcttccttctttctcgtccgatcagagtcacttccacctagccgccgccgccgccgccgctaccagagtcaccgcggccgctgcttctagggctgcgccttctcgcgcctccggagccttccctgctccccgcgatccccgctgccccccatccccacccccacaagcttccttgacctgctcactccaaacgctgccgccatggcggagaagctcagggatctgagtcagccgatagacgtgacgctgctcgatgccacagtcgccgccttttacggcactggatctaaagaggagaggagcgccgctgatcagatactacgtgatctacaaaataatccagacatgtggctacaagttgtacatattctgcagaattcccagaatctcaacaccaagttctttgcactacaagtacttgaaagtgttatcaagtacaggtggaatgcattgcctgttgaacaacgtgatggcataaagaattacatatccgatgttattgtgcagctttctagcaatgaagttacctttcggcaggagaggctttacgtcaataaactcaatattattttggtgcaggtcctgaaacatgagtggcctgccagatggtcatccttcgtacctgatcttgttgcagctgcaaagagtagtgaaactatatgtgaaaattgcatggctatattgaagcttctaagtgaagaaatttttgacttctcaagaggtgaaatgacacaacaaaagatcaaagaactgaagtcttcacttaatagtgaattccggctcattcatgagctatgcttgtatgtcttatctgcaacgcaaaggccacagctcatccgtgctacattggcgacactccatgctttcttatcatggatcccaattggattcatttttgagtcaccgttgctggagacattactgaagttcttccctatggctgcttatcagaatcttacacttcaatgcctaacagaggttgcagcacttcagtttggtgatttttataacgtgcagtatgtgaagatgtatacatttttcatgattcagttgcaggctattcttcctcctgaaaaaatcccagatgcatatgctaatggttccactgaagagcaggcatttatacaaaatctcgcactcttcttcacatccttttttaagaatcacatgcgtatactggaaacaactcaagaaaacagtgctgctttgcttatgggtctcgagtaccttattggaatttcatatgttgatgatacagaggtttttaaggtctgcttggattactggaatgtatttgtcttagagctatttgaagcacacaatgaaatggaacctgcagcagccgtaagcatgatggggcttcagacgcgaatggttcctggaatggtagatgggactgtcactgctgttcatcagaggagacaactttactccgcttcactctcaaaactgcggatgctgatgatttgtcgaatggcaaagcctgaggaagtacttattgttgaagacgaaaatggcaatattgtacgtgagacaatgaaagacaacgatgttcttgttcagtacaagatcatgagggaaacactgatctatttatctcatcttgatcacgaggatacagagcaacagatgttgaagaaactaagcaagcaattaaatggagaagactggagttggaataaccttaatactctctgttgggctattggatcaatatcagggtctatggtagaggagcaggagaatagatttctggttatggttattcgtgatttgctaaacctatgtgaaatcacaaagggaaaggacaataaagctgtgattgcaagtaacatcatgtatgttgttggtcagtatccaagatttctcagggcccattggaagtttttgaaaactgtggtcaacaaattgtttgagttcatgcatgagatgcatcctggagttcaggatatggcatgtgataccttcctgaaaattgttcaaaaatgcaagcgcaagtttgtgacacaacaggtgggcgagaatgaaccatttgtttctgagcttctgtccaaccttgctacaacaatcgcggatcttgagccacatcagatccatacattttacgaatcagttggccatatgattcaagctgaatctgacaacactaagagagatgaatatctcaagagattgatgagccttcctaatcagaagtgggcagaaataattggacaggcaagccaaagcattgatatcttgaagaaccaagatgttatcagatcagttctcaacatcctacagacaaacacaagtgttgcgagctcccttggaccacacttcttcccacagatttctctaattttcttggacatgctaacagtctacagaatgtacagtgagcttgtatcaagcacgatcgctgaaggaggaccatttgcctcaaggacatcatttgtaaaactattgagatctgtcaagagggaaaccctaaagttgatcgagacttttgtggacaaggcagaagatttaccgcacttaggaaagcagtttgttccaccaatgatggatcctgtccttggtgattatgctagaaatgtacccgatgcaagggagtctgaagttctgtctttgtttgcaacaatcattaacaagtacaaaggggaaatgcttgaggatgtgcctcgtatatttgaggctgttttccagtgcactcttgagatgattactaagaactttgaagattatcctgagcaccgcctcaaatttttttctttgctccgtgcaattggcacccattgcttccaagcattaatccagctttcaagccagcaattgaagcttgtgatcgattcgattaattgggcgttcagacataccgagagaaatatcgcagagactggccttagtctattgttggaaattttgaagaactttgaggcttcaggattccaaaatcaattctacaaaacctactttttgacaattgagcaagagatttttgcagttctcacagacacattccacaaacctggtttcaagcttcatgttttggtgctccaacacttattttatgtggttgatagtctaactgagcctctatgggattcttcatcagtaccatatcaatatacggataatgccacgtttgttcgagattacaccataaaactcttaggaacatcatttcctaacatgactgtagctgaggtgaccaagtttgtggatggccttcttagttcaaaacttgatcttccgagcttcaaaaaccatattagagatttcctggtgcagtcgaaggagttctcagctcaggataacaaggatctatacgcggaagaggctgctgcccaaagagaaagggagcgccaacgaatgcttgccattccggggctgattgcccctagcgaattgcaagacgagatggtagattcgtagtgttccttgttttgattctgctttctctaatgtagcttcctgtttgttggtctggcctcgggagccctcgtctttcaagtgcgagttttcttccagggtggtgaaagactgggaatggactagtcagttttgccgcaggggaggttcctggaaccgctgttgggtcttcagcagctgtgcttgcctggatgtgttaacagcggctcttaacattgatttgctgtctcatcgacaagctgtgtatcgagaaactgttcggtatttctgccagctgtggaggcacattcgaaaacggaatagatttttttgttttttttgtgtgtctgtgtgtgtgtgtgttagggtttagggttcaataggtcgatccttactgtgttggtttgttagaaaccgcctgaataaacttagaatattcaacttagaataaacttagaataaacttgatggcttatgtaaataatctattaataaaatacatgggtttttatttaaaacgatatatttca

SEQ ID NO: 47162 - DNA, 2531 bp, Zea Mays
cgtacaaattctcagtatactcaaagtattggacgcccagcccagcccaccagaagaggacaaaccagattcgattcctcctcctgtcctccatctccccaattcgcacggccatcggaccatggattccggcgtgcctgcctctgcgcctgcccctcccaaacacaagacatgccggaagtgcaaggcgagctatgacccctcggccaacacgcgcctctcctgcaggttccacccttccttcttcgtctgccgccgccacgacgaccagaagaggtactacgagctccgcgacggcgatcctccctacgccgccaagttctacgactgctgcggcgccgaggaccccgacgctccgggctgcaccactgacttgcaccgttcctacgacgacgcccaagactagcaaacctttgctgcttccacaggcctcatcttaatctcaagtctcatctaccgtttcgcttttgcatcccctccttatcctctctagtcagctatcaaattaaaccatctatgtacacttaaataaattttgcttcagatatgttacctactggagctttttttttcctttttttttgcaattgatcaaacatatctctcttcatctatacaccgtctgtttggttggcttgcctctcaggatgctttaagtatcatacgagtctgactccacatctgcacgtaggtaaccaaacacacacctcgcacacgtaaagcctggaaccaaacacatgaatactaaactggaacataaggcgccccctatctgaactcccaaaaaaagccagcaattcataaaagtttatgtcatacaaactttgattcagtaattctgattcattgtaataacatcgatcttgtttggaataaacatttcactgggatatagaatatccaaatgtaaatagtttctgtccatgcatatcccacacctgtttttataaaaaaaaaatcaggccgtcagtattctctttcagttcttcattcaaatgataattcagggacttcaagggaaggtggtgcatcacttttaacagcaagggcacgtgggtatagatctgatcggcgcgatttttttctttctttctttccggacagcggcaccgcaccgggagggcgtcctcgccgacgtgccgccgtccaacaagctggtcttcatcctggcggggcagtccaacatggccggccgcggcggggtggtggcgaaccgctgggacggcgtggtgccgggcgactgcgcgccgtcccccgcggtgctgcgtctctcgcccgacctgcgctgggaggaggcgcgggagccgctgcacgccggcatcgacgccgccaaccacgccgtcggggtgggccccgggatggcgttcgccaacgcgctgctgcgctcgggccgcgcggggggcgccgtggtagggctcgtcccctgcgccgtgggaggcacgcggatggcagagtggggcaggggcaccgagctctacgccgagatgctgcgccgggccagggtcgccgtcgagacggggggccgcatcggtgcgctgttgtggtaccagggggagagtgacaccgtccgctggtccgacgccaccgagtacggccgccggatggggatgctcgtccgtgatctccgcgccgatcttggcatcccgcacctcctcgtcatccaggtcgggttagcatcgggcctaggacagtatactcaagtcgtgagagacgctcagaaagggatcaaacttcgcaacgtcagattcgttgatgcgatggggttgccattgcaagacggccatctgcatctaagcacccaagctcaagtccagcttgggcgtatgttggctcagtcctatctaaattatggtacatcccaactctagctagtacttgtgagatagaaattcctgccctgtttggacgattcattgagaacccattcttataattattgttgtatggaatcaacttgttactgctcgatgcaatatcttcatcacaactcagatccatcactgtcttggactttttttctttctctgtcttcctttattggttctttgataatgagcagaggcgacgtctgttaagccttttattctatgtccaatcatatttatttgcccttttttctttttgtggggtgataggacatgcacactctccaacccctaaaccatggtggctgcaaatcgttttggtattttgcttcatttttgtttgaaacggagcatgcaaatcgttcaggtgagcagaagaagaagaagaaacccaaatgagtttaacataggcatccaggacttattctgtcaatcaataagtctcattgtctgactagttgtaatgtaaaaggagaacacagagagtagtcgacagtcttgataagcatttgaaatttgcctaactttggagttggtcagaattcaatcagatagatatacatatggaatctcttttagaggggcattgctacccttttcttcgcaaaactcccttcgctcctatggtaccaaaatgcttcatctgagctctggttttaggtcacg

SEQ ID NO: 47163 - DNA, 2762 bp, Zea Mays
cgtacaaattctcagtatactcaaagtattggacgcccagcccagcccaccagaagaggacaaaccagattcgattcctcctcctgtcctccatctccccaattcgcacggccatcggaccatggattccggcgtgcctgcctctgcgcctgcccctcccaaacacaagacatgccggaagtgcaaggcgagctatgacccctcggccaacacgcgcctctcctgcaggttccacccttccttcttcgtctgccgccgccacgacgaccagaagaggtactacgagctccgcgacggcgatcctccctacgccgccaagttctacgactgctgcggcgccgaggaccccgacgctccgggctgcaccactgacttgcaccgttcctacgacgacgcccaagactagcaaacctttgctgcttccacaggcctcatcttaatctcaagtctcatctaccgtttcgcttttgcatcccctccttatcctctctagtcagctatcaaattaaaccatctatgtacacttaaataaattttgcttcagatatgttacctactggagctttttttttcctttttttttgcaattgatcaaacatatctctcttcatctatacaccgtctgtttggttggcttgcctctcaggatgctttaagtatcatacgagtctgactccacatctgcacgtaggtaaccaaacacacacctcgcacacgtaaagcctggaaccaaacacatgaatactaaactggaacataaggcgccccctatctgaactcccaaaaaaagccagcaattcataaaagtttatgtcatacaaactttgattcagtaattctgattcattgtaataacatcgatcttgtttggaataaacatttcactgggatatagaatatccaaatgtaaatagtttctgtccatgcatatcccacacctgtttttataaaaaaaaaatcaggccgtcagtattctctttcagttcttcattcaaatgataattcagggacttcaagggaaggtggtgcatcacttttaacagcaagggcacgtgggtatagatctgatcggcgcgatttttttctttctttctttccggacagcggcaccgcaccgggagggcgtcctcgccgacgtgccgccgtccaacaagctggtcttcatcctggcggggcagtccaacatggccggccgcggcggggtggtggcgaaccgctgggacggcgtggtgccgggcgactgcgcgccgtcccccgcggtgctgcgtctctcgcccgacctgcgctgggaggaggcgcgggagccgctgcacgccggcatcgacgccgccaaccacgccgtcggggtgggccccgggatggcgttcgccaacgcgctgctgcgctcgggccgcgcggggggcgccgtggtagggctcgtcccctgcgccgtgggaggcacgcggatggcagagtggggcaggggcaccgagctctacgccgagatgctgcgccgggccagggtcgccgtcgagacggggggccgcatcggtgcgctgttgtggtaccagggggagagtgacaccgtccgctggtccgacgccaccgagtacggccgccggatggggatgctcgtccgtgatctccgcgccgatcttggcatcccgcacctcctcgtcatccaggttggtgtgtgtgtgtgtgtgtggtaggagtagttagttctttcccgttctcacaagcaatcaagcaagcaagcaacctcaattcagtaccactgtactgtactggacggcttttattttgcattgtcaagcgagcggcacctggttcgggcatcttccgctaccatgaaggcatgaacaaaccaaccatattcaccaattcctttcttttgtctttctttcttcatccaggtcgggttagcatcgggcctaggacagtatactcaagtcgtgagagacgctcagaaagggatcaaacttcgcaacgtcagattcgttgatgcgatggggttgccattgcaagacggccatctgcatctaagcacccaagctcaagtccagcttgggcgtatgttggctcagtcctatctaaattatggtacatcccaactctagctagtacttgtgagatagaaattcctgccctgtttggacgattcattgagaacccattcttataattattgttgtatggaatcaacttgttactgctcgatgcaatatcttcatcacaactcagatccatcactgtcttggactttttttctttctctgtcttcctttattggttctttgataatgagcagaggcgacgtctgttaagccttttattctatgtccaatcatatttatttgcccttttttctttttgtggggtgataggacatgcacactctccaacccctaaaccatggtggctgcaaatcgttttggtattttgcttcatttttgtttgaaacggagcatgcaaatcgttcaggtgagcagaagaagaagaagaaacccaaatgagtttaacataggcatccaggacttattctgtcaatcaataagtctcattgtctgactagttgtaatgtaaaaggagaacacagagagtagtcgacagtcttgataagcatttgaaatttgcctaactttggagttggtcagaattcaatcagatagatatacatatggaatctcttttagaggggcattgctacccttttcttcgcaaaactcccttcgctcctatggtaccaaaatgcttcatctgagctctggttttaggtcacg

SEQ ID NO: 47164 - DNA, 2247 bp, Zea Mays
cgtacaaattctcagtatactcaaagtattggacgcccagcccagcccaccagaagaggacaaaccagattcgattcctcctcctgtcctccatctccccaattcgcacggccatcggaccatggattccggcgtgcctgcctctgcgcctgcccctcccaaacacaagacatgccggaagtgcaaggcgagctatgacccctcggccaacacgcgcctctcctgcaggttccacccttccttcttcgtctgccgccgccacgacgaccagaagaggtactacgagctccgcgacggcgatcctccctacgccgccaagttctacgactgctgcggcgccgaggaccccgacgctccgggctgcaccactgacttgcaccgttcctacgacgacgcccaagactagcaaacctttgctgcttccacaggcctcatcttaatctcaagtctcatctaccgtttcgcttttgcatcccctccttatcctctctagtcagctatcaaattaaaccatctatgtacacttaaataaattttgcttcagatatgttacctactggagctttttttttcctttttttttgcaattgatcaaacatatctctcttcatctatacaccgtctgtttggttggcttgcctctcaggatgctttaagtatcatacgagtctgactccacatctgcacgtaggtaaccaaacacacacctcgcacacgtaaagcctggaaccaaacacatgaatactaaactggaacataaggcgccccctatctgaactcccaaaaaaagccagcaattcataaaagtttatgtcatacaaactttgattcagtaattctgattcattgtaataacatcgatcttgtttggaataaacatttcactgggatatagaatatccaaatgtaaatagtttctgtccatgcatatcccacacctgtttttataaaaaaaaaatcaggccgtcagtattctctttcagttcttcattcaaatgataattcagggacttcaagggaaggtggtgcatcacttttaacagcaagggcacgtgggtatagatctgatcggcgcgatttttttctttctttctttccggacagcggcaccgcaccgggagggcgtcctcgccgacgtgccgccgtccaacaagctggtcttcatcctggcggggcagtccaacatggccggccgcggcggggtggtggcgaaccgctgggacggcgtggtgccgggcgactgcgcgccgtcccccgcggtgctgcgtctctcgcccgacctgcgctgggaggaggcgcgggagccgctgcacgccggcatcgacgccgccaaccacgccgtcggggtgggccccgggatggcgttcgccaacgcgctgctgcgctcgggccgcgcggggggcgccgtggtagggctcgtcccctgcgccgtgggaggcacgcggatggcagagtggggcaggggcaccgagctctacgccgagatgctgcgccgggccagggtcgccgtcgagacggggggccgcatcggtgcgctgttgtggtaccagggggagagtgacaccgtccgctggtccgacgccaccgagtacggccgccggatggggatgctcgtccgtgatctccgcgccgatcttggcatcccgcacctcctcgtcatccaggtcgggttagcatcgggcctaggacagtatactcaagtcgtgagagacgctcagaaagggatcaaacttcgcaacgtcagattcgttgatgcgatggggttgccattgcaagacggccatctgcatctaagcacccaagctcaagtccagcttgggcgtatgttggctcagtcctatctaaattatggacatgcacactctccaacccctaaaccatggtggctgcaaatcgttttggtattttgcttcatttttgtttgaaacggagcatgcaaatcgttcaggtgagcagaagaagaagaagaaacccaaatgagtttaacataggcatccaggacttattctgtcaatcaataagtctcattgtctgactagttgtaatgtaaaaggagaacacagagagtagtcgacagtcttgataagcatttgaaatttgcctaactttggagttggtcagaattcaatcagatagatatacatatggaatctcttttagaggggcattgctacccttttcttcgcaaaactcccttcgctcctatggtaccaaaatgcttcatctgagctctggttttaggtcacg

SEQ ID NO: 47165 - DNA, 1261 bp, Zea Mays
gcccagcccagcccaccagaagaggacaaaccagattcgattcctcctcctgtcctccatctccccaattcgcacggccatcggaccatggattccggcgtgcctgcctctgcgcctgcccctcccaaacacaagacatgccggaagtgcaaggcgagctatgacccctcggccaacacgcgcctctcctgcaggttccacccttccttcttcgtctgccgccgccacgacgaccagaagaggtactacgagctccgcgacggcgatcctccctacgccgccaagttctacgactgctgcggcgccgaggaccccgacgctccgggctgcaccactgacttgcaccgttcctacgacgacgcccaagactagcaaacctttgctgcttccacaggtcgggttagcatcgggcctaggacagtatactcaagtcgtgagagacgctcagaaagggatcaaacttcgcaacgtcagattcgttgatgcgatggggttgccattgcaagacggccatctgcatctaagcacccaagctcaagtccagcttgggcgtatgttggctcagtcctatctaaattatggtacatcccaactctagctagtacttgtgagatagaaattcctgccctgtttggacgattcattgagaacccattcttataattattgttgtatggaatcaacttgttactgctcgatgcaatatcttcatcacaactcagatccatcactgtcttggactttttttctttctctgtcttcctttattggttctttgataatgagcagaggcgacgtctgttaagccttttattctatgtccaatcatatttatttgcccttttttctttttgtggggtgataggacatgcacactctccaacccctaaaccatggtggctgcaaatcgttttggtattttgcttcatttttgtttgaaacggagcatgcaaatcgttcaggtgagcagaagaagaagaagaaacccaaatgagtttaacataggcatccaggacttattctgtcaatcaataagtctcattgtctgactagttgtaatgtaaaaggagaacacagagagtagtcgacagtcttgataagcatttgaaatttgcctaactttggagttggtcagaattcaatcagatagatatacatatggaatctcttttagaggggcattgctacccttttcttcgcaaaactcccttcgctcctatggtaccaaaatgcttcatctgagctctggttttaggtcacg

SEQ ID NO: 47166 - DNA, 2680 bp, Zea Mays
cccctatcctctctcctcgcccaccggaaacgcaacgcaacgcaacgcaaccagagggggaggggggggggggggaaagccggagccgactgcccgcaccacccacaggaacgccgcggggcaggggggcaggaggaagacgccggcggcggcggcttaaaagggcagggcgccattacctgcttccctgtcttccccttcccctcatgtactatagtactgcgctgcgccctttcatttacccggagtagtaaacgagaagaggaataattgtgtcgcaaactaatccgtttcgccgctgcctgctgcttgagccaatcttccgcgggtcggggccgatgacctgccaactggtctgtttcacttgccattttggataggatcgctcgttttggaattaactttatgctaacagaatctaggtgtcattaagctagattaagcttgctgcttgacttagtagtgtaaatctgtaaagaaaattacctggtttgggtttagtctctataaaagaaatggaacagaggaatgttctggcattgggtgaacatgttctaaaagctactgtttggaagcggaagcataagactgctatggagcaccctgaaggcaatgatgtgatggtgttctctcagcatgatcaaagaaagcaccctgtgatatttgacgacagagctaaatgtaagaagtctaaattaatttcctgtgggagtggagttatattggagtcatattggaactttaagacaagtgggctgcctgtgcgcgtgcttttctaccaacatggtgactggagtgattttccagaggatgttgtaaatctagcacaacaggacttccagttgaagaagccaattacaactgctgtgttccagaacaagcacatcctgttggacttcattcacatgatttgcatagattatgagatgaccatagacaaaccactagcatgggttgatgataatggcaaacgcttctttccagatttatctgctgggctctacacatctaaaccatctcagcatgagaatggtgaagctgatgagtgtgatggaacgcctacaagtgtagctgaaagttctagttcggtatctgttggtgaagtagtttctcatggtaagaggatcaatgatattgcagaggacaacatgagagcacataacatattgtatgaagctgttggtgaaaatatttcaggtccttcattccatttgaatgaatattctagtggaaccatacaagctactggcaagccaaacgattgtcgacgtattgattcagctgtgcggaatttgttgctcaaaggattaggtcagccgtttagtgaggaagatattattggtatctatagaacaccactgctagatcagcgagggcaagttcgttgtggtctcttccagaaggagatcgaagagaccaggagtcgtcgggggaatgcaaatgtacgttatgcttggcttccttgctcaagatataccatggagcagatggcaatgcggggtgctctggaaatcgcgaagcctcataaggggtccatttgtggtgttgggacttgtcttgctcctgcaaactgtacaaattcatgtgccagatattctgattttcatgaagatggcatcatcagaatgatgttgtgccgtgtaataatgggtaatgttgaggttgttttgcctggatcaaagcaatttcagccatccaatggaagttttgataatggtgtggatgatcttcaaaatccacagaattacatcgtatgggatgctaatgtgcataaacacatatatgctgaatatgctgttattgtccaagcacctctcgtgaccaatgaatgttcgggcttgaaggatagcgtgcccaacatatctgagatcataagttctggttctcgagacaatctaaccaaggtatacttgttggggttcggcttgtgtgggtgcatatagctcaagttcagcatcctttatatggagcacagcagcacatgaggataggttcgcgccttgtggtgtcgaacaagaagcacctaggctggggcgtgctccaagggccccctcctcaccatggatgcccttttcgatgctttttgctgctatttccacgaaagtgcctcgttcggacatggagttggtcatcagatactatgaagaattcaagaggaagaggatgagccggagcgacctggtggtacggatgaggcaaatagtcggtgataagatattggtttctacaataatgaggcttcaccaccagaagaagcccccatcgatggcagcagcagcagctgggctagcaagagcactcgcaaggggggaagagggagggggagtagccgagtaagattagtttaagccgccttgtcttttgagaaatttatggagcacatatgctttgtcgacatggccagacccaaggtgtcaaaagggagggagatgagctgagcaactgttgtagtgtagtctcaaactcaaagcgtttaggtcttgacatttgacaaactaaaactcagaaacattatcatgagtagtgtttttttttcgtttctctttcctggatttaactattgttattgctatttcgtggatatctgggcactgaaggccgtgctattgttggttaatgatggtatgattaagggtgcgcttgccattttaaccctttgaccacatccaaacaatcacgg

SEQ ID NO: 47167 - DNA, 3735 bp, Zea Mays
cccctatcctctctcctcgcccaccggaaacgcaacgcaacgcaacgcaaccagagggggaggggggggggggggaaagccggagccgactgcccgcaccacccacaggaacgccgcggggcaggggggcaggaggaagacgccggcggcggcggcttaaaagggcagggcgccattacctgcttccctgtcttccccttcccctcatgtactatagtactgcgctgcgccctttcatttacccggagtagtaaacgagaagaggaataattgtgtcgcaaactaatccgtttcgccgctgcctgctgcttgagccaatcttccgcgggtcggggccgatgacctgccaactggtactgcttgccccctccccctttcctattgctacgatttagcttcatatatgtgattttgctgcaactattatgtacgtaagctatctcggaccgattgaattaagctatctcggaccgattgaattaagctatctcggaccgattgccccctccccctttcctattgctacgatttagcttcatatatgtgattttgctgcaactattatgtacgtaagctatctcggaccgattgaattaagctatctcggaccgattgaattaaggaattctgtccgtgccatatagacgatcttttagtgctcattacatgtattagactctgtttgaatgtactagagctaatagttagctactaaaattagcttaaagatatccaaataatctagctaatagttcagctattagctacttttagcaaattagctaatagttagttatctatttgttagccacctatttccactaataattttttagtcaactaactattagctttagtgcattcaaacacggccttattgtcgccttggtggagtttctattgggttgtcatatactagtcgcttcttgtttccgcatacataccctattttcacctgtcatgagtcgtcatgctttgcgtttggtgcctcatggtaggctcaacaacattctaggccgatttattttgatgtacaaacaaagcaaaaggaaagcgatttttgcccccagtgatgagttatgaacgattctagtgtacttgttatcgtcctaggcgtgactctagcagtgccgatttatcatacatcatctcgccaatattatgcaatagcgttccacgatactatatttgtcaagtgcacaactgatttgaaactggtctttaacaaaaagaagatcggacaggtgatctgtaactgagtgcagtatttcttttctatttactataagtaccagcgacactctggtcatcagcgttcaactgttaattagaaaactattttagtacatgttctagagaagtgtttgtaaagtttattgttaaatgctacaattctggcctaacgagcataacaagctttgcacgtcagggaccccagggtcgtcgtcatctatctatatttgaggtttttgcgtcaacatgacaaggtctgtttcacttgccattttggataggatcgctcgttttggaattaactttatgctaacagaatctaggtgtcattaagctagattaagcttgctgcttgacttagtagtgtaaatctgtaaagaaaattacctggtttgggtttagtctctataaaagaaatggaacagaggaatgttctggcattgggtgaacatgttctaaaagctactgtttggaagcggaagcataagactgctatggagcaccctgaaggcaatgatgtgatggtgttctctcagcatgatcaaagaaagcaccctgtgatatttgacgacagagctaaatgtaagaagtctaaattaatttcctgtgggagtggagttatattggagtcatattggaactttaagacaagtgggctgcctgtgcgcgtgcttttctaccaacatggtgactggagtgattttccagaggatgttgtaaatctagcacaacaggacttccagttgaagaagccaattacaactgctgtgttccagaacaagcacatcctgttggacttcattcacatgatttgcatagattatgagatgaccatagacaaaccactagcatgggttgatgataatggcaaacgcttctttccagatttatctgctgggctctacacatctaaaccatctcagcatgagaatggtgaagctgatgagtgtgatggaacgcctacaagtgtagctgaaagttctagttcggtatctgttggtgaagtagtttctcatggtaagaggatcaatgatattgcagaggacaacatgagagcacataacatattgtatgaagctgttggtgaaaatatttcaggtccttcattccatttgaatgaatattctagtggaaccatacaagctactggcaagccaaacgattgtcgacgtattgattcagctgtgcggaatttgttgctcaaaggattaggtcagccgtttagtgaggaagatattattggtatctatagaacaccactgctagatcagcgagggcaagttcgttgtggtctcttccagaaggagatcgaagagaccaggagtcgtcgggggaatgcaaatgtacgttatgcttggcttccttgctcaagatataccatggagcagatggcaatgcggggtgctctggaaatcgcgaagcctcataaggggtccatttgtggtgttgggacttgtcttgctcctgcaaactgtacaaattcatgtgccagatattctgattttcatgaagatggcatcatcagaatgatgttgtgccgtgtaataatgggtaatgttgaggttgttttgcctggatcaaagcaatttcagccatccaatggaagttttgataatggtgtggatgatcttcaaaatccacagaattacatcgtatgggatgctaatgtgcataaacacatatatgctgaatatgctgttattgtccaagcacctctcgtgaccaatgaatgttcgggcttgaaggatagcgtgcccaacatatctgagatcataagttctggttctcgagacaatctaaccaaggaggataggttcgcgccttgtggtgtcgaacaagaagcacctaggctggggcgtgctccaagggccccctcctcaccatggatgcccttttcgatgctttttgctgctatttccacgaaagtgcctcgttcggacatggagttggtcatcagatactatgaagaattcaagaggaagaggatgagccggagcgacctggtggtacggatgaggcaaatagtcggtgataagatattggtttctacaataatgaggcttcaccaccagaagaagcccccatcgatggcagcagcagcagctgggctagcaagagcactcgcaaggggggaagagggagggggagtagccgagtaagattagtttaagccgccttgtcttttgagaaatttatggagcacatatgctttgtcgacatggccagacccaaggtgtcaaaagggagggagatgagctgagcaactgttgtagtgtagtctcaaactcaaagcgtttaggtcttgacatttgacaaactaaaactcagaaacattatcatgagtagtgtttttttttcgtttctctttcctggatttaactattgttattgctatttcgtggatatctgggcactgaaggccgtgctattgttggttaatgatggtatgattaagggtgcgcttgccattttaaccctttgaccacatccaaacaatcacgg

SEQ ID NO: 47168 - DNA, 3804 bp, Zea Mays
cccctatcctctctcctcgcccaccggaaacgcaacgcaacgcaacgcaaccagagggggaggggggggggggggaaagccggagccgactgcccgcaccacccacaggaacgccgcggggcaggggggcaggaggaagacgccggcggcggcggcttaaaagggcagggcgccattacctgcttccctgtcttccccttcccctcatgtactatagtactgcgctgcgccctttcatttacccggagtagtaaacgagaagaggaataattgtgtcgcaaactaatccgtttcgccgctgcctgctgcttgagccaatcttccgcgggtcggggccgatgacctgccaactggtactgcttgccccctccccctttcctattgctacgatttagcttcatatatgtgattttgctgcaactattatgtacgtaagctatctcggaccgattgaattaagctatctcggaccgattgaattaagctatctcggaccgattgccccctccccctttcctattgctacgatttagcttcatatatgtgattttgctgcaactattatgtacgtaagctatctcggaccgattgaattaagctatctcggaccgattgaattaaggaattctgtccgtgccatatagacgatcttttatgcattcaaacacggccttattgtcgccttggtggagtttctattgggttgtcatatactagtcgcttcttgtttccgcatacataccctattttcacctgtcatgagtcgtcatgctttgcgtttggtgcctcatggtaggctcaacaacattctaggccgatttattttgatgtacaaacaaagcaaaaggaaagcgatttttgcccccagtgatgagttatgaacgattctagtgtacttgttatcgtcctaggcgtgactctagcagtgccgatttatcatacatcatctcgccaatattatgcaatagcgttccacgatactatatttgtcaagtgcacaactgatttgaaactggtctttaacaaaaagaagatcggacaggtgatctgtaactgagtgcagtatttcttttctatttactataagtaccagcgacactctggtcatcagcgttcaactgttaattagaaaactattttagtacatgttctagagaagtgtttgtaaagtttattgttaaatgctacaattctggcctaacgagcataacaagctttgcacgtcagggaccccagggtcgtcgtcatctatctatatttgaggtttttgcgtcaacatgacaaggtgcttttactctcaccaaaccgttactggggttgtccctgtgtctgtcatttctttgtcctaggcaatggccacagagaagagccaaagacatgatgggtattttttacaacacggacgtgctggtaatgtctgtggcggaggcagggttggcttctgtctgttatggtgttctgctgcctccccgtgtggctgtggcagccatcagctctaccaggagcagctgtatccagagatggtgtgaagcacacacaattctactctgcgcagggtctgtttcacttgccattttggataggatcgctcgttttggaattaactttatgctaacagaatctaggtgtcattaagctagattaagcttgctgcttgacttagtagtgtaaatctgtaaagaaaattacctggtttgggtttagtctctataaaagaaatggaacagaggaatgttctggcattgggtgaacatgttctaaaagctactgtttggaagcggaagcataagactgctatggagcaccctgaaggcaatgatgtgatggtgttctctcagcatgatcaaagaaagcaccctgtgatatttgacgacagagctaaatgtaagaagtctaaattaatttcctgtgggagtggagttatattggagtcatattggaactttaagacaagtgggctgcctgtgcgcgtgcttttctaccaacatggtgactggagtgattttccagaggatgttgtaaatctagcacaacaggacttccagttgaagaagccaattacaactgctgtgttccagaacaagcacatcctgttggacttcattcacatgatttgcatagattatgagatgaccatagacaaaccactagcatgggttgatgataatggcaaacgcttctttccagatttatctgctgggctctacacatctaaaccatctcagcatgagaatggtgaagctgatgagtgtgatggaacgcctacaagtgtagctgaaagttctagttcggtatctgttggtgaagtagtttctcatggtaagaggatcaatgatattgcagaggacaacatgagagcacataacatattgtatgaagctgttggtgaaaatatttcaggtccttcattccatttgaatgaatattctagtggaaccatacaagctactggcaagccaaacgattgtcgacgtattgattcagctgtgcggaatttgttgctcaaaggattaggtcagccgtttagtgaggaagatattattggtatctatagaacaccactgctagatcagcgagggcaagttcgttgtggtctcttccagaaggagatcgaagagaccaggagtcgtcgggggaatgcaaatgtacgttatgcttggcttccttgctcaagatataccatggagcagatggcaatgcggggtgctctggaaatcgcgaagcctcataaggggtccatttgtggtgttgggacttgtcttgctcctgcaaactgtacaaattcatgtgccagatattctgattttcatgaagatggcatcatcagaatgatgttgtgccgtgtaataatgggtaatgttgaggttgttttgcctggatcaaagcaatttcagccatccaatggaagttttgataatggtgtggatgatcttcaaaatccacagaattacatcgtatgggatgctaatgtgcataaacacatatatgctgaatatgctgttattgtccaagcacctctcgtgaccaatgaatgttcgggcttgaaggatagcgtgcccaacatatctgagatcataagttctggttctcgagacaatctaaccaaggaggataggttcgcgccttgtggtgtcgaacaagaagcacctaggctggggcgtgctccaagggccccctcctcaccatggatgcccttttcgatgctttttgctgctatttccacgaaagtgcctcgttcggacatggagttggtcatcagatactatgaagaattcaagaggaagaggatgagccggagcgacctggtggtacggatgaggcaaatagtcggtgataagatattggtttctacaataatgaggcttcaccaccagaagaagcccccatcgatggcagcagcagcagctgggctagcaagagcactcgcaaggggggaagagggagggggagtagccgagtaagattagtttaagccgccttgtcttttgagaaatttatggagcacatatgctttgtcgacatggccagacccaaggtgtcaaaagggagggagatgagctgagcaactgttgtagtgtagtctcaaactcaaagcgtttaggtcttgacatttgacaaactaaaactcagaaacattatcatgagtagtgtttttttttcgtttctctttcctggatttaactattgttattgctatttcgtggatatctgggcactgaaggccgtgctattgttggttaatgatggtatgattaagggtgcgcttgccattttaaccctttgaccacatccaaacaatcacgg

SEQ ID NO: 47169 - DNA, 2716 bp, Zea Mays
cccctatcctctctcctcgcccaccggaaacgcaacgcaacgcaacgcaaccagagggggaggggggggggggggaaagccggagccgactgcccgcaccacccacaggaacgccgcggggcaggggggcaggaggaagacgccggcggcggcggcttaaaagggcagggcgccattacctgcttccctgtcttccccttcccctcatgtactatagtactgcgctgcgccctttcatttacccggagtagtaaacgagaagaggaataattgtgtcgcaaactaatccgtttcgccgctgcctgctgcttgagccaatcttccgcgggtcggggccgatgacctgccaactggcaatggccacagagaagagccaaagacatgatgggtattttttacaacacggacgtgctggtaatgtctgtggcggaggcagggttggcttctgtctgttatggtgttctgctgcctccccgtgtggctgtggcagccatcagctctaccaggagcagctgtatccagagatggtgtgaagcacacacaattctactctgcgcagggtctgtttcacttgccattttggataggatcgctcgttttggaattaactttatgctaacagaatctaggtgtcattaagctagattaagcttgctgcttgacttagtagtgtaaatctgtaaagaaaattacctggtttgggtttagtctctataaaagaaatggaacagaggaatgttctggcattgggtgaacatgttctaaaagctactgtttggaagcggaagcataagactgctatggagcaccctgaaggcaatgatgtgatggtgttctctcagcatgatcaaagaaagcaccctgtgatatttgacgacagagctaaatgtaagaagtctaaattaatttcctgtgggagtggagttatattggagtcatattggaactttaagacaagtgggctgcctgtgcgcgtgcttttctaccaacatggtgactggagtgattttccagaggatgttgtaaatctagcacaacaggacttccagttgaagaagccaattacaactgctgtgttccagaacaagcacatcctgttggacttcattcacatgatttgcatagattatgagatgaccatagacaaaccactagcatgggttgatgataatggcaaacgcttctttccagatttatctgctgggctctacacatctaaaccatctcagcatgagaatggtgaagctgatgagtgtgatggaacgcctacaagtgtagctgaaagttctagttcggtatctgttggtgaagtagtttctcatggtaagaggatcaatgatattgcagaggacaacatgagagcacataacatattgtatgaagctgttggtgaaaatatttcaggtccttcattccatttgaatgaatattctagtggaaccatacaagctactggcaagccaaacgattgtcgacgtattgattcagctgtgcggaatttgttgctcaaaggattaggtcagccgtttagtgaggaagatattattggtatctatagaacaccactgctagatcagcgagggcaagttcgttgtggtctcttccagaaggagatcgaagagaccaggagtcgtcgggggaatgcaaatgtacgttatgcttggcttccttgctcaagatataccatggagcagatggcaatgcggggtgctctggaaatcgcgaagcctcataaggggtccatttgtggtgttgggacttgtcttgctcctgcaaactgtacaaattcatgtgccagatattctgattttcatgaagatggcatcatcagaatgatgttgtgccgtgtaataatggaattacatcgtatgggatgctaatgtgcataaacacatatatgctgaatatgctgttattgtccaagcacctctcgtgaccaatgaatgttcgggcttgaaggatagcgtgcccaacatatctgagatcataagttctggttctcgagacaatctaaccaaggaggataggttcgcgccttgtggtgtcgaacaagaagcacctaggctggggcgtgctccaagggccccctcctcaccatggatgcccttttcgatgctttttgctgctatttccacgaaagtgcctcgttcggacatggagttggtcatcagatactatgaagaattcaagaggaagaggatgagccggagcgacctggtggtacggatgaggcaaatagtcggtgataagatattggtttctacaataatgaggcttcaccaccagaagaagcccccatcgatggcagcagcagcagctgggctagcaagagcactcgcaaggggggaagagggagggggagtagccgagtaagattagtttaagccgccttgtcttttgagaaatttatggagcacatatgctttgtcgacatggccagacccaaggtgtcaaaagggagggagatgagctgagcaactgttgtagtgtagtctcaaactcaaagcgtttaggtcttgacatttgacaaactaaaactcagaaacattatcatgagtagtgtttttttttcgtttctctttcctggatttaactattgttattgctatttcgtggatatctgggcactgaaggccgtgctattgttggttaatgatggtatgattaagggtgcgcttgccattttaaccctttgaccacatccaaacaatcacgg

SEQ ID NO: 47170 - DNA, 3936 bp, Zea Mays
cccctatcctctctcctcgcccaccggaaacgcaacgcaacgcaacgcaaccagagggggaggggggggggggggaaagccggagccgactgcccgcaccacccacaggaacgccgcggggcaggggggcaggaggaagacgccggcggcggcggcttaaaagggcagggcgccattacctgcttccctgtcttccccttcccctcatgtactatagtactgcgctgcgccctttcatttacccggagtagtaaacgagaagaggaataattgtgtcgcaaactaatccgtttcgccgctgcctgctgcttgagccaatcttccgcgggtcggggccgatgacctgccaactggtactgcttgccccctccccctttcctattgctacgatttagcttcatatatgtgattttgctgcaactattatgtacgtaagctatctcggaccgattgaattaagctatctcggaccgattgaattaagctatctcggaccgattgccccctccccctttcctattgctacgatttagcttcatatatgtgattttgctgcaactattatgtacgtaagctatctcggaccgattgaattaagctatctcggaccgattgaattaaggaattctgtccgtgccatatagacgatcttttagtgctcattacatgtattagactctgtttgaatgtactagagctaatagttagctactaaaattagcttaaagatatccaaataatctagctaatagttcagctattagctacttttagcaaattagctaatagttagttatctatttgttagccacctatttccactaataattttttagtcaactaactattagctttagtgcattcaaacacggccttattgtcgccttggtggagtttctattgggttgtcatatactagtcgcttcttgtttccgcatacataccctattttcacctgtcatgagtcgtcatgctttgcgtttggtgcctcatggtaggctcaacaacattctaggccgatttattttgatgtacaaacaaagcaaaaggaaagcgatttttgcccccagtgatgagttatgaacgattctagtgtacttgttatcgtcctaggcgtgactctagcagtgccgatttatcatacatcatctcgccaatattatgcaatagcgttccacgatactatatttgtcaagtgcacaactgatttgaaactggtctttaacaaaaagaagatcggacaggtgatctgtaactgagtgcagtatttcttttctatttactataagtaccagcgacactctggtcatcagcgttcaactgttaattagaaaactattttagtacatgttctagagaagtgtttgtaaagtttattgttaaatgctacaattctggcctaacgagcataacaagctttgcacgtcagggaccccagggtcgtcgtcatctatctatatttgaggtttttgcgtcaacatgacaaggtgcttttactctcaccaaaccgttactggggttgtccctgtgtctgtcatttctttgtcctaggcaatggccacagagaagagccaaagacatgatgggtattttttacaacacggacgtgctggtaatgtctgtggcggaggcagggttggcttctgtctgttatggtgttctgctgcctccccgtgtggctgtggcagccatcagctctaccaggagcagctgtatccagagatggtgtgaagcacacacaattctactctgcgcagggtctgtttcacttgccattttggataggatcgctcgttttggaattaactttatgctaacagaatctaggtgtcattaagctagattaagcttgctgcttgacttagtagtgtaaatctgtaaagaaaattacctggtttgggtttagtctctataaaagaaatggaacagaggaatgttctggcattgggtgaacatgttctaaaagctactgtttggaagcggaagcataagactgctatggagcaccctgaaggcaatgatgtgatggtgttctctcagcatgatcaaagaaagcaccctgtgatatttgacgacagagctaaattgggctgcctgtgcgcgtgcttttctaccaacatggtgactggagtgattttccagaggatgttgtaaatctagcacaacaggacttccagttgaagaagccaattacaactgctgtgttccagaacaagcacatcctgttggacttcattcacatgatttgcatagattatgagatgaccatagacaaaccactagcatgggttgatgataatggcaaacgcttctttccagatttatctgctgggctctacacatctaaaccatctcagcatgagaatggtgaagctgatgagtgtgatggaacgcctacaagtgtagctgaaagttctagttcggtatctgttggtgaagtagtttctcatggtaagaggatcaatgatattgcagaggacaacatgagagcacataacatattgtatgaagctgttggtgaaaatatttcaggtccttcattccatttgaatgaatattctagtggaaccatacaagctactggcaagccaaacgattgtcgacgtattgattcagctgtgcggaatttgttgctcaaaggattaggtcagccgtttagtgaggaagatattattggtatctatagaacaccactgctagatcagcgagggcaagttcgttgtggtctcttccagaaggagatcgaagagaccaggagtcgtcgggggaatgcaaatgtacgttatgcttggcttccttgctcaagatataccatggagcagatggcaatgcggggtgctctggaaatcgcgaagcctcataaggggtccatttgtggtgttgggacttgtcttgctcctgcaaactgtacaaattcatgtgccagatattctgattttcatgaagatggcatcatcagaatgatgttgtgccgtgtaataatgggtaatgttgaggttgttttgcctggatcaaagcaatttcagccatccaatggaagttttgataatggtgtggatgatcttcaaaatccacagaattacatcgtatgggatgctaatgtgcataaacacatatatgctgaatatgctgttattgtccaagcacctctcgtgaccaatgaatgttcgggcttgaaggatagcgtgcccaacatatctgagatcataagttctggttctcgagacaatctaaccaaggaggataggttcgcgccttgtggtgtcgaacaagaagcacctaggctggggcgtgctccaagggccccctcctcaccatggatgcccttttcgatgctttttgctgctatttccacgaaagtgcctcgttcggacatggagttggtcatcagatactatgaagaattcaagaggaagaggatgagccggagcgacctggtggtacggatgaggcaaatagtcggtgataagatattggtttctacaataatgaggcttcaccaccagaagaagcccccatcgatggcagcagcagcagctgggctagcaagagcactcgcaaggggggaagagggagggggagtagccgagtaagattagtttaagccgccttgtcttttgagaaatttatggagcacatatgctttgtcgacatggccagacccaaggtgtcaaaagggagggagatgagctgagcaactgttgtagtgtagtctcaaactcaaagcgtttaggtcttgacatttgacaaactaaaactcagaaacattatcatgagtagtgtttttttttcgtttctctttcctggatttaactattgttattgctatttcgtggatatctgggcactgaaggccgtgctattgttggttaatgatggtatgattaagggtgcgcttgccattttaaccctttgaccacatccaaacaatcacgg

SEQ ID NO: 47171 - DNA, 2930 bp, Zea Mays
cccctatcctctctcctcgcccaccggaaacgcaacgcaacgcaacgcaaccagagggggaggggggggggggggaaagccggagccgactgcccgcaccacccacaggaacgccgcggggcaggggggcaggaggaagacgccggcggcggcggcttaaaagggcagggcgccattacctgcttccctgtcttccccttcccctcatgtactatagtactgcgctgcgccctttcatttacccggagtagtaaacgagaagaggaataattgtgtcgcaaactaatccgtttcgccgctgcctgctgcttgagccaatcttccgcgggtcggggccgatgacctgccaactgggaccccagggtcgtcgtcatctatctatatttgaggtttttgcgtcaacatgacaaggtgcttttactctcaccaaaccgttactggggttgtccctgtgtctgtcatttctttgtcctaggcaatggccacagagaagagccaaagacatgatgggtattttttacaacacggacgtgctggtaatgtctgtggcggaggcagggttggcttctgtctgttatggtgttctgctgcctccccgtgtggctgtggcagccatcagctctaccaggagcagctgtatccagagatggtgtgaagcacacacaattctactctgcgcagggtctgtttcacttgccattttggataggatcgctcgttttggaattaactttatgctaacagaatctaggtgtcattaagctagattaagcttgctgcttgacttagtagtgtaaatctgtaaagaaaattacctggtttgggtttagtctctataaaagaaatggaacagaggaatgttctggcattgggtgaacatgttctaaaagctactgtttggaagcggaagcataagactgctatggagcaccctgaaggcaatgatgtgatggtgttctctcagcatgatcaaagaaagcaccctgtgatatttgacgacagagctaaatgtaagaagtctaaattaatttcctgtgggagtggagttatattggagtcatattggaactttaagacaagtgggctgcctgtgcgcgtgcttttctaccaacatggtgactggagtgattttccagaggatgttgtaaatctagcacaacaggacttccagttgaagaagccaattacaactgctgtgttccagaacaagcacatcctgttggacttcattcacatgatttgcatagattatgagatgaccatagacaaaccactagcatgggttgatgataatggcaaacgcttctttccagatttatctgctgggctctacacatctaaaccatctcagcatgagaatggtgaagctgatgagtgtgatggaacgcctacaagtgtagctgaaagttctagttcggtatctgttggtgaagtagtttctcatggtaagaggatcaatgatattgcagaggacaacatgagagcacataacatattgtatgaagctgttggtgaaaatatttcaggtccttcattccatttgaatgaatattctagtggaaccatacaagctactggcaagccaaacgattgtcgacgtattgattcagctgtgcggaatttgttgctcaaaggattaggtcagccgtttagtgaggaagatattattggtatctatagaacaccactgctagatcagcgagggcaagttcgttgtggtctcttccagaaggagatcgaagagaccaggagtcgtcgggggaatgcaaatgtacgttatgcttggcttccttgctcaagatataccatggagcagatggcaatgcggggtgctctggaaatcgcgaagcctcataaggggtccatttgtggtgttgggacttgtcttgctcctgcaaactgtacaaattcatgtgccagatattctgattttcatgaagatggcatcatcagaatgatgttgtgccgtgtaataatgggtaatgttgaggttgttttgcctggatcaaagcaatttcagccatccaatggaagttttgataatggtgtggatgatcttcaaaatccacagaattacatcgtatgggatgctaatgtgcataaacacatatatgctgaatatgctgttattgtccaagcacctctcgtgaccaatgaatgttcgggcttgaaggatagcgtgcccaacatatctgagatcataagttctggttctcgagacaatctaaccaaggaggataggttcgcgccttgtggtgtcgaacaagaagcacctaggctggggcgtgctccaagggccccctcctcaccatggatgcccttttcgatgctttttgctgctatttccacgaaagtgcctcgttcggacatggagttggtcatcagatactatgaagaattcaagaggaagaggatgagccggagcgacctggtggtacggatgaggcaaatagtcggtgataagatattggtttctacaataatgaggcttcaccaccagaagaagcccccatcgatggcagcagcagcagctgggctagcaagagcactcgcaaggggggaagagggagggggagtagccgagtaagattagtttaagccgccttgtcttttgagaaatttatggagcacatatgctttgtcgacatggccagacccaaggtgtcaaaagggagggagatgagctgagcaactgttgtagtgtagtctcaaactcaaagcgtttaggtcttgacatttgacaaactaaaactcagaaacattatcatgagtagtgtttttttttcgtttctctttcctggatttaactattgttattgctatttcgtggatatctgggcactgaaggccgtgctattgttggttaatgatggtatgattaagggtgcgcttgccattttaaccctttgaccacatccaaacaatcacgg

SEQ ID NO: 47172 - DNA, 2270 bp, Zea Mays
gtgattttgctgcaactattatgtctgtttcacttgccattttggataggatcgctcgttttggaattaactttatgctaacagaatctaggtgtcattaagctagattaagcttgctgcttgacttagtagtgtaaatctgtaaagaaaattacctggtttgggtttagtctctataaaagaaatggaacagaggaatgttctggcattgggtgaacatgttctaaaagctactgtttggaagcggaagcataagactgctatggagcaccctgaaggcaatgatgtgatggtgttctctcagcatgatcaaagaaagcaccctgtgatatttgacgacagagctaaatgtaagaagtctaaattaatttcctgtgggagtggagttatattggagtcatattggaactttaagacaagtgggctgcctgtgcgcgtgcttttctaccaacatggtgactggagtgattttccagaggatgttgtaaatctagcacaacaggacttccagttgaagaagccaattacaactgctgtgttccagaacaagcacatcctgttggacttcattcacatgatttgcatagattatgagatgaccatagacaaaccactagcatgggttgatgataatggcaaacgcttctttccagatttatctgctgggctctacacatctaaaccatctcagcatgagaatggtgaagctgatgagtgtgatggaacgcctacaagtgtagctgaaagttctagttcggtatctgttggtgaagtagtttctcatggtaagaggatcaatgatattgcagaggacaacatgagagcacataacatattgtatgaagctgttggtgaaaatatttcaggtccttcattccatttgaatgaatattctagtggaaccatacaagctactggcaagccaaacgattgtcgacgtattgattcagctgtgcggaatttgttgctcaaaggattaggtcagccgtttagtgaggaagatattattggtatctatagaacaccactgctagatcagcgagggcaagttcgttgtggtctcttccagaaggagatcgaagagaccaggagtcgtcgggggaatgcaaatgtacgttatgcttggcttccttgctcaagatataccatggagcagatggcaatgcggggtgctctggaaatcgcgaagcctcataaggggtccatttgtggtgttgggacttgtcttgctcctgcaaactgtacaaattcatgtgccagatattctgattttcatgaagatggcatcatcagaatgatgttgtgccgtgtaataatgggtaatgttgaggttgttttgcctggatcaaagcaatttcagccatccaatggaagttttgataatggtgtggatgatcttcaaaatccacagaattacatcgtatgggatgctaatgtgcataaacacatatatgctgaatatgctgttattgtccaagcacctctcgtgaccaatgaatgttcgggcttgaaggatagcgtgcccaacatatctgagatcataagttctggttctcgagacaatctaaccaaggaggataggttcgcgccttgtggtgtcgaacaagaagcacctaggctggggcgtgctccaagggccccctcctcaccatggatgcccttttcgatgctttttgctgctatttccacgaaagtgcctcgttcggacatggagttggtcatcagatactatgaagaattcaagaggaagaggatgagccggagcgacctggtggtacggatgaggcaaatagtcggtgataagatattggtttctacaataatgaggcttcaccaccagaagaagcccccatcgatggcagcagcagcagctgggctagcaagagcactcgcaaggggggaagagggagggggagtagccgagtaagattagtttaagccgccttgtcttttgagaaatttatggagcacatatgctttgtcgacatggccagacccaaggtgtcaaaagggagggagatgagctgagcaactgttgtagtgtagtctcaaactcaaagcgtttaggtcttgacatttgacaaactaaaactcagaaacattatcatgagtagtgtttttttttcgtttctctttcctggatttaactattgttattgctatttcgtggatatctgggcactgaaggccgtgctattgttggttaatgatggtatgattaagggtgcgcttgccattttaaccctttgaccacatccaaacaatcacgg

SEQ ID NO: 47173 - DNA, 3805 bp, Zea Mays
ctgtatctatgatttgtgggtctgagtttaaaatagagaagttcacaactgagagtgacaaaatagcaaattttcctttaaaatgaccgcgcgttttttttaaaaaatgaccgcgcagtagctttggctgaaaaagaaaagaaaaataatcttccttcttccacgatagtcgatacggagcacccataacgttacttttattttgcagttcagcggttcagccccctcaagtcgaggtcgaggtactccgcctccgcaatgccgcccccttccgcctccgcctccccctccgcctcccgcttcgcgaagcactggatagctgacgtcctcgccggcgaagaatccgtcgacttctccctgctcaaggttctggtgggggcctcgtcgaagcccctcgcgggcgccccggaggccacgcgtgagcgggtcgcgctccggtccattcaggaggtgttgtccgtgatagccgctgggggtgatgccgcggccacggcgggggtgcttagtgttgatggcgcccggtcatgcgaggatgggctgtttcggcttatcagagaggttggaagtttcggagaattggagaaggatttgcttccacctttcagtcaagacatccaggaaaatatatgtaccaagaagtttacattaccaggaatttctttccagttggtaagttaaaagaaaatctcaatattataagtagaacaatggcaaattgaatttgtaattttctcttcagctagaaagagttgagccatggatagcatctatggccccacaaccccaaatggaacacaatggcactgaacaatgtgtcaatgatcagtcactgcgcagcagccacggatgtgtaaatatagagaagcctgtgttccatacagacaatgctggggttcagcaagagaccatggcagatgtagtcaatgaaagtgaaacaggaaatctccaaaaggatccacctgcaccaacttttatttttcaccaaccgtgtatgcctgaaagcaggtcttacgtccctccgcaagaagatactatagatgctgttggtctaggcgctaggtcctcagaaaggagtcctattgtggaggggaacatgtccgttggatctgtgcttgcttcagatggctgtgatgtacctttgcagggaagcattactgagccctttttccagcaggataaacatgaccatactgttatagttggaccaaaatcttgtaagcgaaaatctccaattccatcttactgtgctcatggagatggggcagatggtggtggctccagcaatcagtcatctaaggtttccattcgtgaaggacctagcactcatgccacagtaacttcaggttttgacagaatcagcgatgtcttaccaacagatgcacctgaatctgagcatttgcctgagtgcataactgcacaggatacaaccatttcacagcctgacagcaggaaagctcatttgagtgctctgcaacaggaaaggggtgagaaagtaacccaagatctggaagatatctctgcaaatattgggtcagtggaaaaggaccatattcatggggatctgactttgccatctgccagtgttttactttctataagctgcaatggtgctaatcaaggaagtaaatatgaaaccaaccttcaaccagggactgctacagaggatatgatggctttcgaagagcagaatgcagacaagtctcacttagaagtcagtggtatcaacaaggctaatcaagctctgcatgatgatggcggcgtcatgaaaaataatacagtacatggtgggttgattgtgcagactgctccagtgtctcaaaattgcaatgtaaccttacatgataaaacttcagagcaggaaaatgaaaagaacattcaaaaagataattgccatacttatgttccaggctcttctcaggataggggtggagaaagtgcaaagaaaacaacaaatgaactaaagtctggggacatttcttcaaaaatatgtgttcatttcaatgttcaagacatcaatgatactctggaggacttgtctcaacaaggtttgtgcataaaatgtggtgaaggtggtcagttgttggaatgcaatggctgttttttagccgcccatagcagctgttttggttcatcggcgacatttgaaggaaccaattttttctactgcccggtatgcttgtataagaaagccactgaagcatataaaaaggcaaagaaaacatattgtgaaactaggaagaaccttgttgctttccttggcacagcacaagccaccaatcaacctgacaaacaactaaatggagctcagccaggagctgccaacagagatgaagagcctcatgatgagcaacattctaaagggtgtggcgcatcaaaaggggcccatgaaaatgaagtatacaatcttgctcatcaggatgaagagcatcatcagcagaggaagaagcagaaaataaatgctataggtaagagttatcctaaggaggtactcactgagaaggttattttccagaactctgatcctgcatccattaataaacattcagtgctccagaataacaataaaacaccagttaaggatccagagaaaaagcagcaagcggtcaacgaagaagctcgcaaagaaggtggtaatgacaactcatctcatgaaacaggagcttcatctccgagaagatgtgatcctccttcgaatcaggacgttgaggctgaccaggacgatagccttacaacttctaatcaatctggtggttctgatgaaatagaagctacatcttctaatgactctgccaagcaatcatcacccccttggcgtggtatgggacacaacaaaaaaggattgcacgaaaaggagccagctgtatcaagtaaatctggaaaagttccaatcctgttgcgccacctggaagacgcaaacaactctgttggacagaaaaagaagtagctattttgagggtaatcattctttggatgtaaattttcattgttgaaacactgtctctagcgctggcttttcccaggccaggtttgtagtgtgtaattatgtctcgcctggccatgagtattatacttttttactgtgatgatccaggatgggatggcaaaattctctccacataataatggtaaaataccatggacccagatactgcaatatggccgtcgtgtgtttcacaagacgcgcctgccatgtgatttgagggtcaagtggaggaacatggagaggaagaagtgggcaggctactgatgctgatctgatgccgtcgacatggaacactgatgtggtactagaacatagcggaacactgatatggtactaatagcgaatggaggagggtttcttctaaaatagtattttgatgcacagggtgggcatccttttgtgactggttgtgtcaacctagacctactatgcccgtgagagagattgctaaagagtcaactttcttttggaactgaaccctgcactctagatgatgataacatccggtagctgtgtttcttaaggcaactgtgtgtgtttcatccggcagctgccagtgcctcgcccaatgttctcgaatgaggtaggcgtcgtatgctctaaacacatcacgaataatttcttccagcgtgttttcttcttcttcatctttttagtgaacgcaaccttgtaagtcacgttgcagaagctataaaaacagttagtgaaacctttaaccgtagaaatgaaataccctataagcattgcacgctctattttatttccttcatcggtgatgctacataaacattcaatcgccacttttaatcaatgcaagtttct

SEQ ID NO: 47174 - DNA, 3508 bp, Zea Mays
ctgtatctatgatttgtgggtctgagtttaaaatagagaagttcacaactgagagtgacaaaatagcaaattttcctttaaaatgaccgcgcgttttttttaaaaaatgaccgcgcagtagctttggctgaaaaagaaaagaaaaataatcttccttcttccacgatagtcgatacggagcacccataacgttacttttattttgcagttcagcggttcagccccctcaagtcgaggtcgaggtactccgcctccgcaatgccgcccccttccgcctccgcctccccctccgcctcccgcttcgcgaagcactggatagctgacgtcctcgccggcgaagaatccgtcgacttctccctgctcaaggttctggtgggggcctcgtcgaagcccctcgcgggcgccccggaggccacgcgtgagcgggtcgcgctccggtccattcaggaggtgttgtccgtgatagccgctgggggtgatgccgcggccacggcgggggtgcttagtgttgatggcgcccggtcatgcgaggatgggctgtttcggcttatcagagaggttggaagtttcggagaattggagaaggatttgcttccacctttcagtcaagacatccaggaaaatatatgtaccaagaagtttacattaccaggaatttctttccagttggtaagttaaaagaaaatctcaatattataagtagaacaatggcaaattgaatttgtaattttctcttcagctagaaagagttgagccatggatagcatctatggccccacaaccccaaatggaacacaatggcactgaacaatgtgtcaatgatcagtcactgcgcagcagccacggatgtgtaaatatagagaagcctgtgttccatacagacaatgctggggttcagcaagagaccatggcagatgtagtcaatgaaagtgaaacaggaaatctccaaaaggatccacctgcaccaacttttatttttcaccaaccgtgtatgcctgaaagcaggtcttacgtccctccgcaagaagatactatagatgctgttggtctaggcgctaggtcctcagaaaggagtcctattgtggaggggaacatgtccgttggatctgtgcttgcttcagatggctgtgatgtacctttgcagggaagcattactgagccctttttccagcaggataaacatgaccatactgttatagttggaccaaaatcttgtaagcgaaaatctccaattccatcttactgtgctcatggagatggggcagatggtggtggctccagcaatcagtcatctaaggtttccattcgtgaaggacctagcactcatgccacagtaacttcaggttttgacagaatcagcgatgtcttaccaacagatgcacctgaatctgagcatttgcctgagtgcataactgcacaggatacaaccatttcacagcctgacagcaggaaagctcatttgagtgctctgcaacaggaaaggggtgagaaagtaacccaagatctggaagatatctctgcaaatattgggtcagtggaaaaggaccatattcatggggatctgactttgccatctgccagtgttttactttctataagctgcaatggtgctaatcaaggaagtaaatatgaaaccaaccttcaaccagggactgctacagaggatatgatggctttcgaagagcagaatgcagacaagtctcacttagaagtcagtggtatcaacaaggctaatcaagctctgcatgatgatggcggcgtcatgaaaaataatacagtacatggtgggttgattgtgcagactgctccagtgtctcaaaattgcaatgtaaccttacatgataaaacttcagagcaggaaaatgaaaagaacattcaaaaagataattgccatacttatgttccaggctcttctcaggataggggtggagaaagtgcaaagaaaacaacaaatgaactaaagtctggggacatttcttcaaaaatatgtgttcatttcaatgttcaagacatcaatgatactctggaggacttgtctcaacaaggtttgtgcataaaatgtggtgaaggtggtcagttgttggaatgcaatggctgttttttagccgcccatagcagctgttttggttcatcggcgacatttgaaggaaccaattttttctactgcccggtatgcttgtataagaaagccactgaagcatataaaaaggcaaagaaaacatattgtgaaactaggaagaaccttgttgctttccttggcacagcacaagccaccaatcaacctgacaaacaactaaatggagctcagccaggagctgccaacagagatgaagagcctcatgatgagcaacattctaaagggtgtggcgcatcaaaaggggcccatgaaaatgaagtatacaatcttgctcatcaggatgaagagcatcatcagcagaggaagaagcagaaaataaatgctataggtaagagttatcctaaggaggtactcactgagaaggttattttccagaactctgatcctgcatccattaataaacattcagtgctccagaataacaataaaacaccagttaaggatccagagaaaaagcagcaagcggtcaacgaagaagctcgcaaagaaggtggtaatgacaactcatctcatgaaacaggagcttcatctccgagaagatgtgatcctccttcgaatcaggacgttgaggctgaccaggacgatagccttacaacttctaatcaatctggtggttctgatgaaatagaagctacatcttctaatgactctgccaagcaatcatcacccccttggcgtggtatgggacacaacaaaaaaggattgcacgaaaaggagccagctgtatcaagtaaatctggaaaagttccaatcctgttgcgccacctggaagacgcaaacaactctgttggacagaaaaagaagtagctattttgaggatctgatgccgtcgacatggaacactgatgtggtactagaacatagcggaacactgatatggtactaatagcgaatggaggagggtttcttctaaaatagtattttgatgcacagggtgggcatccttttgtgactggttgtgtcaacctagacctactatgcccgtgagagagattgctaaagagtcaactttcttttggaactgaaccctgcactctagatgatgataacatccggtagctgtgtttcttaaggcaactgtgtgtgtttcatccggcagctgccagtgcctcgcccaatgttctcgaatgaggtaggcgtcgtatgctctaaacacatcacgaataatttcttccagcgtgttttcttcttcttcatctttttagtgaacgcaaccttgtaagtcacgttgcagaagctataaaaacagttagtgaaacctttaaccgtagaaatgaaataccctataagcattgcacgctctattttatttccttcatcggtgatgctacataaacattcaatcgccacttttaatcaatgcaagtttct

SEQ ID NO: 47175 - DNA, 3569 bp, Zea Mays
ctgtatctatgatttgtgggtctgagtttaaaatagagaagttcacaactgagagtgacaaaatagcaaattttcctttaaaatgaccgcgcgttttttttaaaaaatgaccgcgcagtagctttggctgaaaaagaaaagaaaaataatcttccttcttccacgatagtcgatacggagcacccataacgttacttttattttgcagttcagcggttcagccccctcaagtcgaggtcgaggtactccgcctccgcaatgccgcccccttccgcctccgcctccccctccgcctcccgcttcgcgaagcactggatagctgacgtcctcgccggcgaagaatccgtcgacttctccctgctcaaggttctggtgggggcctcgtcgaagcccctcgcgggcgccccggaggccacgcgtgagcgggtcgcgctccggtccattcaggaggtgttgtccgtgatagccgctgggggtgatgccgcggccacggcgggggtgcttagtgttgatggcgcccggtcatgcgaggatgggctgtttcggcttatcagagaggttggaagtttcggagaattggagaaggatttgcttccacctttcagtcaagacatccaggaaaatatatgtaccaagaagtttacattaccaggaatttctttccagttgctagaaagagttgagccatggatagcatctatggccccacaaccccaaatggaacacaatggcactgaacaatgtgtcaatgatcagtcactgcgcagcagccacggatgtgtaaatatagagaagcctgtgttccatacagacaatgctggggttcagcaagagaccatggcagatgtagtcaatgaaagtgaaacaggaaatctccaaaaggatccacctgcaccaacttttatttttcaccaaccgtgtatgcctgaaagcaggtcttacgtccctccgcaagaagatactatagatgctgttggtctaggcgctaggtcctcagaaaggagtcctattgtggaggggaacatgtccgttggatctgtgcttgcttcagatggctgtgatgtacctttgcagggaagcattactgagccctttttccagcaggataaacatgaccatactgttatagttggaccaaaatcttgtaagcgaaaatctccaattccatcttactgtgctcatggagatggggcagatggtggtggctccagcaatcagtcatctaaggtttccattcgtgaaggacctagcactcatgccacagtaacttcaggttttgacagaatcagcgatgtcttaccaacagatgcacctgaatctgagcatttgcctgagtgcataactgcacaggatacaaccatttcacagcctgacagcaggaaagctcatttgagtgctctgcaacaggaaaggggtgagaaagtaacccaagatctggaagatatctctgcaaatattgggtcagtggaaaaggaccatattcatggggatctgactttgccatctgccagtgttttactttctataagctgcaatggtgctaatcaaggaagtaaatatgaaaccaaccttcaaccagggactgctacagaggatatgatggctttcgaagagcagaatgcagacaagtctcacttagaagtcagtggtatcaacaaggctaatcaagctctgcatgatgatggcggcgtcatgaaaaataatacagtacatggtgggttgattgtgcagactgctccagtgtctcaaaattgcaatgtaaccttacatgataaaacttcagagcaggaaaatgaaaagaacattcaaaaagataattgccatacttatgttccaggctcttctcaggataggggtggagaaagtgcaaagaaaacaacaaatgaactaaagtctggggacatttcttcaaaaatatgtgttcatttcaatgttcaagacatcaatgatactctggaggacttgtctcaacaaggtttgtgcataaaatgtggtgaaggtggtcagttgttggaatgcaatggctgttttttagccgcccatagcagctgttttggttcatcggcgacatttgaaggaaccaattttttctactgcccggtatgcttgtataagaaagccactgaagcatataaaaaggcaaagaaaacatattgtgaaactaggaagaaccttgttgctttccttggcacagcacaagccaccaatcaacctgacaaacaactaaatggagctcagccaggagctgccaacagagatgaagagcctcatgatgagcaacattctaaagggtgtggcgcatcaaaaggggcccatgaaaatgaagtatacaatcttgctcatcaggatgaagagcatcatcagcagaggaagaagcagaaaataaatgctatagtgctccagaataacaataaaacaccagttaaggatccagagaaaaagcagcaagcggtcaacgaagaagctcgcaaagaaggtggtaatgacaactcatctcatgaaacaggagcttcatctccgagaagatgtgatcctccttcgaatcaggacgttgaggctgaccaggacgatagccttacaacttctaatcaatctggtggttctgatgaaatagaagctacatcttctaatgactctgccaagcaatcatcacccccttggcgtggtatgggacacaacaaaaaaggattgcacgaaaaggagccagctgtatcaagtaaatctggaaaaggtattgggaaacaggatcaacatatgcatacttcacgaaggaaaaaaaaaatgcacacctgcaaaagcgctattccaatcctgttgcgccacctggaagacgcaaacaactctgttggacagaaaaagaagtagctattttgagggatgggatggcaaaattctctccacataataatggtaaaataccatggacccagatactgcaatatggccgtcgtgtgtttcacaagacgcgcctgccatgtgatttgagggtcaagtggaggaacatggagaggaagaaatctgatgccgtcgacatggaacactgatgtggtactagaacatagcggaacactgatatggtactaatagcgaatggaggagggtttcttctaaaatagtattttgatgcacagggtgggcatccttttgtgactggttgtgtcaacctagacctactatgcccgtgagagagattgctaaagagtcaactttcttttggaactgaaccctgcactctagatgatgataacatccggtagctgtgtttcttaaggcaactgtgtgtgtttcatccggcagctgccagtgcctcgcccaatgttctcgaatgaggtaggcgtcgtatgctctaaacacatcacgaataatttcttccagcgtgttttcttcttcttcatctttttagtgaacgcaaccttgtaagtcacgttgcagaagctataaaaacagttagtgaaacctttaaccgtagaaatgaaataccctataagcattgcacgctctattttatttccttcatcggtgatgctacataaacattcaatcgccacttttaatcaatgcaagtttct

SEQ ID NO: 47176 - DNA, 4369 bp, Zea Mays
ctgtatctatgatttgtgggtctgagtttaaaatagagaagttcacaactgagagtgacaaaatagcaaattttcctttaaaatgaccgcgcgttttttttaaaaaatgaccgcgcagtagctttggctgaaaaagaaaagaaaaataatcttccttcttccacgatagtcgatacggagcacccataacgttacttttattttgcagttcagcggttcagccccctcaagtcgaggtcgaggtactccgcctccgcaatgccgcccccttccgcctccgcctccccctccgcctcccgcttcgcgaagcactggatagctgacgtcctcgccggcgaagaatccgtcgacttctccctgctcaaggttctggtgggggcctcgtcgaagcccctcgcgggcgccccggaggccacgcgtgagcgggtcgcgctccggtccattcaggaggtgttgtccgtgatagccgctgggggtgatgccgcggccacggcgggggtgcttagtgttgatggcgcccggtcatgcgaggatgggctgtttcggcttatcagagaggttggaagtttcggagaattggagaaggatttgcttccacctttcagtcaagacatccaggaaaatatatgtaccaagaagtttacattaccaggaatttctttccagttgctagaaagagttgagccatggatagcatctatggccccacaaccccaaatggaacacaatggcactgaacaatgtgtcaatgatcagtcactgcgcagcagccacggatgtgtaaatatagagaagcctgtgttccatacagacaatgctggggttcagcaagagaccatggcagatgtagtcaatgaaagtgaaacaggaaatctccaaaaggatccacctgcaccaacttttatttttcaccaaccgtgtatgcctgaaagcaggtcttacgtccctccgcaagaagatactatagatgctgttggtctaggcgctaggtcctcagaaaggagtcctattgtggaggggaacatgtccgttggatctgtgcttgcttcagatggctgtgatgtacctttgcagggaagcattactgagccctttttccagcaggataaacatgaccatactgttatagttggaccaaaatcttgtaagcgaaaatctccaattccatcttactgtgctcatggagatggggcagatggtggtggctccagcaatcagtcatctaaggtttccattcgtgaaggacctagcactcatgccacagtaacttcaggttttgacagaatcagcgatgtcttaccaacagatgcacctgaatctgagcatttgcctgagtgcataactgcacaggatacaaccatttcacagcctgacagcaggaaagctcatttgagtgctctgcaacaggaaaggggtgagaaagtaacccaagatctggaagatatctctgcaaatattgggtcagtggaaaaggaccatattcatggggatctgactttgccatctgccagtgttttactttctataagctgcaatggtgctaatcaaggaagtaaatatgaaaccaaccttcaaccagggactgctacagaggatatgatggctttcgaagagcagaatgcagacaagtctcacttagaagtcagtggtatcaacaaggctaatcaagctctgcatgatgatggcggcgtcatgaaaaataatacagtacatggtgggttgattgtgcagactgctccagtgtctcaaaattgcaatgtaaccttacatgataaaacttcagagcaggaaaatgaaaagaacattcaaaaagataattgccatacttatgttccaggctcttctcaggataggggtggagaaagtgcaaagaaaacaacaaatgaactaaagtctggggacatttcttcaaaaatatgtgttcatttcaatgttcaagacatcaatgatactctggaggacttgtctcaacaaggtttgtgcataaaatgtggtgaaggtggtcagttgttggaatgcaatggctgttttttagccgcccatagcagctgttttggttcatcggcgacatttgaaggaaccaattttttctactgcccggtatgcttgtataagaaagccactgaagcatataaaaaggcaaagaaaacatattgtgaaactaggaagaaccttgttgctttccttggcacagcacaagccaccaatcaacctgacaaacaactaaatggagctcagccaggagctgccaacagagatgaagagcctcatgatgagcaacattctaaagggtgtggcgcatcaaaaggggcccatgaaaatgaagtatacaatcttgctcatcaggatgaagagcatcatcagcagaggaagaagcagaaaataaatgctatagtgctccagaataacaataaaacaccagttaaggatccagagaaaaagcagcaagcggtcaacgaagaagctcgcaaagaaggtggtaatgacaactcatctcatgaaacaggagcttcatctccgagaagatgtgatcctccttcgaatcaggacgttgaggctgaccaggacgatagccttacaacttctaatcaatctggtggttctgatgaaatagaagctacatcttctaatgactctgccaagcaatcatcacccccttggcgtggtatgggacacaacaaaaaaggattgcacgaaaaggagccagctgtatcaagtaaatctggaaaagtaaaaaaggttaatcgatacagctttgctagatttactaaacatgactgaggtcctattttaggattgaatgatatctgactgtgttggtctacatatgcaaataataaagctctaaatggatattactggggtggcattcacatgtaggcatgtagctttcttttgttcttgctcaaacagtttccattattttgttggctcagtatcatggatgacatgaggcgatcagttttgacactattcgaacttgtaaggtcttaggccttttgagaaaacagagaacattaactatgccatgattcatgacaatgatttaatggaaatccggtgtctttttaaggtcttaggccttttgtcatgcattgtttttcaaattcagatgagatattttcagtttttcacatacacatggttatatctatgatatactccctccgtcccaaaatataattcgttttagctcttggtttttatgtttatattcaagtggatgaagatgaatctagacacatatgtaaaacacatatattaactattgtatgaacctattaattaactaaacgaattttaacttggggcggggagggagtatcaaattagatcagacttaattgcaatatgccaatatagttgcttagcattggtgttttgttatgaattatgcaatgttgaacacgcaccgatggtattacccttccgtgataaaatgtcctgcacatataaaaaaggagaccagagcataaaaaactgagtcaactgacttcttcaaatattcacattttccatctattataggaaagaaaatgttccatttaatgctattccaagaactgagcacatgtcttgcagttccaatcctgttgcgccacctggaagacgcaaacaactctgttggacagaaaaagaagtagctattttgagggatgggatggcaaaattctctccacataataatggtaaaataccatggacccagatactgcaatatggccgtcgtgtgtttcacaagacgcgcctgccatgtgatttgagggtcaagtggaggaacatggagaggaagaagtgggcaggctactgatgctgatctgatgccgtcgacatggaacactgatgtggtactagaacatagcggaacactgatatggtactaatagcgaatggaggagggtttcttctaaaatagtattttgatgcacagggtgggcatccttttgtgactggttgtgtcaacctagacctactatgcccgtgagagagattgctaaagagtcaactttcttttggaactgaaccctgcactctagatgatgataacatccggtagctgtgtttcttaaggcaactgtgtgtgtttcatccggcagctgccagtgcctcgcccaatgttctcgaatgaggtaggcgtcgtatgctctaaacacatcacgaataatttcttccagcgtgttttcttcttcttcatctttttagtgaacgcaaccttgtaagtcacgttgcagaagctataaaaacagttagtgaaacctttaaccgtagaaatgaaataccctataagcattgcacgctctattttatttccttcatcggtgatgctacataaacattcaatcgccacttttaatcaatgcaagtttct

SEQ ID NO: 47177 - DNA, 3429 bp, Zea Mays
ctgtatctatgatttgtgggtctgagtttaaaatagagaagttcacaactgagagtgacaaaatagcaaattttcctttaaaatgaccgcgcgttttttttaaaaaatgaccgcgcagtagctttggctgaaaaagaaaagaaaaataatcttccttcttccacgatagtcgatacggagcacccataacgttacttttattttgcagttcagcggttcagccccctcaagtcgaggtcgaggtactccgcctccgcaatgccgcccccttccgcctccgcctccccctccgcctcccgcttcgcgaagcactggatagctgacgtcctcgccggcgaagaatccgtcgacttctccctgctcaaggttctggtgggggcctcgtcgaagcccctcgcgggcgccccggaggccacgcgtgagcgggtcgcgctccggtccattcaggaggtgttgtccgtgatagccgctgggggtgatgccgcggccacggcgggggtgcttagtgttgatggcgcccggtcatgcgaggatgggctgtttcggcttatcagagaggttggaagtttcggagaattggagaaggatttgcttccacctttcagtcaagacatccaggaaaatatatgtaccaagaagtttacattaccaggaatttctttccagttgctagaaagagttgagccatggatagcatctatggccccacaaccccaaatggaacacaatggcactgaacaatgtgtcaatgatcagtcactgcgcagcagccacggatgtgtaaatatagagaagcctgtgttccatacagacaatgctggggttcagcaagagaccatggcagatgtagtcaatgaaagtgaaacaggaaatctccaaaaggatccacctgcaccaacttttatttttcaccaaccgtgtatgcctgaaagcaggtcttacgtccctccgcaagaagatactatagatgctgttggtctaggcgctaggtcctcagaaaggagtcctattgtggaggggaacatgtccgttggatctgtgcttgcttcagatggctgtgatgtacctttgcagggaagcattactgagccctttttccagcaggataaacatgaccatactgttatagttggaccaaaatcttgtaagcgaaaatctccaattccatcttactgtgctcatggagatggggcagatggtggtggctccagcaatcagtcatctaaggtttccattcgtgaaggacctagcactcatgccacagtaacttcaggttttgacagaatcagcgatgtcttaccaacagatgcacctgaatctgagcatttgcctgagtgcataactgcacaggatacaaccatttcacagcctgacagcaggaaagctcatttgagtgctctgcaacaggaaaggggtgagaaagtaacccaagatctggaagatatctctgcaaatattgggtcagtggaaaaggaccatattcatggggatctgactttgccatctgccagtgttttactttctataagctgcaatggtgctaatcaaggaagtaaatatgaaaccaaccttcaaccagggactgctacagaggatatgatggctttcgaagagcagaatgcagacaagtctcacttagaagtcagtggtatcaacaaggctaatcaagctctgcatgatgatggcggcgtcatgaaaaataatacagtacatggtgggttgattgtgcagactgctccagtgtctcaaaattgcaatgtaaccttacatgataaaacttcagagcaggaaaatgaaaagaacattcaaaaagataattgccatacttatgttccaggctcttctcaggataggggtggagaaagtgcaaagaaaacaacaaatgaactaaagtctggggacatttcttcaaaaatatgtgttcatttcaatgttcaagacatcaatgatactctggaggacttgtctcaacaaggtttgtgcataaaatgtggtgaaggtggtcagttgttggaatgcaatggctgttttttagccgcccatagcagctgttttggttcatcggcgacatttgaaggaaccaattttttctactgcccggtatgcttgtataagaaagccactgaagcatataaaaaggcaaagaaaacatattgtgaaactaggaagaaccttgttgctttccttggcacagcacaagccaccaatcaacctgacaaacaactaaatggagctcagccaggagctgccaacagagatgaagagcctcatgatgagcaacattctaaagggtgtggcgcatcaaaaggggcccatgaaaatgaagtatacaatcttgctcatcaggatgaagagcatcatcagcagaggaagaagcagaaaataaatgctatagtgctccagaataacaataaaacaccagttaaggatccagagaaaaagcagcaagcggtcaacgaagaagctcgcaaagaaggtggtaatgacaactcatctcatgaaacaggagcttcatctccgagaagatgtgatcctccttcgaatcaggacgttgaggctgaccaggacgatagccttacaacttctaatcaatctggtggttctgatgaaatagaagctacatcttctaatgactctgccaagcaatcatcacccccttggcgtggtatgggacacaacaaaaaaggattgcacgaaaaggagccagctgtatcaagtaaatctggaaaaggtattgggaaacaggatcaacatatgcatacttcacgaaggaaaaaaaaaatgcacacctgcaaaagcgctattccaatcctgttgcgccacctggaagacgcaaacaactctgttggacagaaaaagaagtagctattttgaggatctgatgccgtcgacatggaacactgatgtggtactagaacatagcggaacactgatatggtactaatagcgaatggaggagggtttcttctaaaatagtattttgatgcacagggtgggcatccttttgtgactggttgtgtcaacctagacctactatgcccgtgagagagattgctaaagagtcaactttcttttggaactgaaccctgcactctagatgatgataacatccggtagctgtgtttcttaaggcaactgtgtgtgtttcatccggcagctgccagtgcctcgcccaatgttctcgaatgaggtaggcgtcgtatgctctaaacacatcacgaataatttcttccagcgtgttttcttcttcttcatctttttagtgaacgcaaccttgtaagtcacgttgcagaagctataaaaacagttagtgaaacctttaaccgtagaaatgaaataccctataagcattgcacgctctattttatttccttcatcggtgatgctacataaacattcaatcgccacttttaatcaatgcaagtttct

SEQ ID NO: 47178 - DNA, 3671 bp, Zea Mays
ctgtatctatgatttgtgggtctgagtttaaaatagagaagttcacaactgagagtgacaaaatagcaaattttcctttaaaatgaccgcgcgttttttttaaaaaatgaccgcgcagtagctttggctgaaaaagaaaagaaaaataatcttccttcttccacgatagtcgatacggagcacccataacgttacttttattttgcagttcagcggttcagccccctcaagtcgaggtcgaggtactccgcctccgcaatgccgcccccttccgcctccgcctccccctccgcctcccgcttcgcgaagcactggatagctgacgtcctcgccggcgaagaatccgtcgacttctccctgctcaaggttctggtgggggcctcgtcgaagcccctcgcgggcgccccggaggccacgcgtgagcgggtcgcgctccggtccattcaggaggtgttgtccgtgatagccgctgggggtgatgccgcggccacggcgggggtgcttagtgttgatggcgcccggtcatgcgaggatgggctgtttcggcttatcagagaggttggaagtttcggagaattggagaaggatttgcttccacctttcagtcaagacatccaggaaaatatatgtaccaagaagtttacattaccaggaatttctttccagttgctagaaagagttgagccatggatagcatctatggccccacaaccccaaatggaacacaatggcactgaacaatgtgtcaatgatcagtcactgcgcagcagccacggatgtgtaaatatagagaagcctgtgttccatacagacaatgctggggttcagcaagagaccatggcagatgtagtcaatgaaagtgaaacaggaaatctccaaaaggatccacctgcaccaacttttatttttcaccaaccgtgtatgcctgaaagcaggtcttacgtccctccgcaagaagatactatagatgctgttggtctaggcgctaggtcctcagaaaggagtcctattgtggaggggaacatgtccgttggatctgtgcttgcttcagatggctgtgatgtacctttgcagggaagcattactgagccctttttccagcaggataaacatgaccatactgttatagttggaccaaaatcttgtaagcgaaaatctccaattccatcttactgtgctcatggagatggggcagatggtggtggctccagcaatcagtcatctaaggtttccattcgtgaaggacctagcactcatgccacagtaacttcaggttttgacagaatcagcgatgtcttaccaacagatgcacctgaatctgagcatttgcctgagtgcataactgcacaggatacaaccatttcacagcctgacagcaggaaagctcatttgagtgctctgcaacaggaaaggggtgagaaagtaacccaagatctggaagatatctctgcaaatattgggtcagtggaaaaggaccatattcatggggatctgactttgccatctgccagtgttttactttctataagctgcaatggtgctaatcaaggaagtaaatatgaaaccaaccttcaaccagggactgctacagaggatatgatggctttcgaagagcagaatgcagacaagtctcacttagaagtcagtggtatcaacaaggctaatcaagctctgcatgatgatggcggcgtcatgaaaaataatacagtacatggtgggttgattgtgcagactgctccagtgtctcaaaattgcaatgtaaccttacatgataaaacttcagagcaggaaaatgaaaagaacattcaaaaagataattgccatacttatgttccaggctcttctcaggataggggtggagaaagtgcaaagaaaacaacaaatgaactaaagtctggggacatttcttcaaaaatatgtgttcatttcaatgttcaagacatcaatgatactctggaggacttgtctcaacaaggtttgtgcataaaatgtggtgaaggtggtcagttgttggaatgcaatggctgttttttagccgcccatagcagctgttttggttcatcggcgacatttgaaggaaccaattttttctactgcccggtatgcttgtataagaaagccactgaagcatataaaaaggcaaagaaaacatattgtgaaactaggaagaaccttgttgctttccttggcacagcacaagccaccaatcaacctgacaaacaactaaatggagctcagccaggagctgccaacagagatgaagagcctcatgatgagcaacattctaaagggtgtggcgcatcaaaaggggcccatgaaaatgaagtatacaatcttgctcatcaggatgaagagcatcatcagcagaggaagaagcagaaaataaatgctataggtaagagttatcctaaggaggtactcactgagaaggttattttccagaactctgatcctgcatccattaataaacattcagtgctccagaataacaataaaacaccagttaaggatccagagaaaaagcagcaagcggtcaacgaagaagctcgcaaagaaggtggtaatgacaactcatctcatgaaacaggagcttcatctccgagaagatgtgatcctccttcgaatcaggacgttgaggctgaccaggacgatagccttacaacttctaatcaatctggtggttctgatgaaatagaagctacatcttctaatgactctgccaagcaatcatcacccccttggcgtggtatgggacacaacaaaaaaggattgcacgaaaaggagccagctgtatcaagtaaatctggaaaaggtattgggaaacaggatcaacatatgcatacttcacgaaggaaaaaaaaaatgcacacctgcaaaagcgctattccaatcctgttgcgccacctggaagacgcaaacaactctgttggacagaaaaagaagtagctattttgagggatgggatggcaaaattctctccacataataatggtaaaataccatggacccagatactgcaatatggccgtcgtgtgtttcacaagacgcgcctgccatgtgatttgagggtcaagtggaggaacatggagaggaagaagtgggcaggctactgatgctgatctgatgccgtcgacatggaacactgatgtggtactagaacatagcggaacactgatatggtactaatagcgaatggaggagggtttcttctaaaatagtattttgatgcacagggtgggcatccttttgtgactggttgtgtcaacctagacctactatgcccgtgagagagattgctaaagagtcaactttcttttggaactgaaccctgcactctagatgatgataacatccggtagctgtgtttcttaaggcaactgtgtgtgtttcatccggcagctgccagtgcctcgcccaatgttctcgaatgaggtaggcgtcgtatgctctaaacacatcacgaataatttcttccagcgtgttttcttcttcttcatctttttagtgaacgcaaccttgtaagtcacgttgcagaagctataaaaacagttagtgaaacctttaaccgtagaaatgaaataccctataagcattgcacgctctattttatttccttcatcggtgatgctacataaacattcaatcgccacttttaatcaatgcaagtttct

SEQ ID NO: 47179 - DNA, 780 bp, Zea Mays
cgtgccacggcctccgcctccccgttcgatgccgcgctggccgcgctccagtcgcgggtgggctacgccttccgcgcgccggccctgttacgccgcgccatgacgcactcctcctactcccacgagaacggccgcgcgctcgccgtcctgggcctcgcggcggcggagtccgccgccgcgctgcgcgccctcgccgccgacgcggacgccgcgccctccgccgtgtcgcgcgccgccagcgaggccgcgtccggccccgcgtgcgccagggccggggcgcggatcgggatcccggacgtcgtgcgcgtctctggccagaccagcgcggccgcgccgaccgtcgtctgcagcgcgctcagggcgctcgtcggcgccgtagccgtcgacgccaacagcaccgatgccgccggggaggtgttctggaggctgcacgcgctcacctcatcggccgccgtcgccgcagtctgatcagccaactgcatcgcgggttgcacacttgcacttcatctcagttgctgtctcgagaaatatataaaaaaaaaatagagaggacacggtgaagaagaggaggtatagatagcaacgtttaagaatcttttctcttgtgatgttcaactgccactttgtaatgctatgctatgctatgctccactctactggtagtacgtttttccatccatctaggaatgtccattttggatctctggctgcaataaaataaatttgatgaaacatcttcggtgcaataaaatattttttttagaatattttgtgattttt

SEQ ID NO: 47180 - DNA, 2048 bp, Zea Mays
tgacgtcgaccagcggcacggagcggatcctgacggactcgatctcgccgaatgccgcgaactccttgatgagcaccttgcgcttggtccgcagcggcaggttccccacgaacacggtcctgagcagcttgctctcgtcgtcgaacgcctcctcctcgtcctccccggccccctgtgccgcgtcgtcgggagccttcctcttctccccaactctcgacggattctccgcgcctcgccgccgctcccggccggcctccaactcgtcccgcttccgcttgcgccgcgggccctcctccttgctcttcttattcttcttcgaggacggctcggcatccctggcgtcacggctgggttgcatggggaggggcgtcgtggcgggtgcaggagtcgcggggggctcctccgtagaggccttccggcggaacgggttgtccgcggagaagagggagcggatggacgcggccggggagtcgccgctcgcggcctcagaggctgggtccctgtgcttcttcgccatcggcggctgcgggtctcccgatgcggctgcgggttgcggcgggggggctcgcgaagaagagggcaaaacaccttgtcctcctcgttgggtggctcggaatagatgtggggtcgggaaagcctcatgaattcccagccgtccgatggactaccaacggctaggattattctgtgctctgtacatcgtccagcgaggctaggttacccttactgttccactccagtcggtcgaggagtagggttctagcgcctatctggtttctccctgcgccgccgccgccgccgtggacaaccggagcgtagtgggaggggatgatggagggaggtagccgcgcggatgggcggaatccgaaccagctccggccgttcacctgcaccgggaacccgctccaccgcgcccacggctccgcgcggtgggcgcagggcgacaccgtcgtgctggccgctgtgtacgggcccaagtcgggaacccggaagggcgagaaccccgagaaggcctccatcgaggtcgtgtggaagcccaagaccggccagatcggcaagagagggaatatgagatgacactcaagaggacgttgcagagcatctgcttgctcacagttcatcctaacaccaccacctctgtcgtgcttcaggttgtgggtgatgatggttctcttatgtcatgtgcaattaatgcttcttgtgctgctcttgcatttgctggaatccctatgaaacatctcgctgtcgcgattagctgtggagtgatggacaatggtgtggttatcttagacactagcagagcagaagagcagcaagctaggtcgtttgctcacctggtgtttccgaactcgcgcaagtcagtcgaatcgaaggacacgacacagcgagatgaggagtccgagcgaggattgataacttgcatcacgcatggagcaatgtccgaggatgactatttcaactgcatagagaggggtgtcatggcgtcctcgaggatctcggatttcatgaggaagacactgcagaaggaggcttccagggatgcctgacctgagtagcaaatgtattagcacgactgagaagctgcctgcctgtgataggcgatggcgatggcaatggtgtgtagacagcagctgggtctctagttttgacggcatgtagtcgtgttagaatgaaggaggcaagggtgcgatggagtggaggtcaatcggcgtgtgatgccacgtcactagcttagctgcggatggtttggtggacttttgaggaacagataatgagattgtatgcacggcacgctgaaattttacttgaacgccgcccgattaaaacaatatccatactgtacgtgtgtcggtgggctgcaatgtgatgtgtgatatgaaatgtttggtggtgcttgggcgtggcgtttgtttgttagcggtggttggtttaggtaggtcgcacagcccatccatgttgtgtagtacatgcacatcaggttggtagagctgtctaggttacatattcaaactgaacctctgcctaattcaggtttcgtattcctacca

SEQ ID NO: 47181 - DNA, 1842 bp, Zea Mays
ccgaacgcacgtgctcctcgtcggtcggaactcggaagggtacgccacgcgagagacgcggggagaagcaggcaggaagccaagaaagcaagcacagagccgagcctacagtccaacaagaggaggggagaactcgtcgcgccgcctccgcctccgcctccggtggttagttcctctctcctcgtcagctcaccgcccgccccacagaactctgccccgtgctttgccaccggtgactgcagaagcagctagccatggcggcggcggcggcggcggcggccttcgatgcctacaccgacaagaacgccatcttccgccgcctcaaggccaagcccgagaacaagatgtgcttcgactgcaacgccaagaaccccacctgggcctccgtcacctacggcatcttcctctgcctcgactgctcggccgtccaccgcagccttggggtccacatcaccttcgtcaggtcaacgaacctcgactcatggactccagatcagctgaaaatgatggcgttcggaggcaacaaccgggcacatgctttcttcaagcagcatggatggactgatggtggcaaggttgaggcgaaatacacatcaagagctgctgaactgtacaggcagatgctcaacaaggagacgcaccagcaccgccggcggagaatctgaatgggaagcatgaacccaagtcccccaaagctgctccacgttcaccaaaagctgctactcatcccacctttgccacttccgtgaagaagcccattggcgcaaagaaggttggaggcaagactggagggcttggtgttcgtaaactcacaacaaagccaaatgaaagcctgtatgagcagaaaccagaagagccaaaacctgctatacctgccttgactgctccaactgcaaaaggtggtccatccttgcattcacgttttgaatatgtggataacgaacaatcatctgtttcaagaaccgggggatctggatctcgtgtaaccggtcatgtagcaccaccaaaatcatctgacttcttccaagagtatgggatgggtaatggattccaaaagaaatcaagcaacgcctcaaaagctcagattgaggaaactgatgaagcaaggaaaaaattctctaatgctaaggcaatttcgtcatctcagttttttggtactcaaaacagagaagagaaagaggctcagctatcccttcagaaattcgcgggttcttcatccatttcaagctctgatctttttggccgtaccaatgtggacgattctaacctggacctaagcgctgcagatctcatcaacagaatatctttccaggcgtcacaggatctgtcttcactcaaggacatagctggagagactggaaagaagctgacatctttcgcctccaatttcatcagcgacctggacagaatcctttgagcaggcgaggccatgccagcaaagcatttttcctaccttgcaccagaatttcccttctagcttggattgggtcacggactcgcgggtgcatcaccgacagttgaaagtagttcttgcacagctacagctttgtagaggattcctattacgcatttgtattttgatctttgttgtgagaattgaaggtatttttattcgtgaatacttcacaacggtgaagcatacactacagtttacatacgttgaggttgcttgtatcttggaaggaaggttcatactatgtcctgtgcgtgtggtaaatgaaagatactcttgtcaaggttgactgtcatgataatggaattcgtatctggtcgttttcgtgccggcgtgtctaaagattcagccaacagcatgagaaagctgaccagatgtttgcggctgtc

SEQ ID NO: 47182 - DNA, 1936 bp, Zea Mays
ccgaacgcacgtgctcctcgtcggtcggaactcggaagggtacgccacgcgagagacgcggggagaagcaggcaggaagccaagaaagcaagcacagagccgagcctacagtccaacaagaggaggggagaactcgtcgcgccgcctccgcctccgcctccggtggttagttcctctctcctcgtcagctcaccgcccgccccacagaactctgccccgtgctttgccaccggtgactgcagaagcagctagccatggcggcggcggcggcggcggcggccttcgatgcctacaccgacaagaacgccatcttccgccgcctcaaggccaagcccgagaacaagatgtgcttcgactgcaacgccaagaaccccacctgggcctccgtcacctacggcatcttcctctgcctcgactgctcggccgtccaccgcagccttggggtccacatcaccttcgtcaggtcaacgaacctcgactcatggactccagatcagctgaaaatgatggcgttcggaggcaacaaccgggcacatgctttcttcaagcagcatggatggactgatggtggcaaggttgaggcgaaatacacatcaagagctgctgaactgtacaggcagatgctcaacaaggaggtcgctaagagtgccattaccgataatgccctgccgtcctcacctgtcactgcgtctgaggcttccaagccatctgatgactttcctgaattcaagctctcagacgcaccagcaccgccggcggagaatctgaatgggaagcatgaacccaagtcccccaaagctgctccacgttcaccaaaagctgctactcatcccacctttgccacttccgtgaagaagcccattggcgcaaagaaggttggaggcaagactggagggcttggtgttcgtaaactcacaacaaagccaaatgaaagcctgtatgagcagaaaccagaagagccaaaacctgctatacctgccttgactgctccaactgcaaaaggtggtccatccttgcattcacgttttgaatatgtggataacgaacaatcatctgtttcaagaaccgggggatctggatctcgtgtaaccggtcatgtagcaccaccaaaatcatctgacttcttccaagagtatgggatgggtaatggattccaaaagaaatcaagcaacgcctcaaaagctcagattgaggaaactgatgaagcaaggaaaaaattctctaatgctaaggcaatttcgtcatctcagttttttggtactcaaaacagagaagagaaagaggctcagctatcccttcagaaattcgcgggttcttcatccatttcaagctctgatctttttggccgtaccaatgtggacgattctaacctggacctaagcgctgcagatctcatcaacagaatatctttccaggatctgtcttcactcaaggacatagctggagagactggaaagaagctgacatctttcgcctccaatttcatcagcgacctggacagaatcctttgagcaggcgaggccatgccagcaaagcatttttcctaccttgcaccagaatttcccttctagcttggattgggtcacggactcgcgggtgcatcaccgacagttgaaagtagttcttgcacagctacagctttgtagaggattcctattacgcatttgtattttgatctttgttgtgagaattgaaggtatttttattcgtgaatacttcacaacggtgaagcatacactacagtttacatacgttgaggttgcttgtatcttggaaggaaggttcatactatgtcctgtgcgtgtggtaaatgaaagatactcttgtcaaggttgactgtcatgataatggaattcgtatctggtcgttttcgtgccggcgtgtctaaagattcagccaacagcatgagaaagctgaccagatgtttgcggctgtc

SEQ ID NO: 47183 - DNA, 2845 bp, Zea Mays
caccgctgtcgtcggacatggttctgatagcccattgcaccttcctacataaataaatgaaacacacataacaggagaaaattagaggacttagttaagaatggacgacaaccactgctcaaatcatacaattaacagtgtactgactgaaattgcgcatttactgggattctagttctaaatttttctagtgaaggcgtgcaactacagatgtaacaaacaaataagctactgtgaaaacaatatgcatatgtgcacgcatcgagcaatgcacagacttcggaacttactcgatttggttcctgatcagaaaacaccatgcttatatgcattctctagactataagaaataccgctggactttgaaactcagttgggcggtatggtgtatatgaaccacatagcttttcaccagcggatgatgaatgaatgagaccgattgctaggactcccctcccatgaaacatgcatcaaacacactgatggatcagtacattacatccacatgatgctgctaacagtttcagttacgcaaacaaacctcgagtgcctgcgcaaggaaggagattttgccctcagcaaacagagggtccccggcttctcccagcggcaggagacggcagcttccctcccaacacggcgcgcagcagcaagcctcgatccagagcactccgaccagcacggcgagttggcagttccatcgcataaggggagagttgacatatgccgccgccggatattgaccaagcatctgccgatttgcgctgcaaaattagaacaaaaaaaaatcaatagatccttccgcggccgacgtaatataggacaatagatcccgtggtctgagccggccagggcaaggcaagtggactcgacaggcaggagaagcgtgagaaggaagcgggggtgctgacctgtagagtagagatgctcctcgtcaactggtgtcaaggccacggagccggcggtcggccgcggcccgtgtcggagagggatgaggtggttggatggagcggctcgcggacgggagtggccgacgacgagacgagtctgtgagggctgggcggcgaatggaccagctggccgagcccgagtcagcaattgttgggctgggcctgggcctgttgggcccaaatggacagcattttatcctctagcccactcccagggggtgaggaggaagagggctttacactgaaccccagcgacccaggcgtcagcggcgtgatgcagttcctccgaggcagcggcggcgggggcgggggcggtgggttcccgggggtggcgtgggaggtgttgcggcggcacttctctaagaagcggtccgtggacgtgaggcggatcaaccccaaggtgcccaaggaggaggccgtcgccatttccggccgactcctccagatcctctccgaccatgggcccctcaccgtcggcaacacctggaaccacgccaaggatgctggcatcgctggtctgaacagcaagacgcacatgaagatcctgctgaaatggatgacggggagaaatgtcgtgaagctgacctgcgtgcacgtgggcaacgcgaagaagttcctctactccccgtccactgaaagcagcagcagcgccggcgcatcaccgtcatccacatcggcctcgcagtgacgatttggattttctgttccacatgttttttctcgcacgatactgcaagcttctggaggagaactcatttagaggaagaactgccgactttttttacatgctcttgtttggtgctactgtcctaactagcattgttctgattggagggatgataccttacatttccgagacatttgccagaattctgttcctgagcaattcattgacgtttatgatggtttatgtctggagcaagcacaatcctttcatccatatgagctttctgggcctgttcacctttacggctgcatacttaccatgggtcctattgggcttctctatcctggtgggaagcagcacatgggttgatctcttgggtatgattgctggacatgtgtactactttctggaagatgtatacccacggatgactggccgccgtccgctgaagacaccgtccttcatcaaggcgctatttgctgatgacaatgttgtggtggcacagccacccaatgctgggattggtgctggtgcaaggtttggtgctatgggtctagatccccaggctcaatgatatgaattactttcagtgacctgaggctgtgactgatctgagatgcggcagtctgttcctctgcgcaagttgcggaactgtacaagtcattgttcttgtatttatacaggctagatgagaattcttgtgcataacaaaagattagtagtatccgaggcggccaaaagtttctcacctgttagcagggcccgaaggaaatggtttctgatgtgccaacaggccaaaacccctgtcgccgaaacttgttcttgcaacggtttaacatctgacctactactctttcatgcatcagtgagtttagtctaggaaactgttccaaccgaagttgaagtttgttgctttggcagcgagaatttgtatggagcgttatgatcgcagaattgtgcaaggaatggctcctaacattgtggatgcttggatggtggttcttttccctcctgatcatgttgtgctcatcgatgtggtctcctgcaaggcaagctgctatagaatactactggcggtttcattataaaacgtttcagttcaatgaaacagtatcggatgtataaataaaatgtttcagtttgatgaaacattatagtatatactcggtaagtcgttttagttttttttaagtacgtagatcttactatgcattagacatacactaac

SEQ ID NO: 47184 - DNA, 3155 bp, Zea Mays
cgattgctaggactcccctcccatgaaacatgcatcaaacacactgatggatcagtacattacatccacatgatgctgctaacagtttcagttacgcaaacaaacctcgagtgcctgcgcaaggaaggagattttgccctcagcaaacagagggtccccggcttctcccagcggcaggagacggcagcttccctcccaacacggcgcgcagcagcaagcctcgatccagagcactccgaccagcacggcgagttggcagttccatcgcataaggggagagttgacatatgccgccgccggatattgaccaagcatctgccgatttgcgctgcaaaattagaacaaaaaaaaatcaatagatccttccgcggccgacgtaatataggacaatagatcccgtggtctgagccggccagggcaaggcaagtggactcgacaggcaggagaagcgtgagaaggaagcgggggtgctgacctgtagagtagagatgctcctcgtcaactggtgtcaaggccacggagccggcggtcggccgcggcccgtgtcggagagggatgaggtggttggatggagcggctcgcggacgggagtggccgacgacgagacgagtctgtgagggctgggcggcgaatggaccagctggccgagcccgagtcagcaattgttgggctgggcctgggcctgttgggcccaaatggacagcattttatcctctagcccactcccagggggtgaggaggaagagggctttacactgaaccccagcgacccaggcgtcagcggcgtgatgcagttcctccgaggcagcggcggcgggggcgggggcggtgggttcccgggggtggcgtgggaggtgttgcggcggcacttctctaagaagcggtccgtggacgtgaggcggatcaaccccaaggtgcccaaggaggaggccgtcgccatttccggccgactcctccagatcctctccgaccatgggcccctcaccgtcggcaacacctggaaccacgccaaggatgctggcatcgctggtctgaacagcaagacgcacatgaagatcctgctgaaatggatgacggggagaaatgtcgtgaagctgacctgcgtgcacgtgggcaacgcgaagaagttcctctactccccgtccactgaaagcagcagcagcgccggcgcatcaccgtcatccacatcggcctcgcagtgacggatcatgtccatctcaagacatctgaatcatattaacagagtttttgcataaaaccacacacctggcaacagcaaatctaccagaccagtacgacttgagacaccggccacggccactaaaagagaggagaggggcagcaccaaaagagcaccggtgacggcgacggcgacgaaaaaaagacgtcgggcggcggcgcagactcgcacatggccgttggattagatgattttgcaagcttggccgttggattcaccatggatagccgcggtcatcctatgtcaacttcgatccgacgtgtcgtccttctattggtggcacatacgtcatagcgaccggcgtgcacatctgccaggcccacaggttcctcccatgggcgcccacaggtcagtgacacgcgcggtcattgcgaaaggcacgtcgccttctacccttctccgtcctccccgaacactccacccaacccaaccggggcattcaaccaccccgtgtgctccaaccgctcctcgatttgatcaccgattgcgggaggccgactagggtttaccggtgagcgcgcgcgcgagagagagagagagagagtgagggcggaggaaaggggagatggcgcaggcggtggaggaatggtaccggcagatgcccatcatcacgcgctcctacctcaccgccgccgtcgtcaccaccgtcggctgcaccctcgagatcatttcgccgtatcacctgtacctgaacccgaagctcgtggtgcagcactacgagatctggcgcctcgtcaccaactttctctacttccgcaagatggatttggattttctgttccacatgttttttctcgcacgatactgcaagcttctggaggagaactcatttagaggaagaactgccgactttttttacatgctcttgtttggtgctactgtcctaactagcattgttctgattggagggatgataccttacatttccgagacatttgccagaattctgttcctgagcaattcattgacgtttatgatggtttatgtctggagcaagcacaatcctttcatccatatgagctttctgggcctgttcacctttacggctgcatacttaccatggggtatgattgctggacatgtgtactactttctggaagatgtatacccacggatgactggccgccgtccgctgaagacaccgtccttcatcaaggcgctatttgctgatgacaatgttgtggtggcacagccacccaatgctgggattggtgctggtgcaaggtttggtgctatgggtctagatccccaggctcaatgatatgaattactttcagtgacctgaggctgtgactgatctgagatgcggcagtctgttcctctgcgcaagttgcggaactgtacaagtcattgttcttgtatttatacaggctagatgagaattcttgtgcataacaaaagattagtagtatccgaggcggccaaaagtttctcacctgttagcagggcccgaaggaaatggtttctgatgtgccaacaggccaaaacccctgtcgccgaaacttgttcttgcaacggtttaacatctgacctactactctttcatgcatcagtgagtttagtctaggaaactgttccaaccgaagttgaagtttgttgctttggcagcgagaatttgtatggagcgttatgatcgcagaattgtgcaaggaatggctcctaacattgtggatgcttggatggtggttcttttccctcctgatcatgttgtgctcatcgatgtggtctcctgcaaggcaagctgctatagaatactactggcggtttcattataaaacgtttcagttcaatgaaacagtatcggatgtataaataaaatgtttcagtttgatgaaacattatagtatatactcggtaagtcgttttagttttttttaagtacgtagatcttactatgcattagacatacactaac

SEQ ID NO: 47185 - DNA, 3208 bp, Zea Mays
cgattgctaggactcccctcccatgaaacatgcatcaaacacactgatggatcagtacattacatccacatgatgctgctaacagtttcagttacgcaaacaaacctcgagtgcctgcgcaaggaaggagattttgccctcagcaaacagagggtccccggcttctcccagcggcaggagacggcagcttccctcccaacacggcgcgcagcagcaagcctcgatccagagcactccgaccagcacggcgagttggcagttccatcgcataaggggagagttgacatatgccgccgccggatattgaccaagcatctgccgatttgcgctgcaaaattagaacaaaaaaaaatcaatagatccttccgcggccgacgtaatataggacaatagatcccgtggtctgagccggccagggcaaggcaagtggactcgacaggcaggagaagcgtgagaaggaagcgggggtgctgacctgtagagtagagatgctcctcgtcaactggtgtcaaggccacggagccggcggtcggccgcggcccgtgtcggagagggatgaggtggttggatggagcggctcgcggacgggagtggccgacgacgagacgagtctgtgagggctgggcggcgaatggaccagctggccgagcccgagtcagcaattgttgggctgggcctgggcctgttgggcccaaatggacagcattttatcctctagcccactcccagggggtgaggaggaagagggctttacactgaaccccagcgacccaggcgtcagcggcgtgatgcagttcctccgaggcagcggcggcgggggcgggggcggtgggttcccgggggtggcgtgggaggtgttgcggcggcacttctctaagaagcggtccgtggacgtgaggcggatcaaccccaaggtgcccaaggaggaggccgtcgccatttccggccgactcctccagatcctctccgaccatgggcccctcaccgtcggcaacacctggaaccacgccaaggatgctggcatcgctggtctgaacagcaagacgcacatgaagatcctgctgaaatggatgacggggagaaatgtcgtgaagctgacctgcgtgcacgtgggcaacgcgaagaagttcctctactccccgtccactgaaagcagcagcagcgccggcgcatcaccgtcatccacatcggcctcgcagtgacgatcatgtccatctcaagacatctgaatcatattaacagagtttttgcataaaaccacacacctggcaacagcaaatctaccagaccagtacgacttgagacaccggccacggccactaaaagagaggagaggggcagcaccaaaagagcaccggtgacggcgacggcgacgaaaaaaagacgtcgggcggcggcgcagactcgcacatggccgttggattagatgattttgcaagcttggccgttggattcaccatggatagccgcggtcatcctatgtcaacttcgatccgacgtgtcgtccttctattggtggcacatacgtcatagcgaccggcgtgcacatctgccaggcccacaggttcctcccatgggcgcccacaggtcagtgacacgcgcggtcattgcgaaaggcacgtcgccttctacccttctccgtcctccccgaacactccacccaacccaaccggggcattcaaccaccccgtgtgctccaaccgctcctcgatttgatcaccgattgcgggaggccgactagggtttaccggtgagcgcgcgcgcgagagagagagagagagagtgagggcggaggaaaggggagatggcgcaggcggtggaggaatggtaccggcagatgcccatcatcacgcgctcctacctcaccgccgccgtcgtcaccaccgtcggctgcaccctcgagatcatttcgccgtatcacctgtacctgaacccgaagctcgtggtgcagcactacgagatctggcgcctcgtcaccaactttctctacttccgcaagatggatttggattttctgttccacatgttttttctcgcacgatactgcaagcttctggaggagaactcatttagaggaagaactgccgactttttttacatgctcttgtttggtgctactgtcctaactagcattgttctgattggagggatgataccttacatttccgagacatttgccagaattctgttcctgagcaattcattgacgtttatgatggtttatgtctggagcaagcacaatcctttcatccatatgagctttctgggcctgttcacctttacggctgcatacttaccatgggtcctattgggcttctctatcctggtgggaagcagcacatgggttgatctcttgggtatgattgctggacatgtgtactactttctggaagatgtatacccacggatgactggccgccgtccgctgaagacaccgtccttcatcaaggcgctatttgctgatgacaatgttgtggtggcacagccacccaatgctgggattggtgctggtgcaaggtttggtgctatgggtctagatccccaggctcaatgatatgaattactttcagtgacctgaggctgtgactgatctgagatgcggcagtctgttcctctgcgcaagttgcggaactgtacaagtcattgttcttgtatttatacaggctagatgagaattcttgtgcataacaaaagattagtagtatccgaggcggccaaaagtttctcacctgttagcagggcccgaaggaaatggtttctgatgtgccaacaggccaaaacccctgtcgccgaaacttgttcttgcaacggtttaacatctgacctactactctttcatgcatcagtgagtttagtctaggaaactgttccaaccgaagttgaagtttgttgctttggcagcgagaatttgtatggagcgttatgatcgcagaattgtgcaaggaatggctcctaacattgtggatgcttggatggtggttcttttccctcctgatcatgttgtgctcatcgatgtggtctcctgcaaggcaagctgctatagaatactactggcggtttcattataaaacgtttcagttcaatgaaacagtatcggatgtataaataaaatgtttcagtttgatgaaacattatagtatatactcggtaagtcgttttagttttttttaagtacgtagatcttactatgcattagacatacactaac

SEQ ID NO: 47186 - DNA, 5382 bp, Zea Mays
cgattgctaggactcccctcccatgaaacatgcatcaaacacactgatggatcagtacattacatccacatgatgctgctaacagtttcagttacgcaaacaaacctcgagtgcctgcgcaaggaaggagattttgccctcagcaaacagagggtccccggcttctcccagcggcaggagacggcagcttccctcccaacacggcgcgcagcagcaagcctcgatccagagcactccgaccagcacggcgagttggcagttccatcgcataaggggagagttgacatatgccgccgccggatattgaccaagcatctgccgatttgcgctgcaaaattagaacaaaaaaaaatcaatagatccttccgcggccgacgtaatataggacaatagatcccgtggtctgagccggccagggcaaggcaagtggactcgacaggcaggagaagcgtgagaaggaagcgggggtgctgacctgtagagtagagatgctcctcgtcaactggtgtcaaggccacggagccggcggtcggccgcggcccgtgtcggagagggatgaggtggttggatggagcggctcgcggacgggagtggccgacgacgagacgagtctgtgagggctgggcggcgaatggaccagctggccgagcccgagtcagcaattgttgggctgggcctgggcctgttgggcccaaatggacagcattttatcctctagcccactcccagggggtgaggaggaagagggctttacactgaaccccagcgacccaggcgtcagcggcgtgatgcagttcctccgaggcagcggcggcgggggcgggggcggtgggttcccgggggtggcgtgggaggtgttgcggcggcacttctctaagaagcggtccgtggacgtgaggcggatcaaccccaaggtgcccaaggaggaggccgtcgccatttccggccgactcctccagatcctctccgaccatgggcccctcaccgtcggcaacacctggaaccacgccaaggtacaacgataaacacgctactgcccctacaaacctgtataaaatatccaaatcactctgctacaacatcagaaaagcagcctaatgcctttttgcgtaccagtagtggtagtaagataaactaggcactgtcttatggaataccacgaaagatggattcaatcgtagccccatcccaacagctatttgttgtggtatctggtacctttgcaattgcaacgtttcccttctgttccaaattttcaatccacggtacctttgctcaatatgcttggacccccacaagggtgtctatttttttttaaactctgtgaacttgagattaaattggatcatctcgtctctgtaatcatacgcacattctgctatacgatcacgttgctaaggaaccgaaatcgggattactttcttcacagtgtatgaatttaggtacctaatcagtcaatcagacaggcagagtggcaaataactcttccatgagatttgacaggcttgggttgcagtctgtagcatgtatacatgatcgttttacctccagttatatataagcgcctgcagatggttctgaaactgtcattgttacccactaaggcctgattcaggttagctttagctacagaagaatgtatagtatctgaacccgaaaatgaaatttaccctgcttgctgccttgtccagagctgtacactgaccctggcgtatttgtaccacaggatgctggcatcgctggtctgaacagcaagacgcacatgaagatcctgctgaaatggatgacggggagaaatgtcgtgaagctgacctgcgtgcacgtgggcaacgcgaagaagttcctctactccccgtccactgaaagcagcagcagcgccggcgcatcaccgtcatccacatcggcctcgcagtgacggtcagtcgccgttaagccttggtgtggttcttgatgttgctttgtggatcgatggaggttgcctctggtcatggtgatcccatgtttaaccttgatgacgaacattggaaaaagcattttgttttatggactggaatagtctgcaaacatcacgatagcaatattgttctgctgctcatcagctgaggatgctgccctgtcctgaactcctgattttgcttttgatctactatgtgatgatttgctcttccttttgtttggatttgattctcacttttttcccctctggaatgtgggaacgctgcatcgcattaagcaatggagtgagttgtggtcgtgccttgctactgcttaattcatctatcagagaaatgtctctgtctgtcagatgcacttgacagaaatcttcaagctggaaattcatacggcacctgcagccgccgtaattagatatgtcggttctgtttgtaaaatttacttgtgaactttgaaagatgaaacgggaaattctgatctttttccgtacaagcagccatcaggcgtgcaaccgtacaagcaggagctactgccatcatctatgactgtcatttgtctgtaataaagataaagataatctaatttctgtttggaattgaaacagatcatgtccatctcaagacatctgaatcatattaacagagtttttgcataaaaccacacacctggcaacagcaaatctaccagaccagtacgacttgagacaccggccacggccactaaaagagaggagaggggcagcaccaaaagagcaccggtgacggcgacggcgacgaaaaaaagacgtcgggcggcggcgcagactcgcacatggccgttggattagatgattttgcaagcttggccgttggattcaccatggatagccgcggtcatcctatgtcaacttcgatccgacgtgtcgtccttctattggtggcacatacgtcatagcgaccggcgtgcacatctgccaggcccacaggttcctcccatgggcgcccacaggtcagtgacacgcgcggtcattgcgaaaggcacgtcgccttctacccttctccgtcctccccgaacactccacccaacccaaccggggcattcaaccaccccgtgtgctccaaccgctcctcgatttgatcaccgattgcgggaggccgactagggtttaccggtgagcgcgcgcgcgagagagagagagagagagtgagggcggaggaaaggggagatggcgcaggcggtggaggaatggtaccggcagatgcccatcatcacgcgctcctacctcaccgccgccgtcgtcaccaccgtcggctgcaccctcgagatcatttcgccgtatcacctgtacctgaacccgaagctcgtggtgcagcactacgagatctggcgcctcgtcaccaactttctctacttccgcaagatggatttggattttctgttccacatgttttttctcgcacgatactgcaagcttctggaggagaactcatttagaggaagaactgccgactttttttacatgctcttgtttggtgctactgtcctaactagcattgttctgattggagggatgataccttacatttccgagacatttgccagaattctgttcctgagcaattcattgacgtttatgatggtttatgtctggagcaagcacaatcctttcatccatatgagctttctgggcctgttcacctttacggctgcatacttaccatgggtaaatgttcttctgccccgtttcttgaatgccacatcaccctatgcattcacattctaagttatttttatagtgaccatatgtctatgaaatcaatcatctttcttatgcggttatgtgattatgtctgaatgttccacgacatgtgaaatgtgcaattctgtttgctgcacatccttttagatgtatgtaacggaaatgcaatacttaatgtatctgggaggtccgcatgacataaacctcacacttattgttttaggctacaattttatctgctaatcatcaaaatatatgctggacttttctgagaacctgtggtgtatagatgttttttatcaacttgaatgctttccttcttttgttatgaaattctaacttgagtacttgacaatatcagtcactaatgttttgacataagaaggaacagcctatttttaacgcgttgaaattgtactggaactttgtaggaaaaggcgataatttcatttgctctgttatcattttgttctagtggtgcctgacctgaatcctgaggtgtgagataaatgaacactgtaacctcttaattcatgtgattggatcattgatggaataaccgttcaccaaatacatataagaaatgtttatatttgcctaaatggacagcaagtttcaggttgggaggaattgtgaaacaggggatcactattaattttgttcttaaagaaggctgtggttttcttcaattagattatttgggagtaaatgctcaattcagtgaaattgagctccaaccaggcagggcatggctattgtcttgattgttttatcttgaatctcaggtcctattgggcttctctatcctggtgggaagcagcacatgggttgatctcttgggtatgattgctggacatgtgtactactttctggaagatgtatacccacggatgactggccgccgtccgctgaagacaccgtccttcatcaaggcgctatttgctgatgacaatgttgtggtggcacagccacccaatgctgggattggtgctggtgcaaggtttggtgctatgggtctagatccccaggctcaatgatatgaattactttcagtgacctgaggctgtgactgatctgagatgcggcagtctgttcctctgcgcaagttgcggaactgtacaagtcattgttcttgtatttatacaggctagatgagaattcttgtgcataacaaaagattagtagtatccgaggcggccaaaagtttctcacctgttagcagggcccgaaggaaatggtttctgatgtgccaacaggccaaaacccctgtcgccgaaacttgttcttgcaacggtttaacatctgacctactactctttcatgcatcagtgagtttagtctaggaaactgttccaaccgaagttgaagtttgttgctttggcagcgagaatttgtatggagcgttatgatcgcagaattgtgcaaggaatggctcctaacattgtggatgcttggatggtggttcttttccctcctgatcatgttgtgctcatcgatgtggtctcctgcaaggcaagctgctatagaatactactggcggtttcattataaaacgtttcagttcaatgaaacagtatcggatgtataaataaaatgtttcagtttgatgaaacattatagtatatactcggtaagtcgttttagttttttttaagtacgtagatcttactatgcattagacatacactaac

SEQ ID NO: 47187 - DNA, 2108 bp, Zea Mays
cctttccctcccggctcccgccaccagcgcctgacgaagctgctgctgaccacccaagtgaacgccgcccgccaccgcaacgagctcggcgcctcctcctgcatgtttaccgcccccgacgtcccgccgctcatcgacccctcctgcggtcctgcccacgtcttcccgctcgcgctcaagtccaccaccgcgctccgtgcccagcgccgccgccgcttccacgcgctcgccgccaagtgtggcctcctctccagccccttcctcgtgtcccttctcatcgcgtcctacggcacacacggcggcggcagtggcggagccttctacgaactcacccgccgcatgttcgacgaattgcccgcccgcaacgccgtcgtttgggccttggggcgccatggtctcaggtccacgcccgggcgggcgacctcatggacgtcgcctccaccgcctcctgcttcaacaccgtgatcgctgcggttgctgagtccggggaacacccagcccaagccatcgaggtagtgggcaccacgatggacgcattgacgtcggtcaaggaggtgcacggctttgcagtgcggcaatgcatgtgcgcgatcgagatcccacattggtagctccctcatcgaagcatatgggcgttgcggttcttttgctgccactcagagtctcagagggtcctcaaccaggttcatgttcgggacgtggttgtttggagctctctggtttcagtttacgctttccatggtcgtgcaatctcgcttttccaacacatggaggaccaggagatatggagtgggagcttgtgcagatcattattcgtgcatggtgtagacgtctacagctacatcaagcttatgaacttatacggacaatgccagcagtaaaggttacagcaaaagcctgggagctcttcttgctgcatgcaggaagcatggggatgtgcggttggcagaggttgccgggagagcattgcttgagatcgaaccagagaatgcatgaaattttgtttcgcttgcaaacatctactcggatcgtggcatgcatgaggatgcagagcgggtgagaagcaagatggagcaacgtggcgtgcagagactgcctggtagcggatggatgacacatcacaaatgaagctgttaaatgcaatgtccgatatttttttctactctaatgtggtcttttatcaaaaatgaggcagtcaattcagaagtgtcatcgttggttcacggcgaaaaggaggggcaaagacctaaatacaagcatccacacatgccaagaagagaaaactagaaaagatctcgcccataggaaaaacaaaagtgacctcaacttggacatgggggacaccttattcaaatcagttaactttctactatctcacatacatttcctatatcatttttcaatctggtactggtatggcatgaactattcttgaaaagcaaatgtgagtatcagccaaaagactctgttctatgacagtaatcaatctatttcctttctggcaacatcatttcccatcagcacacatggtatgttggtaaatcatttcaaaggacagtagttatagcactgttggcagtgcacttagctttagtctgtatatgtgttggttccacaatccacattacaattatttgaaaggcactgagattaacatttaggattgcccactgaatttgttggttccttctgctggctaaaatatattttattaggtcagttttgatgggccgggggcctacctttagctttgtaatggaaatttcttctacctttagctgttagtgttagtgcatagcgctatgatgctaacttccacacatattaagagtatggacaattacaaaaaaaatgtatattatatggctagtcaaagttggcgcattaaggaagatccttaatatctttcctgctatccttaatccatgttgtctagtatttaaaataaatataaattattgaagagtacgttttgacataacccttacattagtgatgttggtatgtgtctgaggtgtgaaaatagcaacatgttttttatatgcatattgtatactttcggaaaaggatgcattgtttcagtcaccatcctaggccgtgggatcaat

SEQ ID NO: 47188 - DNA, 1003 bp, Zea Mays
gttagtggtggtaggccccatttgaagcagcttactagccggctgatgtgcagtgagatgagcccgcgtcaagcaagcactaccagcagcagagatgccacagcactgggcagtaccacggccagtaccacggtcagtcggtccactagtgaccttccctccctccccattccccaagcatgcatatatttatgtgtgtgccttggaaagcctgggctcttaaaccagaccagaaagaaggcaggtgaggtgaggtgatgcagatgacccggctggaagacctgacccctgctccatccatggagcattcctcgaggccgaccctggggtttcccctgggaactgctctcctgctcctcgtcatctttgccctgagcggcatgttctcgtgttgctaccactgggacaagctccgcgccctcctccggtctcggcatcccgacatgttcctggaggcccagccctcgcggccccgaagcagcagcagagaagaccaccgaatgtcgggatcatcaggaaccctccgtcagtatctgtatacatgatgaaagcacagttagctgttagcatgatttgatcgagtgtatatatgtgcaatttgcttgcttgctaacacatctctctctctctctctctctctctctctctctctctctcgtgtgttaaactagatagagtttgaaaggacaaaaacagtcctagctagctaggtaactggctgttgttgaatgctactgtacccagcctgtaatccaaagagcaaagggggctagtgaagaagaatgttcttttatttatgctctttaattggagcatggatcagtcctatggaagaagaagctatttattgttaggtatttgttggtgccgtgcacgtatgttgtgtgcacgcattttgtcgggggactaaaagcaaagcaaagcaaagggcactatcaccaagtgaatgctctgaaagaaaagaaaaagaaaaggaatgcagcatgcatgcacttgcactgag

SEQ ID NO: 47189 - DNA, 1099 bp, Zea Mays
atggacacttggaccacctgccttctctccttccttccatccattcctccctgtctccgccctcttctgactcccgtaggccgtggtgccgccgccgactgctgggactgccctacaccaagtgcccaggtcatcttcgggccattcgccggcgacgagcaccaccaggtgtgccaggttgaccgagctatggacagcctgtggcatcttggggacgagctccgcgggcagcccaaggtggtggaggaccgccagtggtctctcatgacgtccaagctggcggagatcaccaggtccaagggcgagaggatgaacaccgtccctgacgccaagcagtgggacaagacgtcctaccagcttcacgacgacagcaggatcggccacatcggcctcatgaacctggatctcaagatgaacgaggctgccgccatgaagctccccttccgtggcatgccgtataacatgaaccagatgtacctcaaggggagcaatgccaattccaatgtcaatgcgttcaagatgaatgttggagtcaacaagtactccaatagtccaaacgggaaagacgccaatgggaaaaacaatggcggcagtggcggcaacaacaacaatgggagcgccaacggcacttctgtggctgacaagcgcttcaagacattgccgacgagtgagatgctaccgaggaatgaagtccttggtggatacatctttgtctgcaacaacgataccatgcaggaggatctcaagaggcagctttttggtttgccagcaagatatcgtgattcagtccgagcaatcactcctggcttgcctcttttcctctataactacacaacccaccagcttcatggggtatttgaggctgccagttttggtgggtccaatatcgatcctactgcatgggaggataagaagtgtaaaggtgaatctagattcccagcgcaggtgaggatctgcattaggaagctgtgcaagccgttggaagaggattccttcaggccagttttgcaccattatgatgggccaaagttccgccttgagctctccatcgcggagatggtcatgtgaaccagttctcacgcacggaatttaaatctgc

SEQ ID NO: 47190 - DNA, 922 bp, Zea Mays
agagattcctgtactgctggacacataggtttggtgtctaactgaaagacgtatatggatccattcagaaataatgatgtccgtcctccattaagagaactatctaacaatacccttgaaggtatacctactaataaaatgccttatgtgacctctcaacaaggttttaaaatgggaaaaaataatggtttaggaggacgtgctaatgcaatgcaacgtaagagggaaagagaaagagcacgatatgcagcaatgagtgatgaaaaaaaatgaactaaagaagcgtcgtgagtcacgcacaaaagaaaaccttgagcaccataaacactcaaacgatgaatgtccagatatgtctataagcggcggaagcatcattgattgtactataccgtgtgataccactccaggaggacgtgatgatgcaagacaacgtaagagggaaagagaaagagtacgatatgctacgatgagtgctgaaaagaaaaatgaattgaagaagcgtcgtgagtcacgaaaaaagggaaatgttatgcaccatgagtattcagaagtttgcaacatccctgcaaacaaggacaacaataatcatcaaaacaatgaaattgaggatgttgatgatgattcttatcagttgcataagaataactcatttgaggtgcatagaagacttggcagtgaaaaactttccacacatttgtcagatgaatgtccacaggtgtttgtaagcgacagaagcatcaaaaatctgactgtacattgtgataacactttaggtaattacatttatctgttatgttatttcactatatcatgttgttacactctagataacatgcaccattagttggttgagctctcatcattcaacctatatgtacacctaagacctttgctattttcaactttaaagtcgcattgggtc

SEQ ID NO: 47191 - DNA, 1710 bp, Zea Mays
ctacggagaacgccaacaaagccctaacctgcacaacctttcccccctcgcaagcaaagccaaacagatctcctcgtcgtcgcctcgctgtctcctccgccgttgcctgcgatcccgatcatggagggcgacagtaccaacctcgacgcggctatagagtcgctcctgaacgtggagaagcagatgaggctggccggcgatgtcgccggcacgcggaaggccgtcatcgacatcgtcgagctctgctacaaggccggcgcgtggaagacgctaaacgaccagatcgttctcctctccaagaggagaggccagcttaagcaggccattactgctatggttcagaaagcaatggactacattgatttgacaccagacattgacacacgcgtcgagctaatcaaaacactgagcagcgtctctgctggcaaaatttatgttgagatagagagagcaagattgatcaaaaggcttgcaaatatcaaagaggagcagggaaagattgacgaggctgctgatttgatgcaagaagttgctgtcgaaacatttggctccatggcaaagacggagttgtcacaggtccggctatgcctagatcgtcaagattatgtccgagcacaaattttatcaaggaaaatcagtactagagtatttgacgcagatccatcaaaggaaaaaaagaaaccaaaggagggtgacaacattgttcaggatgctcctgcagatattccttccctcctagaattgaagcgtatctactatgaactgatgattcgatattacttgcacaacaatgattacctggaaatctgtcgttgttacaaggctatttatgatatcccagcaataaaggaagatccaaccaagtggataccgattcttaggaagatctgttggtacttggtgctagcacctcatgatcctatgcaatcgagccttctcaatgctacactagaggataaaaacctttcagaaatcccaaatttcaggttattgctgaagcagctggttaccatggaggtcatccagtggacagcattgtgggaattctctaagcacgaatttgaaaacgagaagaatctgctaggaggagctttgggtgccaaagctgcagaagatttgaagctaagaataattgaacatgaggcagagaagcatctttcagacatggtgaactcaaaatctctgactgcgaagatcgacaggccgatgggagttgtgagcttccgggtagttcaggactgcaacggcacacttaactcgtgggctacaaacctcgagcagcttcttgaccttgtcgagaagagctgtcaccagatacacaaggagactatgatccacaaggcggtattgaaagcttgactgattggcgctggctgtttttgcttcatctgcaatcagatacctactcctgaaaagctgatccggctcctcattcaaactcagttctccagtcttcattctgggatagcaagaacgtcaattatttaaatattaattggtgctgccaagaaatctctgcatgtcagtcgccgtataaccacatcctcaatattcaagttgggtctatgtatctctaatctaatctattctacgagagctgtttctttgttttcgcattgtgcaatgtcagtggttttcgcccaattcgtcaaatcgcattagaaatattcctgtgcttttacggtggcccactgagggctagtttgggag

SEQ ID NO: 47192 - DNA, 3880 bp, Zea Mays
ctgccttgctctcttccctcgcaccccaccttgcacctccagtcctccattcccagtctagatctcgatccacctccatggcggatctcgccacggacctcttcggggagccgatcgaggcgcaccctccctggttcaagcccgacgccttcctccgcgccagcttcgatccggacgcctacgtcgccgagctccgctcctacgtcccgctcgagagcctcgccgccgagctccgcgcccacctcgacgcgctccgcgccgagctcgtcggcctcatcaaccgcgactacgccgacttcgtaggcctcagcgcgcgccttaagggcgtcgatgccgccgccgcgcggatgcgcgccccgctcgccgacctcagggacaaggtcgccgccttccgcgcgggggcatcagccgcgctcgccgcgctccgggcgggactcgagcagcgcgccgccgccgccgccgcgcgcgagctgctcgagctcttgctcgacgccttccacgtcgtctccaaggttgagaaattgatcaaggaactaccaactgcgccatcggatttatcgaatgctgaagttcctaacagtgacactggaacaccaaatggggtggctggaacaggtgtcagcgaaacacaaagcattctcttagaaagaattgctagcgagatgaaccggcttaaattctacataagtcatgcacagaacctcccttttattgagaacatggagaagagggtccaaggtgctacaaaactgcttgatggtagcttggagcgctgctttgtggatggtctggaacaccgtgatgctaaagttatatacaactgtttgcgtgcttatgctgcaattgacaacacatcatcagccgaagagcttttccgtacagcagtggtgtctccattgattcagaaaataatccctcaaaattatgcaagagctgttgctggggcatcatctgatgagctggaagaggattatcaacaaataaaggaatgtgtacaaaaagattgtaaatttatattggaaatatcttcctcagaaaactctggattgcatgtttttgattttctgggtaattcaatactcaaagaagtcctttctacaatccagaaaggcaagcctggggccttttctcctggaaagcctaaagaattcttgaggaactacaaagcgagcttaggatttcttgattttcttgaaggttactgcatctccaagtctgctgtaacgaagttccgctctgagcttgcttacacagatttcatgcgacaatggaatgttggtgtctacttttcgttgcgatttcaggaaattgcgggcggccttgattctactcttacaaacacttttagtcctactggattgaatgaggctcaagggaaaccattgctcttgaagcaaagtattaagctcttagaaagtttggattcatgttggagtgatgaggttcttgtattctctcactgtgataaattccttcgtctgtccttgcagcttatttcaaggtatacaacatggctttcatctggtttaacggcacgtaaagcttctgacgggagcccgaattcacctgcagatgctgaatgggcactgtctatacctatagaagatttcatatatataatgcatgatgtgcatgctgtaattggcgagctttcagaatcaggcagcttcattggacatgtgaatcagttactagggtcatgccccattgaagtatttaatcttgtgaaacaaagtatactgcaagctgttgaacctttaaaggaacggttgcctgcaataatcaatgttatgattggaatcatagttaagaagtctaacgaggacttgaagcacctgaaaggaataacagcgacatataggatgacgagtaaacttccagtcaggcattctccatatgtatcagggattttacatccgttgaaggtgtttcttgaaggggaccgaatacgctatctatcagaagatgataaaactaagttgtgtcgtgggtctacagataagattactgcaatttactatgacttggtctctgaagttgtcactgtggcaaggaaaaccgagtcttcgttgcaaagactgcgccaaggtgcacaaaggcgagtaggagctagtacagatgcctcagataacatcatatctgatacagacaagatctgtatgcagctatttcttgatattcaggagtacgcacgaaaccttcgtgcgataggaatagacgcgagagagattgattcctacagagctctatggcagtgtgttgccccaaaagacagacaagagaacattcagttttgatgtaaagaacactgtcagtacatatagagttgtctgcccgtagatctctcaaacatgtaggcgtatctgatgttgtccttttcggtttgaagtacttattatggatgcatacgtagagtagatagagagctggattttggtacacattttattgttaggatggatggtcacctccagatataatccagaactggagaacgtgtaccagtatatgattaaattttcatgtgaaatactaggatactgttgaaaatcgtgtgtcctcaagttgtcacgagcgtgaatcttagctctggctagttgtgaaattgattggtctctactgcagggttccctgcatgtctacatgatgttcatgtgtttgttcttaagccctgaccccattggcattacctcttgttactctcgtgcacaacagaacgtgtaattccagatggtggattactgtttttggttgctaaaattgatagctcgtaataaaataaaataaaaatcccagcgatttcaggattcttgtgagggaggatgttgatttaaggattctattctatggagaaacaaaccgcatgttgcaaaaacagctcaaactactgaacctcagcttctcaaagtcaagttctggcacgtcctgctaccacacagcatcacaacagggagaacacgatgggactacagctcatgtgaaaatgatacgatcggcactggttcatccaaatcttcaacggcacctatcagctgctgaaccagcagaagcatcagcaaccatgcaaggaagcatcagttcctgaaccaactgaagcatgagcaagcctgcaaggaagcagcagaacagtgaattcaacacggtcctataagaaaaggcgtttctttcaccatggtcaaattctagaataaaacaatggatagtcatagctacaatagcactaaaattttactgctaacaaagggtctatcatcagtatactaaacattgttgtgttccagttaagaacacactgctgaagtaagcatggggcaatgaaggctaatgccctgtttgtttggcttccaccgactaaattttagtatctatcacatcaaatgtttgaatgctagttagaagcattaaattacaaaactaattactaaagacgaatatattaaatctaattagttcatgattcgctcacatgatgcttaataaatttgtctagtatttagttgtgtaattagttttataaatacactacttgtaaaaggcattcaaacatccaaaccaaacagccctttataaaaccagcaatcatcggattaagtgattctgcagtgctctgaaaccaatggcagccattcatcaggatgtcaaaaatgcaagaaagataaaattgtataagaaacacctgcaaataaatgctttaggccaagaaaatagtttgaaccagcattatggcaacaagtctggagttgactcactgaagattcgtatttgcggccttggttggagcggctataaccaccacctgcgttgccgctggtgatgacaggagcatcgccggactgcttctcctccctcaccttgttaaatatgtcggtgaagccttcac

SEQ ID NO: 47193 - DNA, 3867 bp, Zea Mays
tcgcaccccaccttgcacctccagtcctccattcccagtctagatctcgatccacctccatggcggatctcgccacggacctcttcggggagccgatcgaggcgcaccctccctggttcaagcccgacgccttcctccgcgccagcttcgatccggacgcctacgtcgccgagctccgctcctacgtcccgctcgagagcctcgccgccgagctccgcgcccacctcgacgcgctccgcgccgagctcgtcggcctcatcaaccgcgactacgccgacttcgtaggcctcagcgcgcgccttaagggcgtcgatgccgccgccgcgcggatgcgcgccccgctcgccgacctcagggacaaggtcgccgccttccgcgcgggggcatcagccgcgctcgccgcgctccgggcgggactcgagcagcgcgccgccgccgccgccgcgcgcgagctgctcgagctcttgctcgacgccttccacgtcgtctccaaggttgagaaattgatcaaggaactaccaactgcgccatcggatttatcgaatgctgaagttcctaacagtgacactggaacaccaaatggggtggctggaacaggtgtcagcgaaacacaaagcattctcttagaaagaattgctagcgagatgaaccggcttaaattctacataagtcatgcacagtacagaacctcccttttattgagaacatggagaagagggtccaaggtgctacaaaactgcttgatggtagcttggagcgctgctttgtggatggtctggaacaccgtgatgctaaagttatatacaactgtttgcgtgcttatgctgcaattgacaacacatcatcagccgaagagcttttccgtacagcagtggtgtctccattgattcagaaaataatccctcaaaattatgcaagagctgttgctggggcatcatctgatgagctggaagaggattatcaacaaataaaggaatgtgtacaaaaagattgtaaatttatattggaaatatcttcctcagaaaactctggattgcatgtttttgattttctgggtaattcaatactcaaagaagtcctttctacaatccagaaaggcaagcctggggccttttctcctggaaagcctaaagaattcttgaggaactacaaagcgagcttaggatttcttgattttcttgaaggttactgcatctccaagtctgctgtaacgaagttccgctctgagcttgcttacacagatttcatgcgacaatggaatgttggtgtctacttttcgttgcgatttcaggaaattgcgggcggccttgattctactcttacaaacacttttagtcctactggattgaatgaggctcaagggaaaccattgctcttgaagcaaagtattaagctcttagaaagtttggattcatgttggagtgatgaggttcttgtattctctcactgtgataaattccttcgtctgtccttgcagcttatttcaaggtatacaacatggctttcatctggtttaacggcacgtaaagcttctgacgggagcccgaattcacctgcagatgctgaatgggcactgtctatacctatagaagatttcatatatataatgcatgatgtgcatgctgtaattggcgagctttcagaatcaggcagcttcattggacatgtgaatcagttactagggtcatgccccattgaagtatttaatcttgtgaaacaaagtatactgcaagctgttgaacctttaaaggaacggttgcctgcaataatcaatgttatgattggaatcatagttaagaagtctaacgaggacttgaagcacctgaaaggaataacagcgacatataggatgacgagtaaacttccagtcaggcattctccatatgtatcagggattttacatccgttgaaggtgtttcttgaaggggaccgaatacgctatctatcagaagatgataaaactaagttgtgtcgtgggtctacagataagattactgcaatttactatgacttggtctctgaagttgtcactgtggcaaggaaaaccgagtcttcgttgcaaagactgcgccaaggtgcacaaaggcgagtaggagctagtacagatgcctcagataacatcatatctgatacagacaagatctgtatgcagctatttcttgatattcaggagtacgcacgaaaccttcgtgcgataggaatagacgcgagagagattgattcctacagagctctatggcagtgtgttgccccaaaagacagacaagagaacattcagttttgatgtaaagaacactgtcagtacatatagagttgtctgcccgtagatctctcaaacatgtaggcgtatctgatgttgtccttttcggtttgaagtacttattatggatgcatacgtagagtagatagagagctggattttggtacacattttattgttaggatggatggtcacctccagatataatccagaactggagaacgtgtaccagtatatgattaaattttcatgtgaaatactaggatactgttgaaaatcgtgtgtcctcaagttgtcacgagcgtgaatcttagctctggctagttgtgaaattgattggtctctactgcagggttccctgcatgtctacatgatgttcatgtgtttgttcttaagccctgaccccattggcattacctcttgttactctcgtgcacaacagaacgtgtaattccagatggtggattactgtttttggttgctaaaattgatagctcgtaataaaataaaataaaaatcccagcgatttcaggattcttgtgagggaggatgttgatttaaggattctattctatggagaaacaaaccgcatgttgcaaaaacagctcaaactactgaacctcagcttctcaaagtcaagttctggcacgtcctgctaccacacagcatcacaacagggagaacacgatgggactacagctcatgtgaaaatgatacgatcggcactggttcatccaaatcttcaacggcacctatcagctgctgaaccagcagaagcatcagcaaccatgcaaggaagcatcagttcctgaaccaactgaagcatgagcaagcctgcaaggaagcagcagaacagtgaattcaacacggtcctataagaaaaggcgtttctttcaccatggtcaaattctagaataaaacaatggatagtcatagctacaatagcactaaaattttactgctaacaaagggtctatcatcagtatactaaacattgttgtgttccagttaagaacacactgctgaagtaagcatggggcaatgaaggctaatgccctgtttgtttggcttccaccgactaaattttagtatctatcacatcaaatgtttgaatgctagttagaagcattaaattacaaaactaattactaaagacgaatatattaaatctaattagttcatgattcgctcacatgatgcttaataaatttgtctagtatttagttgtgtaattagttttataaatacactacttgtaaaaggcattcaaacatccaaaccaaacagccctttataaaaccagcaatcatcggattaagtgattctgcagtgctctgaaaccaatggcagccattcatcaggatgtcaaaaatgcaagaaagataaaattgtataagaaacacctgcaaataaatgctttaggccaagaaaatagtttgaaccagcattatggcaacaagtctggagttgactcactgaagattcgtatttgcggccttggttggagcggctataaccaccacctgcgttgccgctggtgatgacaggagcatcgccggactgcttctcctccctcaccttgttaaatatgtcggtgaagccttcac

SEQ ID NO: 47194 - DNA, 4107 bp, Zea Mays
gcaccccaccttgcacctccagtcctccattcccagtctagatctcgatccacctccatggcggatctcgccacggacctcttcggggagccgatcgaggcgcaccctccctggttcaagcccgacgccttcctccgcgccagcttcgatccggacgcctacgtcgccgagctccgctcctacgtcccgctcgagagcctcgccgccgagctccgcgcccacctcgacgcgctccgcgccgagctcgtcggcctcatcaaccgcgactacgccgacttcgtaggcctcagcgcgcgccttaagggcgtcgatgccgccgccgcgcggatgcgcgccccgctcgccgacctcagggacaaggtcgccgccttccgcgcgggggcatcagccgcgctcgccgcgctccgggcgggactcgagcagcgcgccgccgccgccgccgcgcgcgagctgctcgagctcttgctcgacgccttccacgtcgtctccaaggttgagaaattgatcaaggaactaccaactgcgccatcggatttatcgaatgctgaagttcctaacagtgacactggaacaccaaatggggtggctggaacaggtgtcagcgaaacacaaagcattctcttagaaagaattgctagcgagatgaaccggcttaaattctacataagtcatgcacagaacctcccttttattgagaacatggagaagagggtccaaggtgctacaaaactgcttgatggtagcttggagcgctgctttgtggatggtctggaacaccgtgatgctaaagttatatacaactgtttgcgtgcttatgctgcaattgacaacacatcatcagccgaagagcttttccgtacagcagtggtgtctccattgattcagaaaataatccctcaaaattatgcaagagctgttgctggggcatcatctgatgagctggaagaggattatcaacaaataaaggaatgtgtacaaaaagattgtaaatttatattggaaatatcttcctcagaaaactctggattgcatgtttttgattttctgggtaattcaatactcaaagaagtcctttctacaatccagaaaggcaagcctggggccttttctcctggaaagcctaaagaattcttgaggaactacaaagcgagcttaggatttcttgattttcttgaaggttactgcatctccaagtctgctgtaacgaagttccgctctgagcttgcttacacagatttcatgcgacaatggaatgttggtgtctacttttcgttgcgatttcaggaaattgcgggcggccttgattctactcttacaaacacttttagtcctactggattgaatgaggctcaagggaaaccattgctcttgaagcaaagtattaagctcttagaaagtttggattcatgttggagtgatgaggttcttgtattctctcactgtgataaattccttcgtctgtccttgcagcttatttcaaggtatacaacatggctttcatctggtttaacggcacgtaaagcttctgacgggagcccgaattcacctgcagatgctgaatgggcactgtctatacctatagaagatttcatatatataatgcatgatgtgcatgctgtaattggcgagctttcagaatcaggcagcttcattggacatgtgaatcagttactagggtcatgccccattgaagtatttaatcttgtgaaacaaagtatactgcaagctgttgaacctttaaaggaacggttgcctgcaataatcaatgttatgattggaatcatagttaagaagtctaacgaggacttgaagcacctgaaaggaataacagcgacatataggatgacgagtaaacttccagtcaggcattctccatatgtatcagggattttacatccgttgaaggtgtttcttgaaggggaccgaatacgctatctatcagaagatgataaaactaagttgtgtcgtgggtctacagataagattactgcaatttactatgacttggtctctgaagttgtcactgtggcaaggaaaaccgagtcttcgttgcaaagactgcgccaaggtgcacaaaggcgagtaggagctagtacagatgcctcagataacatcatatctgatacagacaagatctgtatgcagctatttcttgatattcaggtttgctgtctgcctcttgtgcagttctgctcttgtgctcataaatgatattgatgctatgtgctggccataagaaattctccttctaggttcatttcgcatctaaatcaaaacaatgttgtccttttggatttatttggcacccaagcttttattttcttccggcttggtttgacaacatatgtggctataaacaagcataaagtggaccttgacatgatcttttggtattgcattatttttgcaggagtacgcacgaaaccttcgtgcgataggaatagacgcgagagagattgattcctacagagctctatggcagtgtgttgccccaaaagacagacaagagaacattcagttttgatgtaaagaacactgtcagtacatatagagttgtctgcccgtagatctctcaaacatgtaggcgtatctgatgttgtccttttcggtttgaagtacttattatggatgcatacgtagagtagatagagagctggattttggtacacattttattgttaggatggatggtcacctccagatataatccagaactggagaacgtgtaccagtatatgattaaattttcatgtgaaatactaggatactgttgaaaatcgtgtgtcctcaagttgtcacgagcgtgaatcttagctctggctagttgtgaaattgattggtctctactgcagggttccctgcatgtctacatgatgttcatgtgtttgttcttaagccctgaccccattggcattacctcttgttactctcgtgcacaacagaacgtgtaattccagatggtggattactgtttttggttgctaaaattgatagctcgtaataaaataaaataaaaatcccagcgatttcaggattcttgtgagggaggatgttgatttaaggattctattctatggagaaacaaaccgcatgttgcaaaaacagctcaaactactgaacctcagcttctcaaagtcaagttctggcacgtcctgctaccacacagcatcacaacagggagaacacgatgggactacagctcatgtgaaaatgatacgatcggcactggttcatccaaatcttcaacggcacctatcagctgctgaaccagcagaagcatcagcaaccatgcaaggaagcatcagttcctgaaccaactgaagcatgagcaagcctgcaaggaagcagcagaacagtgaattcaacacggtcctataagaaaaggcgtttctttcaccatggtcaaattctagaataaaacaatggatagtcatagctacaatagcactaaaattttactgctaacaaagggtctatcatcagtatactaaacattgttgtgttccagttaagaacacactgctgaagtaagcatggggcaatgaaggctaatgccctgtttgtttggcttccaccgactaaattttagtatctatcacatcaaatgtttgaatgctagttagaagcattaaattacaaaactaattactaaagacgaatatattaaatctaattagttcatgattcgctcacatgatgcttaataaatttgtctagtatttagttgtgtaattagttttataaatacactacttgtaaaaggcattcaaacatccaaaccaaacagccctttataaaaccagcaatcatcggattaagtgattctgcagtgctctgaaaccaatggcagccattcatcaggatgtcaaaaatgcaagaaagataaaattgtataagaaacacctgcaaataaatgctttaggccaagaaaatagtttgaaccagcattatggcaacaagtctggagttgactcactgaagattcgtatttgcggccttggttggagcggctataaccaccacctgcgttgccgctggtgatgacaggagcatcgccggactgcttctcctccctcaccttgttaaatatgtcggtgaagccttcac

SEQ ID NO: 47195 - DNA, 3853 bp, Zea Mays
gcaccccaccttgcacctccagtcctccattcccagtctagatctcgatccacctccatggcggatctcgccacggacctcttcggggagccgatcgaggcgcaccctccctggttcaagcccgacgccttcctccgcgccagcttcgatccggacgcctacgtcgccgagctccgctcctacgtcccgctcgagagcctcgccgccgagctccgcgcccacctcgacgcgctccgcgccgagctcgtcggcctcatcaaccgcgactacgccgacttcgtaggcctcagcgcgcgccttaagggcgtcgatgccgccgccgcgcggatgcgcgccccgctcgccgacctcagggacaaggtcgccgccttccgcgcgggggcatcagccgcgctcgccgcgctccgggcgggactcgagcagcgcgccgccgccgccgccgcgcgcgagctgctcgagctcttgctcgacgccttccacgtcgtctccaaggttgagaaattgatcaaggaactaccaactgcgccatcggatttatcgaatgctgaagttcctaacagtgacactggaacaccaaatggggtggctggaacaggtgtcagcgaaacacaaagcattctcttagaaagaattgctagcgagatgaaccggcttaaattctacataagtcatgcacagaacctcccttttattgagaacatggagaagagggtccaaggtgctacaaaactgcttgatggtagcttggagcgctgctttgtggatggtctggaacaccgtgatgctaaagttatatacaactgtttgcgtgcttatgctgcaattgacaacacatcatcagccgaagagcttttccgtacagcagtggtgtctccattgattcagaaaataatccctcaaaattatgcaagagctgttgctggggcatcatctgatgagctggaagaggattatcaacaaataaaggaatgtgtacaaaaagattgtaaatttatattggaaatatcttcctcagaaaactctggattgcatgtttttgattttctgggtaattcaatactcaaagaagtcctttctacaatccagaaaggcaagcctggggccttttctcctggaaagcctaaagaattcttgaggaactacaaagcgagcttaggatttcttgattttcttgaaggttactgcatctccaagtctgctgtaacgaagttccgctctgagcttgcttacacagatttcatgcgacaatggaatgttggtgtctacttttcgttgcggaaattgcgggcggccttgattctactcttacaaacacttttagtcctactggattgaatgaggctcaagggaaaccattgctcttgaagcaaagtattaagctcttagaaagtttggattcatgttggagtgatgaggttcttgtattctctcactgtgataaattccttcgtctgtccttgcagcttatttcaaggtatacaacatggctttcatctggtttaacggcacgtaaagcttctgacgggagcccgaattcacctgcagatgctgaatgggcactgtctatacctatagaagatttcatatatataatgcatgatgtgcatgctgtaattggcgagctttcagaatcaggcagcttcattggacatgtgaatcagttactagggtcatgccccattgaagtatttaatcttgtgaaacaaagtatactgcaagctgttgaacctttaaaggaacggttgcctgcaataatcaatgttatgattggaatcatagttaagaagtctaacgaggacttgaagcacctgaaaggaataacagcgacatataggatgacgagtaaacttccagtcaggcattctccatatgtatcagggattttacatccgttgaaggtgtttcttgaaggggaccgaatacgctatctatcagaagatgataaaactaagttgtgtcgtgggtctacagataagattactgcaatttactatgacttggtctctgaagttgtcactgtggcaaggaaaaccgagtcttcgttgcaaagactgcgccaaggtgcacaaaggcgagtaggagctagtacagatgcctcagataacatcatatctgatacagacaagatctgtatgcagctatttcttgatattcaggagtacgcacgaaaccttcgtgcgataggaatagacgcgagagagattgattcctacagagctctatggcagtgtgttgccccaaaagacagacaagagaacattcagttttgatgtaaagaacactgtcagtacatatagagttgtctgcccgtagatctctcaaacatgtaggcgtatctgatgttgtccttttcggtttgaagtacttattatggatgcatacgtagagtagatagagagctggattttggtacacattttattgttaggatggatggtcacctccagatataatccagaactggagaacgtgtaccagtatatgattaaattttcatgtgaaatactaggatactgttgaaaatcgtgtgtcctcaagttgtcacgagcgtgaatcttagctctggctagttgtgaaattgattggtctctactgcagggttccctgcatgtctacatgatgttcatgtgtttgttcttaagccctgaccccattggcattacctcttgttactctcgtgcacaacagaacgtgtaattccagatggtggattactgtttttggttgctaaaattgatagctcgtaataaaataaaataaaaatcccagcgatttcaggattcttgtgagggaggatgttgatttaaggattctattctatggagaaacaaaccgcatgttgcaaaaacagctcaaactactgaacctcagcttctcaaagtcaagttctggcacgtcctgctaccacacagcatcacaacagggagaacacgatgggactacagctcatgtgaaaatgatacgatcggcactggttcatccaaatcttcaacggcacctatcagctgctgaaccagcagaagcatcagcaaccatgcaaggaagcatcagttcctgaaccaactgaagcatgagcaagcctgcaaggaagcagcagaacagtgaattcaacacggtcctataagaaaaggcgtttctttcaccatggtcaaattctagaataaaacaatggatagtcatagctacaatagcactaaaattttactgctaacaaagggtctatcatcagtatactaaacattgttgtgttccagttaagaacacactgctgaagtaagcatggggcaatgaaggctaatgccctgtttgtttggcttccaccgactaaattttagtatctatcacatcaaatgtttgaatgctagttagaagcattaaattacaaaactaattactaaagacgaatatattaaatctaattagttcatgattcgctcacatgatgcttaataaatttgtctagtatttagttgtgtaattagttttataaatacactacttgtaaaaggcattcaaacatccaaaccaaacagccctttataaaaccagcaatcatcggattaagtgattctgcagtgctctgaaaccaatggcagccattcatcaggatgtcaaaaatgcaagaaagataaaattgtataagaaacacctgcaaataaatgctttaggccaagaaaatagtttgaaccagcattatggcaacaagtctggagttgactcactgaagattcgtatttgcggccttggttggagcggctataaccaccacctgcgttgccgctggtgatgacaggagcatcgccggactgcttctcctccctcaccttgttaaatatgtcggtgaagccttcac

SEQ ID NO: 47196 - DNA, 3239 bp, Zea Mays
cctaactcaaggctattcttaaacgagtttacggttgagaaattgatcaaggaactaccaactgcgccatcggatttatcgaatgctgaagttcctaacagtgacactggaacaccaaatggggtggctggaacaggtgtcagcgaaacacaaagcattctcttagaaagaattgctagcgagatgaaccggcttaaattctacataagtcatgcacagaacctcccttttattgagaacatggagaagagggtccaaggtgctacaaaactgcttgatggtagcttggagcgctgctttgtggatggtctggaacaccgtgatgctaaagttatatacaactgtttgcgtgcttatgctgcaattgacaacacatcatcagccgaagagcttttccgtacagcagtggtgtctccattgattcagaaaataatccctcaaaattatgcaagagctgttgctggggcatcatctgatgagctggaagaggattatcaacaaataaaggaatgtgtacaaaaagattgtaaatttatattggaaatatcttcctcaggttactgcatctccaagtctgctgtaacgaagttccgctctgagcttgcttacacagatttcatgcgacaatggaatgttggtgtctacttttcgttgcgatttcaggaaattgcgggcggccttgattctactcttacaaacacttttagtcctactggattgaatgaggctcaagggaaaccattgctcttgaagcaaagtattaagctcttagaaagtttggattcatgttggagtgatgaggttcttgtattctctcactgtgataaattccttcgtctgtccttgcagcttatttcaaggtatacaacatggctttcatctggtttaacggcacgtaaagcttctgacgggagcccgaattcacctgcagatgctgaatgggcactgtctatacctatagaagatttcatatatataatgcatgatgtgcatgctgtaattggcgagctttcagaatcaggcagcttcattggacatgtgaatcagttactagggtcatgccccattgaagtatttaatcttgtgaaacaaagtatactgcaagctgttgaacctttaaaggaacggttgcctgcaataatcaatgttatgattggaatcatagttaagaagtctaacgaggacttgaagcacctgaaaggaataacagcgacatataggatgacgagtaaacttccagtcaggcattctccatatgtatcagggattttacatccgttgaaggtgtttcttgaaggggaccgaatacgctatctatcagaagatgataaaactaagttgtgtcgtgggtctacagataagattactgcaatttactatgacttggtctctgaagttgtcactgtggcaaggaaaaccgagtcttcgttgcaaagactgcgccaaggtgcacaaaggcgagtaggagctagtacagatgcctcagataacatcatatctgatacagacaagatctgtatgcagctatttcttgatattcaggagtacgcacgaaaccttcgtgcgataggaatagacgcgagagagattgattcctacagagctctatggcagtgtgttgccccaaaagacagacaagagaacattcagttttgatgtaaagaacactgtcagtacatatagagttgtctgcccgtagatctctcaaacatgtaggcgtatctgatgttgtccttttcggtttgaagtacttattatggatgcatacgtagagtagatagagagctggattttggtacacattttattgttaggatggatggtcacctccagatataatccagaactggagaacgtgtaccagtatatgattaaattttcatgtgaaatactaggatactgttgaaaatcgtgtgtcctcaagttgtcacgagcgtgaatcttagctctggctagttgtgaaattgattggtctctactgcagggttccctgcatgtctacatgatgttcatgtgtttgttcttaagccctgaccccattggcattacctcttgttactctcgtgcacaacagaacgtgtaattccagatggtggattactgtttttggttgctaaaattgatagctcgtaataaaataaaataaaaatcccagcgatttcaggattcttgtgagggaggatgttgatttaaggattctattctatggagaaacaaaccgcatgttgcaaaaacagctcaaactactgaacctcagcttctcaaagtcaagttctggcacgtcctgctaccacacagcatcacaacagggagaacacgatgggactacagctcatgtgaaaatgatacgatcggcactggttcatccaaatcttcaacggcacctatcagctgctgaaccagcagaagcatcagcaaccatgcaaggaagcatcagttcctgaaccaactgaagcatgagcaagcctgcaaggaagcagcagaacagtgaattcaacacggtcctataagaaaaggcgtttctttcaccatggtcaaattctagaataaaacaatggatagtcatagctacaatagcactaaaattttactgctaacaaagggtctatcatcagtatactaaacattgttgtgttccagttaagaacacactgctgaagtaagcatggggcaatgaaggctaatgccctgtttgtttggcttccaccgactaaattttagtatctatcacatcaaatgtttgaatgctagttagaagcattaaattacaaaactaattactaaagacgaatatattaaatctaattagttcatgattcgctcacatgatgcttaataaatttgtctagtatttagttgtgtaattagttttataaatacactacttgtaaaaggcattcaaacatccaaaccaaacagccctttataaaaccagcaatcatcggattaagtgattctgcagtgctctgaaaccaatggcagccattcatcaggatgtcaaaaatgcaagaaagataaaattgtataagaaacacctgcaaataaatgctttaggccaagaaaatagtttgaaccagcattatggcaacaagtctggagttgactcactgaagattcgtatttgcggccttggttggagcggctataaccaccacctgcgttgccgctggtgatgacaggagcatcgccggactgcttctcctccctcaccttgttaaatatgtcggtgaagccttcac

SEQ ID NO: 47197 - DNA, 3276 bp, Zea Mays
gcaaggacattttttcattgcttaaattgctgaggaaaatcgataaggaaaatgtgattggcgcatggtgaacatcactgtttcacacctacagaacctcccttttattgagaacatggagaagagggtccaaggtgctacaaaactgcttgatggtagcttggagcgctgctttgtggatggtctggaacaccgtgatgctaaagttatatacaactgtttgcgtgcttatgctgcaattgacaacacatcatcagccgaagagcttttccgtacagcagtggtgtctccattgattcagaaaataatccctcaaaattatgcaagagctgttgctggggcatcatctgatgagctggaagaggattatcaacaaataaaggaatgtgtacaaaaagattgtaaatttatattggaaatatcttcctcagaaaactctggattgcatgtttttgattttctgggtaattcaatactcaaagaagtcctttctacaatccagaaaggcaagcctggggccttttctcctggaaagcctaaagaattcttgaggaactacaaagcgagcttaggatttcttgattttcttgaaggttactgcatctccaagtctgctgtaacgaagttccgctctgagcttgcttacacagatttcatgcgacaatggaatgttggtgtctacttttcgttgcgatttcaggaaattgcgggcggccttgattctactcttacaaacacttttagtcctactggattgaatgaggctcaagggaaaccattgctcttgaagcaaagtattaagctcttagaaagtttggattcatgttggagtgatgaggttcttgtattctctcactgtgataaattccttcgtctgtccttgcagcttatttcaaggtatacaacatggctttcatctggtttaacggcacgtaaagcttctgacgggagcccgaattcacctgcagatgctgaatgggcactgtctatacctatagaagatttcatatatataatgcatgatgtgcatgctgtaattggcgagctttcagaatcaggcagcttcattggacatgtgaatcagttactagggtcatgccccattgaagtatttaatcttgtgaaacaaagtatactgcaagctgttgaacctttaaaggaacggttgcctgcaataatcaatgttatgattggaatcatagttaagaagtctaacgaggacttgaagcacctgaaaggaataacagcgacatataggatgacgagtaaacttccagtcaggcattctccatatgtatcagggattttacatccgttgaaggtgtttcttgaaggggaccgaatacgctatctatcagaagatgataaaactaagttgtgtcgtgggtctacagataagattactgcaatttactatgacttggtctctgaagttgtcactgtggcaaggaaaaccgagtcttcgttgcaaagactgcgccaaggtgcacaaaggcgagtaggagctagtacagatgcctcagataacatcatatctgatacagacaagatctgtatgcagctatttcttgatattcaggagtacgcacgaaaccttcgtgcgataggaatagacgcgagagagattgattcctacagagctctatggcagtgtgttgccccaaaagacagacaagagaacattcagttttgatgtaaagaacactgtcagtacatatagagttgtctgcccgtagatctctcaaacatgtaggcgtatctgatgttgtccttttcggtttgaagtacttattatggatgcatacgtagagtagatagagagctggattttggtacacattttattgttaggatggatggtcacctccagatataatccagaactggagaacgtgtaccagtatatgattaaattttcatgtgaaatactaggatactgttgaaaatcgtgtgtcctcaagttgtcacgagcgtgaatcttagctctggctagttgtgaaattgattggtctctactgcagggttccctgcatgtctacatgatgttcatgtgtttgttcttaagccctgaccccattggcattacctcttgttactctcgtgcacaacagaacgtgtaattccagatggtggattactgtttttggttgctaaaattgatagctcgtaataaaataaaataaaaatcccagcgatttcaggattcttgtgagggaggatgttgatttaaggattctattctatggagaaacaaaccgcatgttgcaaaaacagctcaaactactgaacctcagcttctcaaagtcaagttctggcacgtcctgctaccacacagcatcacaacagggagaacacgatgggactacagctcatgtgaaaatgatacgatcggcactggttcatccaaatcttcaacggcacctatcagctgctgaaccagcagaagcatcagcaaccatgcaaggaagcatcagttcctgaaccaactgaagcatgagcaagcctgcaaggaagcagcagaacagtgaattcaacacggtcctataagaaaaggcgtttctttcaccatggtcaaattctagaataaaacaatggatagtcatagctacaatagcactaaaattttactgctaacaaagggtctatcatcagtatactaaacattgttgtgttccagttaagaacacactgctgaagtaagcatggggcaatgaaggctaatgccctgtttgtttggcttccaccgactaaattttagtatctatcacatcaaatgtttgaatgctagttagaagcattaaattacaaaactaattactaaagacgaatatattaaatctaattagttcatgattcgctcacatgatgcttaataaatttgtctagtatttagttgtgtaattagttttataaatacactacttgtaaaaggcattcaaacatccaaaccaaacagccctttataaaaccagcaatcatcggattaagtgattctgcagtgctctgaaaccaatggcagccattcatcaggatgtcaaaaatgcaagaaagataaaattgtataagaaacacctgcaaataaatgctttaggccaagaaaatagtttgaaccagcattatggcaacaagtctggagttgactcactgaagattcgtatttgcggccttggttggagcggctataaccaccacctgcgttgccgctggtgatgacaggagcatcgccggactgcttctcctccctcaccttgttaaatatgtcggtgaagccttcac

SEQ ID NO: 47198 - DNA, 2350 bp, Zea Mays
tccaccttttgacatgtactggtgttggttcactggaaaaataactgcagtttgtactttgtagcccaatttgtggcaactgtgagataatgcatgatgtgcatgctgtaattggcgagctttcagaatcaggcagcttcattggacatgtgaatcagttactagggtcatgccccattgaagtatttaatcttgtgaaacaaagtatactgcaagctgttgaacctttaaaggaacggttgcctgcaataatcaatgttatgattggaatcatagttaagaagtctaacgaggacttgaagcacctgaaaggaataacagcgacatataggatgacgagtaaacttccagtcaggcattctccatatgtatcagggattttacatccgttgaaggtgtttcttgaaggggaccgaatacgctatctatcagaagatgataaaactaagttgtgtcgtgggtctacagataagattactgcaatttactatgacttggtctctgaagttgtcactgtggcaaggaaaaccgagtcttcgttgcaaagactgcgccaaggtgcacaaaggcgagtaggagctagtacagatgcctcagataacatcatatctgatacagacaagatctgtatgcagctatttcttgatattcaggagtacgcacgaaaccttcgtgcgataggaatagacgcgagagagattgattcctacagagctctatggcagtgtgttgccccaaaagacagacaagagaacattcagttttgatgtaaagaacactgtcagtacatatagagttgtctgcccgtagatctctcaaacatgtaggcgtatctgatgttgtccttttcggtttgaagtacttattatggatgcatacgtagagtagatagagagctggattttggtacacattttattgttaggatggatggtcacctccagatataatccagaactggagaacgtgtaccagtatatgattaaattttcatgtgaaatactaggatactgttgaaaatcgtgtgtcctcaagttgtcacgagcgtgaatcttagctctggctagttgtgaaattgattggtctctactgcagggttccctgcatgtctacatgatgttcatgtgtttgttcttaagccctgaccccattggcattacctcttgttactctcgtgcacaacagaacgtgtaattccagatggtggattactgtttttggttgctaaaattgatagctcgtaataaaataaaataaaaatcccagcgatttcaggattcttgtgagggaggatgttgatttaaggattctattctatggagaaacaaaccgcatgttgcaaaaacagctcaaactactgaacctcagcttctcaaagtcaagttctggcacgtcctgctaccacacagcatcacaacagggagaacacgatgggactacagctcatgtgaaaatgatacgatcggcactggttcatccaaatcttcaacggcacctatcagctgctgaaccagcagaagcatcagcaaccatgcaaggaagcatcagttcctgaaccaactgaagcatgagcaagcctgcaaggaagcagcagaacagtgaattcaacacggtcctataagaaaaggcgtttctttcaccatggtcaaattctagaataaaacaatggatagtcatagctacaatagcactaaaattttactgctaacaaagggtctatcatcagtatactaaacattgttgtgttccagttaagaacacactgctgaagtaagcatggggcaatgaaggctaatgccctgtttgtttggcttccaccgactaaattttagtatctatcacatcaaatgtttgaatgctagttagaagcattaaattacaaaactaattactaaagacgaatatattaaatctaattagttcatgattcgctcacatgatgcttaataaatttgtctagtatttagttgtgtaattagttttataaatacactacttgtaaaaggcattcaaacatccaaaccaaacagccctttataaaaccagcaatcatcggattaagtgattctgcagtgctctgaaaccaatggcagccattcatcaggatgtcaaaaatgcaagaaagataaaattgtataagaaacacctgcaaataaatgctttaggccaagaaaatagtttgaaccagcattatggcaacaagtctggagttgactcactgaagattcgtatttgcggccttggttggagcggctataaccaccacctgcgttgccgctggtgatgacaggagcatcgccggactgcttctcctccctcaccttgttaaatatgtcggtgaagccttcac

SEQ ID NO: 47199 - DNA, 551 bp, Zea Mays
tttatttttctttttgttcacagcaagcagccttttcacatgacagtacaaagcacaaaatattttggcagacagtataaccaaacacacttttagtgcgagagctattttagtcgaaggctcccacgtatatgaggtctaggattaaacgaccaaagccagccagcttaaacagtttgcaacacgcaacagaatatcagcgagctgatcgatgccaaagtgtcaaatggtggtgttattattggtagttcaaaactcagcaagcagtttgataaacaaaacaactcagcaatgtgacacgacactatatatctatgagagaacagaacctcaacatcaacgccgccgttggatagaataaaattacaaacctcaaccgccacatcagcatctatgtaagctagctagagtttgttatatacacagggaaggtgaggaggaggagggtcaggtgccagcagcagctcaaatccatccgactactagtataaatgaagaatctcaagtcttccctctcctctcctgtcctctcccccaccgcacccgctctt

SEQ ID NO: 47200 - DNA, 360 bp, Zea Mays
catcagcctcagccgctgaactgggcttccttgatttagtgccacctcggtcgaacagccagtcctcaccttcctgcccaggcaattccatcatttgaggtgcttcaggaacgctgtatatctggctaagatacttgcagtcggggtgaggcgacttcctagaagttatgccattctcataggcagccaccggatcgactgaagctcgctcagcctgttggttgccattcatcttctcttccttgtgcagcctttcagccttttcaatattattgataatggcttctggcttcacagaagagagtggcgcggctacatgagatgctgtaccattctccacaagattgatggggagggctg

SEQ ID NO: 47201 - DNA, 510 bp, Zea Mays
agctagatgttgccacagatgtttatcctatgcatgctggcgagaaatttaacatggttatagcgcctactctgaatttggatggcaccccagatactggctactatactcaggctggcagaaaaactctggcagacaattatgagtacgtcatgcaagggaagctttacaaaatctcagaagacacatcatccagccaaaacgctaaagtggagatgtatgcatcgttcggcgggcttcttatgctgctcaggggtgacccttccactgccgctagctttgagcttgatcagaggctctttctgctcatccgcaaggtgtaaaactgtggttgctgaccacttaggtgtttgccttgctcgccacttatttaatttccatccgtgggtgaagctgttatatactgttgtaagtactgttttctgtatcgccatggatttatggtaacgagttcatgtttcttgctaaaaagattgctccagcagattcccctatcttatttgtagaaac

SEQ ID NO: 47202 - DNA, 1397 bp, Zea Mays
aacgaagaaccgaatgcccagtcctgaatcacgtcttcacccgtgctcgtgcgctgcgcccatcccttccgcctccacgctccccacgtgcaccgtgcacagcaccacacagccaggtccccatggcggcggcggcggcggttgcgtctgcgacgacggcggaagacgaagcgcgcctgctgcgcctggaggagcaggcggagcacggcggcggcggcgcctgggaatacctctgcctcgcccgccggctccgcgcccgccgccccgctcacgtcctccgcgtcggcctcgccctcctcaacaacgcctccgcgcgctccggccttgcctcagaacagtggacgctctacgagcaggtggccacggcggccatggattgccagcgtctcgatgtggcaaaggactgtattggagtcctttcaaaacaatttcctgggagcacacgggttgcccggctagaagctcgtctgtttgaagcaaaaggtgaatgggctgaagctgaaagagcctacgcgctaatcctggaaaacaatccatttgaccagattgtccacaagaggaaaattgctatcgcaaaagcacaaggtggtatgtcgatagtgattgattatctcaataagtatctggaattgtttatggctgatcatgatgcttggagagaacttgctgaaacatacagttccttacaaatgtacaagcaagctgccttttgttatgaggagctaatattagcccaaccaactattccactatatcatatagcctacgctgaggttctgtacactatgggtggcttggaaaatctccaaacagctaagaagtattatgcatcaacaatccagttaactggaggcaagaatacaagagccctctttggttgtacttcggcaatcaatcagttgacgaaaggaaggaataaagaggaagaggactcggagctgcagagcttggctgcagaggtactgctgaagaattacaagcagcaggctccatcaaaggcgccccttatcagcagcatgttgaagaacatgaaactcagctgataccaaccagctccacacattcagagtggcctgatttgatagatagttaagttaaattgatgtggcttaatatatgcttgtttttttatatataaaaaaattgtggcaccaacattgtgcaaggcttaaaagtagatgctcccaaggccatgggttgtacaacacctgcttgcttacctcgaaatatgcatggcttcttcagtggatgttctactatatagatcaacaaacccccgattgtacttgagcacaaacaaaattttgaatcagtcgctggtgaagttgtacgtgttgattttcattggtacctgactattgtggtcttttagatgaacccttggcttggaacgtttt

SEQ ID NO: 47203 - DNA, 1018 bp, Zea Mays
tgtctcatccccgaaaaatacacctggcaagtacaatcgaaggcatcaaacgaactttatagcccggctagaagctcgtctgtttgaagcaaaaggtgaatgggctgaagctgaaagagcctacgcgctaatcctggaaaacaatccatttgaccagattgtccacaagaggaaaattgctatcgcaaaagcacaaggtggtatgtcgatagtgattgattatctcaataagtatctggaattgtttatggctgatcatgatgcttggagagaacttgctgaaacatacagttccttacaaatgtacaagcaagctgccttttgttatgaggagctaatattagcccaaccaactattccactatatcatatagcctacgctgaggttctgtacactatgggtggcttggaaaatctccaaacagctaagaagtattatgcatcaacaatccagttaactggaggcaagaatacaagagccctctttggtgtatgtctgtgtacttcggcaatcaatcagttgacgaaaggaaggaataaagaggaagaggactcggagctgcagagcttggctgcagaggtactgctgaagaattacaagcagcaggctccatcaaaggcgccccttatcagcagcatgttgaagaacatgaaactcagctgataccaaccagctccacacattcagagtggcctgatttgatagatagttaagttaaattgatgtggcttaatatatgcttgtttttttatatataaaaaaattgtggcaccaacattgtgcaaggcttaaaagtagatgctcccaaggccatgggttgtacaacacctgcttgcttacctcgaaatatgcatggcttcttcagtggatgttctactatatagatcaacaaacccccgattgtacttgagcacaaacaaaattttgaatcagtcgctggtgaagttgtacgtgttgattttcattggtacctgactattgtggtcttttagatgaacccttggcttggaacgtttt

SEQ ID NO: 47204 - DNA, 1591 bp, Zea Mays
ctttgctgtgtcgtgtcgtgtgctgccccacttgcagttggactcgccgccgctcgcttgctgtggcctgtgtccgagccggcctaccccgcctctgaacaccgcctcgccgcccgcgtgcgcccccctccaactcctatggccgcgccctcccacctccacctccacctcccgggctgcccccaaaccctagccctgcccctgccctccccggggggtttctccgcttggcccggcctccgctcctgctcccgctcccgccagccccgcatccgcccggtcgccgcgctcggacccgccgacgccggcgacctgctcggccgcgttgaggcgttcctctacaccgttgcggacgccgccgttaacgcggagcccgtcgcggcagccgcggacaccgggaccaaggaggccgccgccggggactggctctccggcatcaccaactccatggagaccgtgctcaaggttctgaaagatggtctatcagctctccatgttccttattcatatggctttgcaatcattctcctcactgttcttgtcaaggcagctacatttcctctaacaaagaagcaggttgagtctgcacttgcaatgaggtcactgcaacctcaagtgaaggccattcaacaacgatatgctggtgatcaggaaaggatacaacttgaaactgctcgcttatacaagttatctggtgttgacccacttgcaggatgcttgcctacccttgtgacaataccagtttggattggtctatacagagctctctcaaatgtagctaatgagggacttctgactgaaggctttttttggataccttctctggctggtcctacaacaattgctgctcgacaaaacggccaggggatatcatggctttttccttttactgatggccatccacctcttggctggtcagatactttggcatacattgtgttaccagttcttcttgtcatttcacagtacatatctactcaagtaatgcagccaccacagagcaatgatcctaaccaacaaggtgctcaggctgtaacaaagttcttaccattgctaattggttattttgctctttccgtgccttcaggactaaggctgtactggcttacaaataatatcctcagtactgcacaacaagtgtggcttcaaaagcttggaggtgcaaaaaatcctgtcaaagaatatattgacaagctttcaagagaagaaacgactactgttcagaagaatgattctactgttcagagtgaacctctctctaaacatagtaaaccccagcctagccaagagccgaaaccaagtgggccacaacgtggtgaaagatttaggaaactgaaggaggaagaatctatgagaaaagaggttatgggacaaggtaaacaatcagaacagtcaagttctgaatctagagtcacggatggaacacaaaattcggatgtgtcttctggagaccaaaaagaccaacaggggtctcatgaaaatggaccggttgtagctagtataaatggtggagtcaaccatattcgaaatgaaaagactcagaacttatcctcagaaaagctgaagattgacgggataagggtagagagag

SEQ ID NO: 47205 - DNA, 2011 bp, Zea Mays
gtgtcgtgtcgtgtgctgccccacttgcagttggactcgccgccgctcgcttgctgtggcctgtgtccgagccggcctaccccgcctctgaacaccgcctcgccgcccgcgtgcgcccccctccaactcctatggccgcgccctcccacctccacctccacctcccgggctgcccccaaaccctagccctgcccctgccctccccggggggtttctccgcttggcccggcctccgctcctgctcccgctcccgccagccccgcatccgcccggtcgccgcgctcggacccgccgacgccggcgacctgctcggccgcgttgaggcgttcctctacaccgttgcggacgccgccgttaacgcggagcccgtcgcggcagccgcggacaccgggaccaaggaggccgccgccggggactggctctccggcatcaccaactccatggagaccgtgctcaaggttctgaaagatggtctatcagctctccatgttccttattcatatggctttgcaatcattctcctcactgttcttgtcaaggcagctacatttcctctaacaaagaagcaggttgagtctgcacttgcaatgaggtcactgcaacctcaagtgaaggccattcaacaacgatatgctggtgatcaggttagctctgaattaccatgcacgatgtttttcctatcagtggatgctcctcaatcctcactggatagcaagtcttattagaaagtcttgtcatttgggatgcttgcctacccttgtgacaataccagtttggattggtctatacagagctctctcaaatgtagctaatgagggacttctgactgaaggctttttttggataccttctctggctggtcctacaacaattgctgctcgacaaaacggccaggggatatcatggctttttccttttactgatggccatccacctcttggctggtcagatactttggcatacattgtgttaccagttcttcttgtcatttcacagtacatatctactcaagtaatgcagccaccacagagcaatgatcctaaccaacaaggtgctcaggctgtaacaaagttcttaccattgctaattggttattttgctctttccgtgccttcaggactaaggctgtactggcttacaaataatatcctcagtactgcacaacaagtgtggcttcaaaagcttggaggtgcaaaaaatcctgtcaaagaatatattgacaagctttcaagagaagaaacgactactgttcagaagaatgattctactgttcagagtgaacctctctctaaacatagtaaaccccagcctagccaagagccgaaaccaagtgggccacaacgtggtgaaagatttaggaaactgaaggaggaagaatctatgagaaaagaggttatgggacaaggtaaacaatcagaacagtcaagttctgaatctagagtcacggatggaacacaaaattcggatgtgtcttctggagaccaaaaagaccaacaggggtctcatgaaaatggaccggttgtagctagtataaatggtggagtcaaccatattcgaaatgaaaagactcagaacttatcctcagaaaaggaagcagctgacgatcactcacctgatgtccacaaattaacggaccgagagaatggcaatgacgcggtatagagtggatgttagcgatctactgctctctgaagatcagtgagtatcgtatctgcttcatcgacgtatagctgggagatagtgaccaacagtttcacgaacagctactacaggagagttgagaatcaacacgaagaagatgcaaacaggaggcaaaattgtgcaaaccatggtctaggtctaggctcatttatttatttttgtggctgtgctttaggttatgtgaagcatatggcatatatatatatatatatatatatatatatatatatatatatatatattagtagataaatgtacacctggttttgaccgtgcaattcgatattttacctcatgtaaataaataaaa

SEQ ID NO: 47206 - DNA, 2192 bp, Zea Mays
gtcgtgtgctgccccacttgcagttggactcgccgccgctcgcttgctgtggcctgtgtccgagccggcctaccccgcctctgaacaccgcctcgccgcccgcgtgcgcccccctccaactcctatggccgcgccctcccacctccacctccacctcccgggctgcccccaaaccctagccctgcccctgccctccccggggggtttctccgcttggcccggcctccgctcctgctcccgctcccgccagccccgcatccgcccggtcgccgcgctcggacccgccgacgccggcgacctgctcggccgcgttgaggcgttcctctacaccgttgcggacgccgccgttaacgcggagcccgtcgcggcagccgcggacaccgggaccaaggaggccgccgccggggactggctctccggcatcaccaactccatggagaccgtgctcaaggttctgaaagatggtctatcagctctccatgttccttattcatatggctttgcaatcattctcctcactgttcttgtcaaggcagctacatttcctctaacaaagaagcaggttgagtctgcacttgcaatgaggtcactgcaacctcaagtgaaggccattcaacaacgatatgctggtgatcaggaaaggatacaacttgaaactgctcgcttatacaagttatctggtgttgacccacttgcaggatgcttgcctacccttgtgacaataccagtttggattggtctatacagagctctctcaaatgtagctaatgagggacttctgactgaaggctttttttggataccttctctggctggtcctacaacaattgctgctcgacaaaacggccaggggatatcatggctttttccttttactgatggccatccacctcttggctggtcagatactttggcatacattgtgttaccagttcttcttgtcatttcacagtacatatctactcaagtaatgcagccaccacagagcaatgatcctaaccaacaaggtgctcaggctgtaacaaagttcttaccattgctaattggttattttgctctttccgtgccttcaggactaaggctgtactggcttacaaataatatcctcagtactgcacaacaagtgtggcttcaaaagcttggaggtgcaaaaaatcctgtcaaagaatatattgacaagctttcaagagaagaaacgactactgttcagaagaatgattctactgttcagagtgaacctctctctaaacatagtaaaccccagcctagccaagagccgaaaccaagtgggccacaacgtggtgaaagatttaggaaactgaaggaggaagaatctatgagaaaagaggttatgggacaaggtaaacaatcagaacagtcaagttctgaatctagagtcacggatggaacacaaaattcggatgtgtcttctggagaccaaaaagaccaacaggggtctcatgaaaatggaccggttgtagctagtataaatggtggagtcaaccatattcgaaatgaaaagactcagaacttatcctcagaaaaggaagcagctgacgatcactcacctgatgtccacaaattaacggaccgagagaatggcaatgacgcggtatagagtggatgttagcgatctactgctctctgaagatcaaataatcccagtggggtgcacggagatcacacagtcacagatgtaggacaccgggcatgaggtgaggacgtcgtcacctgggacatggacaggacggtggcggcgccgcctactgctgcccggcgttctaggatctgctggacatggacaggacggtggcggtgatgccatttgtcaggcataattgaattggagctaagcatctacaacgatgagtttgcatgtcccatgcaacgatgctatgcttgctcacatgaattgtacacaacaatctcaggctcaagaacatgattcatttgcatgctctcgactagcagtgtttctacccaccggctaccgccaatttcgcctacagaaacagacacgagataccgaagactgcagatcgccaaaagacgatgccaaatggcttctcgatcatttgtaaatttgcccagcttaatatacctcgtatactatatacaactcaatcctgtacaatgtttcatgaacacctagaaattcgagatcccaaacttggaaactaacaaagtgaaac

SEQ ID NO: 47207 - DNA, 2324 bp, Zea Mays
tcgtgtgctgccccacttgcagttggactcgccgccgctcgcttgctgtggcctgtgtccgagccggcctaccccgcctctgaacaccgcctcgccgcccgcgtgcgcccccctccaactcctatggccgcgccctcccacctccacctccacctcccgggctgcccccaaaccctagccctgcccctgccctccccggggggtttctccgcttggcccggcctccgctcctgctcccgctcccgccagccccgcatccgcccggtcgccgcgctcggacccgccgacgccggcgacctgctcggccgcgttgaggcgttcctctacaccgttgcggacgccgccgttaacgcggagcccgtcgcggcagccgcggacaccgggaccaaggaggccgccgccggggactggctctccggcatcaccaactccatggagaccgtgctcaaggttctgaaagatggtctatcagctctccatgttccttattcatatggctttgcaatcattctcctcactgttcttgtcaaggcagctacatttcctctaacaaagaagcaggttgagtctgcacttgcaatgaggtcactgcaacctcaagtgaaggccattcaacaacgatatgctggtgatcaggaaaggatacaacttgaaactgctcgcttatacaagttatctggtgttgacccacttgcaggatgcttgcctacccttgtgacaataccagtttggattggtctatacagagctctctcaaatgtagctaatgagggacttctgactgaaggctttttttggataccttctctggctggtcctacaacaattgctgctcgacaaaacggccaggggatatcatggctttttccttttactgatggccatccacctcttggctggtcagatactttggcatacattgtgttaccagttcttcttgtcatttcacagtacatatctactcaagtaatgcagccaccacagagcaatgatcctaaccaacaaggtgctcaggctgtaacaaagttcttaccattgctaattggttattttgctctttccgtgccttcaggactaaggctgtactggcttacaaataatatcctcagtactgcacaacaagtgtggcttcaaaagcttggaggtgcaaaaaatcctgtcaaagaatatattgacaagctttcaagagaagaaacgactactgttcagaagaatgattctactgttcagagtgaacctctctctaaacatagtaaaccccagcctagccaagagccgaaaccaagtgggccacaacgtggtgaaagatttaggaaactgaaggaggaagaatctatgagaaaagaggttatgggacaaggtaaacaatcagaacagtcaagttctgaatctagagtcacggatggaacacaaaattcggatgtgtcttctggagaccaaaaagaccaacaggggtctcatgaaaatggaccggttgtagctagtataaatggtggagtcaaccatattcgaaatgaaaagactcagaacttatcctcagaaaaggaagcagctgacgatcactcacctgatgtccacaaattaacggaccgagagaatggcaatgacgcggtatagagtggatgttagcgatctactgctctctgaagatcagtgagtatcgtatctgcttcatcgacgtatagctgggagatagtgaccaacagtttcacgaacagctactacaggagagttgagaatcaacacgaagaagatgcaaacaggaggcaaaattgtgcaaaccatgaataatcccagtggggtgcacggagatcacacagtcacagatgtaggacaccgggcatgaggtgaggacgtcgtcacctgggacatggacaggacggtggcggcgccgcctactgctgcccggcgttctaggatctgctggacatggacaggacggtggcggtgatgccatttgtcaggcataattgaattggagctaagcatctacaacgatgagtttgcatgtcccatgcaacgatgctatgcttgctcacatgaattgtacacaacaatctcaggctcaagaacatgattcatttgcatgctctcgactagcagtgtttctacccaccggctaccgccaatttcgcctacagaaacagacacgagataccgaagactgcagatcgccaaaagacgatgccaaatggcttctcgatcatttgtaaatttgcccagcttaatatacctcgtatactatatacaactcaatcctgtacaatgtttcatgaacacctagaaattcgagatcccaaacttggaaactaacaaagtgaaac

SEQ ID NO: 47208 - DNA, 1126 bp, Zea Mays
cacatgcatcccagccttcaatattttagcaatgatcctaaccaacaaggtgctcaggctgtaacaaagttcttaccattgctaattggttattttgctctttccgtgccttcaggactaaggctgtactggcttacaaataatatcctcagtactgcacaacaagtgtggcttcaaaagcttggaggtgcaaaaaatcctgtcaaagaatatattgacaagctttcaagagaagaaacgactactgttcagaagaatgattctactgttcagagtgaacctctctctaaacatagtaaaccccagcctagccaagagccgaaaccaagtgggccacaacgtggtgaaagatttaggaaactgaaggaggaagaatctatgagaaaagaggttatgggacaaggtaaacaatcagaacagtcaagttctgaatctagagtcacggatggaacacaaaattcggatgtgtcttctggagaccaaaaagaccaacaggggtctcatgaaaatggaccggttgtagctagtataaatggtggagtcaaccatattcgaaatgaaaagactcagaacttatcctcagaaaagaataatcccagtggggtgcacggagatcacacagtcacagatgtaggacaccgggcatgaggtgaggacgtcgtcacctgggacatggacaggacggtggcggcgccgcctactgctgcccggcgttctaggatctgctggacatggacaggacggtggcggtgatgccatttgtcaggcataattgaattggagctaagcatctacaacgatgagtttgcatgtcccatgcaacgatgctatgcttgctcacatgaattgtacacaacaatctcaggctcaagaacatgattcatttgcatgctctcgactagcagtgtttctacccaccggctaccgccaatttcgcctacagaaacagacacgagataccgaagactgcagatcgccaaaagacgatgccaaatggcttctcgatcatttgtaaatttgcccagcttaatatacctcgtatactatatacaactcaatcctgtacaatgtttcatgaacacctagaaattcgagatcccaaacttggaaactaacaaagtgaaac

SEQ ID NO: 47209 - DNA, 303 bp, Zea Mays
tcgttgtgaagcatagacttgttggacataatatatatctgctcaagtacaatgaggcaaggtgacacgcttcggcattgctctctgcattcttcacaagatccaacaccgcaacagtacctacagatgatcttccagattacatatttacatggactggccgacatctcatgttgtttacatggactggcaacagaatgcgcctatgcaatgtacagaatgctgaactatcgctgtcgtctacgctctatgggagggtgtaacaggctcactggaaaactgctcagtatcagcactcaatag

SEQ ID NO: 47210 - DNA, 2335 bp, Zea Mays
agccggtccagcccacagtccacgaggacacgatccccgacctcatatcaggttcccctccccatcccggagagcaaaagcgcttctctcgctagcgagttcggcagtagaaaccctaaaaaaagacaccgccctccccttcgctagcggaaccgccctcccctcgccggggtaggggtttcgggggtagacgcccgccatggacgcgttccggaaacagctggacgtgctcatgggcgccaaccgcaacggcgacgtcgaggaggtgagccgcaactactacgaccgcgacgtctgccgcctcttcctcgccggtctctgcccacacgacctctttcagctcacgaaaatggatctcggtccttgttctaagattcactctcttcaactgcggaaagattatgaagaagcgaaagcaaagggaacagaaaattttgatagagaactcgaggatatgatagaaaggctcattgtggagtgtgacaggaaaattcagagggccctaaaacggcttgcagatgatgatgccaatgctgctattgcgatatcggtctctgagacggatgacatactgcagctgtcaaaacagataaaggagaaaatggcagaagttgatgcctttgattttgaagggagaactgatgacaaaataaaggcccaggaagtagtggaagagctaagagctaaaagagctgatatgcaggctaccctcttgcttgatgcttttaacaaggacagagcttcattaactcagcctgctccacctcaagtggcagcagttccaccaccagctccacctgatgctcgtactcaagaaattatcaacgaaaagcttaagaaagctgaagagcttggtgaacaaggcatggttgatgaagctcaaaaagctttggaagaggcagaagctctgaaaaagctggcgccacgttcagagccaccttcagacccttcgaaatatactgctgctgatgttcgaattactgatcaaaaattacgcctctgtgacatatgtggagcatttctgagtgtatatgacaatgatcgacgtcttgctgaccattttggtgggaaattacacctaggctacatgctgattcgtgagaaacagaaagaacttcaggtgctgaatgtaatgtaccattttctgctttaaagagttactctgttttggcccttttggcatatgaattagtccatgttgcgtgattggaatctcatgcgatcatcttcatacccatggatacaacagtcactgtctgttggcaaatgtaagcataggagggtgcagaccatggtatgaaaaaaaacatgtttacttaattgtgacgaactgctcatgtgtctgcttagtattatgttgggcagaagccggaggtttcttttctactgcctgagccatattatgtagaccaggtgataaataatactggttaagttatcctgaaagctttgccaacatttgctgtaagtgacaacttgttctattttttatctgctacctccataagtttgcaagttaaactttgctgaagcagccttgcctgtaaagtatgactcccctttctcttggaacgttgtcgctgacttcatgtatggcaaaatatcatcatttctactgtcaataaataaaatacactatgccaccttgcaggagcagagaaataaaaggagaccgggcaaagctgaagatgatagacgatcaagagagcacagcaaggatcgcaacggccggtcgtccagggatagagaaccagaaaggagagacagggttgagtctcgagatggtagaagagattatgaaagggatcgtgatagacgtcatgatagggacaggcgccatgaccgtgatcgggatagggattatgaccgctcccgtggacatgattcaaggaggagagagcgttcacgctccagggagcgcagcaggcgccacgagagatactaaatgttacaccatgcctgacagatttaggagtactggcggcgtctgttcaagatatggtttgagcttgtgcttcgtatcttctgaagaccggtctacttgacgctaaattcgcatggagtgttaagcatttattaaacgcatctggaatcaaatgaagttgtacttgcgaacggcttcacttaaaattcgcgccatttctaatattgtaataagctgtgcttgaaccttagctgtctctgtgtactcgacgtaccactcgctcccacaaatagcttcgaacatcctgtacctgaaacatgacgctgtttggtggaggtggagctgtaagtgttcttttgcacaattcattataaaaatcccaaatctgagtactaggaaatttttagtgag

SEQ ID NO: 47211 - DNA, 2304 bp, Zea Mays
agccggtccagcccacagtccacgaggacacgatccccgacctcatatcaggttcccctccccatcccggagagcaaaagcgcttctctcgctagcgagttcggcagtagaaaccctaaaaaaagacaccgccctccccttcgctagcggaaccgccctcccctcgccggggtaggggtttcgggggtagacgcccgccatggacgcgttccggaaacagctggacgtgctcatgggcgccaaccgcaacggcgacgtcgaggaggtgagccgcaactactacgaccgcgacgtctgccgcctcttcctcgccggtctctgcccacacgacctctttcagctcacgaaaatggatctcggtccttgttctaagattcactctcttcaactgcggaaagattatgaagaagcgaaagcaaagggaacagaaaattttgatagagaactcgaggatatgatagaaaggctcattgtggagtgtgacaggaaaattcagagggccctaaaacggcttgcagatgatgatgccaatgctgctattgcgatatcggtctctgaggttactctgacggatgacatactgcagctgtcaaaacagataaaggagaaaatggcagaagttgatgcctttgattttgaagggagaactgatgacaaaataaaggcccaggaagtagtggaagagctaagagctaaaagagctgatatgcaggctaccctcttgcttgatgcttttaacaaggacagagcttcattaactcagcctgctccacctcaagtggcagcagttccaccaccagctccacctgatgctcgtactcaagaaattatcaacgaaaagcttaagaaagctgaagagcttggtgaacaaggcatggttgatgaagctcaaaaagctttggaagaggcagaagctctgaaaaagctggcgccacgttcagagccaccttcagacccttcgaaatatactgctgctgatgttcgaattactgatcaaaaattacgcctctgtgacatatgtggagcatttctgagtgtatatgacaatgatcgacgtcttgctgaccattttggtgggaaattacacctaggctacatgctgattcgtgagaaacagaaagaacttcaggtgctgaatgtaatgtaccattttctgctttaaagagttactctgttttggcccttttggcatatgaattagtccatgttgcgtgattggaatctcatgcgatcatcttcatacccatggatacaacagtcactgtctgttggcaaatgtaagcataggagggtgcagaccatggtatgaaaaaaaacatgtttacttaattgtgacgaactgctcatgtgtctgcttagtattatgttgggcagaagccggaggtttcttttctactgcctgagccatattatgtagaccaggtgataaataatactggttaagttatcctgaaagctttgccaacatttgctgtaagtgacaacttgttctattttttatctgctacctccataagtttgcaagttaaactttgctgaagcagccttgcctgtaaagtatgactcccctttctcttggaacgttgtcgctgacttcatgtatggcaaaatatcatcatttctactgtcaataaataaaatacactatgccaccttgcaggagcagagaaataaaaggagaccgggcaaagctgaagatgatagacgatcaagagagcacagcaaggatcgcaacggccggtcgtccagggatagagaaccagaaaggagagacagggttgagtctcgagatggtagaagagattatgaaagggatcgtgatagacgtcatgatagggacaggcgccatgaccgtgatcgggatagggattatgaccgctcccgtggacatgattcaaggaggagagagcgttcacgctccagggagcgcagcagatttaggagtactggcggcgtctgttcaagatatggtttgagcttgtgcttcgtatcttctgaagaccggtctacttgacgctaaattcgcatggagtgttaagcatttattaaacgcatctggaatcaaatgaagttgtacttgcgaacggcttcacttaaaattcgcgccatttctaatattgtaataagctgtgcttgaaccttagctgtctctgtgtactcgacgtaccactcgctcccacaaatagcttcgaacatcctgtacctgaaacatgacgctgtttggtggaggtggagctgtaagtgttcttttgcacaattcattataaaaatcccaaatctgagtactaggaaatttttagtgag

SEQ ID NO: 47212 - DNA, 2320 bp, Zea Mays
agccggtccagcccacagtccacgaggacacgatccccgacctcatatcaggttcccctccccatcccggagagcaaaagcgcttctctcgctagcgagttcggcagtagaaaccctaaaaaaagacaccgccctccccttcgctagcggaaccgccctcccctcgccggggtaggggtttcgggggtagacgcccgccatggacgcgttccggaaacagctggacgtgctcatgggcgccaaccgcaacggcgacgtcgaggaggtgagccgcaactactacgaccgcgacgtctgccgcctcttcctcgccggtctctgcccacacgacctctttcagctcacgaaaatggatctcggtccttgttctaagattcactctcttcaactgcggaaagattatgaagaagcgaaagcaaagggaacagaaaattttgatagagaactcgaggatatgatagaaaggctcattgtggagtgtgacaggaaaattcagagggccctaaaacggcttgcagatgatgatgccaatgctgctattgcgatatcggtctctgaggttactctgacggatgacatactgcagctgtcaaaacagataaaggagaaaatggcagaagttgatgcctttgattttgaagggagaactgatgacaaaataaaggcccaggaagtagtggaagagctaagagctaaaagagctgatatgcaggctaccctcttgcttgatgcttttaacaaggacagagcttcattaactcagcctgctccacctcaagtggcagcagttccaccaccagctccacctgatgctcgtactcaagaaattatcaacgaaaagcttaagaaagctgaagagcttggtgaacaaggcatggttgatgaagctcaaaaagctttggaagaggcagaagctctgaaaaagctggcgccacgttcagagccaccttcagacccttcgaaatatactgctgctgatgttcgaattactgatcaaaaattacgcctctgtgacatatgtggagcatttctgagtgtatatgacaatgatcgacgtcttgctgaccattttggtgggaaattacacctaggctacatgctgattcgtgagaaacagaaagaacttcaggagcagagaaataaaaggagaccgggcaaagctgaagatgatagacgatcaagagagcacagcaaggatcgcaacggccggtcgtccagggatagagaaccagaaaggagagacagggttgagtctcgagatggtagaagagattatgaaagggatcgtgatagacgtcatgatagggacaggcgccatgaccgtgatcgggatagggattatgaccgctcccgtggacatgattcaaggaggagagagcgttcacgctccagggagcgcagcaggcgccacgagagatactaaatgttacaccatgcctgacagatttaggagtactggcggcgtctgttcaagatatggtttgagcttgtgcttcgtatcttctgaagaccggtctacttgacgctaaattcgcatggagtgttaagcatttattaaacgcatctggaatcaaatgaagttgtacttgcgaacggcttcacttaaaattcgcgccatttctaatattgtaataagctgtgcttgaaccttagctgtctctgtgtactcgacgtaccactcgctcccacaaatagcttcgaacatcctgtacctgaaacatgacgctgtttggtggaggtggagctgagaattcaactccgaagaaagatgtttatcaattgttcgctgagaaggttagggataacaaacagctggaatcaagatgggcaatcatgcaagaaacccgtgtggagtattttcgtggaaaagatttcaatgccttcatcaagaattatccagaagtcagggaaattttggggccagataaggatttagaagtggaagacattgttaacactttgttgaccaagaaccttgtgataaggtgtgaccgagttatgaaaactgtgaggcctggcaagaaaaagttatcatcatggcctgctcacttggagatacataatgaacaagtgtttactgaaaatgatgggttttatgcttggatgtttctgaaaaggcggaccttgtggcagacagttctttcatttgtttggcctctttttgcactggcagtctgcttatttccagtttacccataccaatgcaagattgttgtactgtactcatgtgctggagctctacttttcattgtctccattcttttgctaagagctgccatctttggcatcttatgggttctccttgggaaacgcggtggtg

SEQ ID NO: 47213 - DNA, 2798 bp, Zea Mays
agccggtccagcccacagtccacgaggacacgatccccgacctcatatcaggttcccctccccatcccggagagcaaaagcgcttctctcgctagcgagttcggcagtagaaaccctaaaaaaagacaccgccctccccttcgctagcggaaccgccctcccctcgccggggtaggggtttcgggggtagacgcccgccatggacgcgttccggaaacagctggacgtgctcatgggcgccaaccgcaacggcgacgtcgaggaggtgagccgcaactactacgaccgcgacgtctgccgcctcttcctcgccggtctctgcccacacgacctctttcagctcacgaaaatggatctcggtccttgttctaagattcactctcttcaactgcggaaagattatgaagaagcgaaagcaaagggaacagaaaattttgatagagaactcgaggatatgatagaaaggctcattgtggagtgtgacaggaaaattcagagggccctaaaacggcttgcagatgatgatgccaatgctgctattgcgatatcggtctctgaggttactctgacggatgacatactgcagctgtcaaaacagataaaggagaaaatggcagaagttgatgcctttgattttgaagggagaactgatgacaaaataaaggcccaggaagtagtggaagagctaagagctaaaagagctgatatgcaggctaccctcttgcttgatgcttttaacaaggacagagcttcattaactcagcctgctccacctcaagtggcagcagttccaccaccagctccacctgatgctcgtactcaagaaattatcaacgaaaagcttaagaaagctgaagagcttggtgaacaaggcatggttgatgaagctcaaaaagctttggaagaggcagaagctctgaaaaagctggcgccacgttcagagccaccttcagacccttcgaaatatactgctgctgatgttcgaattactgatcaaaaattacgcctctgtgacatatgtggagcatttctgagtgtatatgacaatgatcgacgtcttgctgaccattttggtgggaaattacacctaggctacatgctgattcgtgagaaacagaaagaacttcaggtgctgaatgtaatgtaccattttctgctttaaagagttactctgttttggcccttttggcatatgtgagttttcttatctcaagagcctcaaggaattagtccatgttgcgtgattggaatctcatgcgatcatcttcatacccatggatacaacagtcactgtctgttggcaaattattatgttgggcagaagccggaggtttcttttctactgcctgagccatattatgtagaccaggtgataaataatactggttaagttatcctgaaagctttgccaacatttgctgtaagtgacaacttgttctattttttatctgctacctccataagtttgcaagttaaactttgctgaagcagccttgcctgtaaagtatgactcccctttctcttggaacgttgtcgctgacttcatgtatggcaaaatatcatcatttctactgtcaataaataaaatacactatgccaccttgcaggagcagagaaataaaaggagaccgggcaaagctgaagatgatagacgatcaagagagcacagcaaggatcgcaacggccggtcgtccagggatagagaaccagaaaggagagacagggttgagtctcgagatggtagaagagattatgaaagggatcgtgatagacgtcatgatagggacaggcgccatgaccgtgatcgggatagggattatgaccgctcccgtggacatgattcaaggaggagagagcgttcacgctccagggagcgcagcaggcgccacgagagatactaaatgttacaccatgcctgacagatttaggagtactggcggcgtctgttcaagatatggtttgagcttgtgcttcgtatcttctgaagaccggtctacttgacgctaaattcgcatggagtgttaagcatttattaaacgcatctggaatcaaatgaagttgtacttgcgaacggcttcacttaaaattcgcgccatttctaatattgtaataagctgtgcttgaaccttagctgtctctgtgtactcgacgtaccactcgctcccacaaatagcttcgaacatcctgtacctgaaacatgacgctgtttggtggaggtggagctgagaattcaactccgaagaaagatgtttatcaattgttcgctgagaaggttagggataacaaacagctggaatcaagatgggcaatcatgcaagaaacccgtgtggagtattttcgtggaaaagatttcaatgccttcatcaagaattatccagaagtcagggaaattttggggccagataaggatttagaagtggaagacattgttaacactttgttgaccaagaaccttgtgataaggtgtgaccgagttatgaaaactgtgaggcctggcaagaaaaagttatcatcatggcctgctcacttggagatacataatgaacaagtgtttactgaaaatgatgggttttatgcttggatgtttctgaaaaggcggaccttgtggcagacagttctttcatttgtttggcctctttttgcactggcagtctgcttatttccagtttacccataccaatgcaagattgttgtactgtactcatgtgctggagctctacttttcattgtctccattcttttgctaagagctgccatctttggcatcttatgggttctccttgggaaacgcggtggtg

SEQ ID NO: 47214 - DNA, 1217 bp, Zea Mays
ccagtttctatatgagtcggttaatctgattacactccgatcaacatttataactgccacaccgaagggcacacgatttgtcaaggattctcgtcctacccattttagcccatctaattaaacgtaaaaatatcttgtcccatttatccgatcggtaatgggtgctaaatatttcttcataacaagtcaaggtttttatcagattctagtaaaaataaataaacatagaacatgtttctaatccgtttctatcgttaaattttaatagcgtaaaatttagagttcaccctactacccatcaatccgtgctgtcaaaccaaacactcctccaagcgcacgcgcgcacagtaagaccgtcggtgggccagggcccaccgtttccagttcctcttgcgtgctgggcctgcccacggcccacctctggctgctcccactgcgcagttccagttccagtgtgcgaaccgaggtcccccaatcccccaaacatttcccccaaacatttttttgtcgaatctgtcgtgagatcctccccgacgagatggcggggaagggagccaaggccacggccgccaagtcggcggacaaggacaaggggaagaaggccggcggccccgtctcgcgctcctcccgcgccgcacctcaggagaattcaactccgaagaaagatgtttatcaattgttcgctgagaaggttagggataacaaacagctggaatcaagatgggcaatcatgcaagaaacccgtgtggagtattttcgtggaaaagatttcaatgccttcatcaagaattatccagaagtcagggaaattttggggccagataaggatttagaagtggaagacattgttaacactttgttgaccaagaaccttgtgataaggtgtgaccgagttatgaaaactgtgaggcctggcaagaaaaagttatcatcatggcctgctcacttggagatacataatgaacaagtgtttactgaaaatgatgggttttatgcttggatgtttctgaaaaggcggaccttgtggcagacagttctttcatttgtttggcctctttttgcactggcagtctgcttatttccagtttacccataccaatgcaagattgttgtactgtactcatgtgctggagctctacttttcattgtctccattcttttgctaagagctgccatctttggcatcttatgggttctccttgggaaacgcggtggtg

SEQ ID NO: 47215 - DNA, 2307 bp, Zea Mays
ccatttatccgatcggtaatgggtgctaaatatttcttcataacaagtcaaggtttttatcagattctagtaaaaataaataaacatagaacatgtttctaatccgtttctatcgttaaattttaatagcgtaaaatttagagttcaccctactacccatcaatccgtgctgtcaaaccaaacactcctccaagcgcacgcgcgcacagtaagaccgtcggtgggccagggcccaccgtttccagttcctcttgcgtgctgggcctgcccacggcccacctctggctgctcccactgcgcagttccagttccagtgtgcgaaccgaggtcccccaatcccccaaacatttcccccaaacatttttttgtcgaatctgtcgtgagatcctccccgacgagatggcggggaagggagccaaggccacggccgccaagtcggcggacaaggacaaggggaagaaggccggcggccccgtctcgcgctcctcccgcgccgcacctcaggagaattcaactccgaagaaagatgtttatcaattgttcgctgagaaggttagggataacaaacagctggaatcaagatgggcaatcatgcaagaaacccgtgtggagtattttcgtggaaaagatttcaatgccttcatcaagaattatccagaagtcagggaaattttggggccagataaggatttagaagtggaagacattgttaacactttgttgaccaagaaccttgtgataaggtgtgaccgagttatgaaaactgtgaggcctggcaagaaaaagttatcatcatggcctgctcacttggagatacataatgaacaagtgtttactgaaaatgatgggttttatgcttggatgtttctgaaaaggcggaccttgtggcagacagttctttcatttgtttggcctctttttgcactggcagtctgcttatttccagtttacccataccaatgcaagattgttgtactgtactcatgtgctggagctctacttttcattgtctccattcttttgcgtaaaatttctccctctctcccaactgtattttcattcacgataaacattacgcttcagtagacattttcaatatcacattttaatcactagacatacttgagtaatgagctacatttttttgcctgtgtagtgttgcgcacactgctaacgtcagtcatatgcatcttgattaacaaatactctttacctgctgttcataaaacagcagctatcagaagttggttttgacttactggaagttttgtagtatatattgataaccttgcagttacatgttagtcacggatttaaacctaacatcttaagactttgtgtgtgggaaccatgagttcaacactagagtagcgttcacttgtttcattacaacaaactatctgtttttttaaccttttcaattcaggcacatcttaacttttcttttttgtccgtatgattttttacgggatccattcaataaaccaatgctgccagtggtaactagctggcaatgtagattccctgcttttgtttgttaatttgttttcactacacaattggtagctgtggtgtatcacagaagaattgcttagcacatgtgcaattggtattttatatttggtttggatcactattctgaagccaggggaagaaataataagtttgtgagcttactgtggtatgccattgttgataggaaatattgcccattatagtaataatactgttcttcgcttcttgcaataaactagttaccaagacatgggtgttgaggatttaccaatttttctctgggtttatttccatttgctacgaaacatagggtgttaggatttaccagattttcttgaatttaagctgatttgaaagttgaaaccaggtatccattttttttggtaaacactgatccagcattcttttttagaatttcctagttttgtatgtatatcgtaaacaagtttgaaattctgcatatttggtgtatgttggtgctgcgtgttgattttatatatccttttagagagcattgcaatatattaccagtgatgttatttttcatttgttatgatgccatagttttaccatctgaatctttgttgttctttctttctgtttgtttatgttgtagttgttcatggtgctctccatcttttaacttgataataatgatatattccatgatttagtttttttagttttgctgttttatgtattcaggattcatctctcttcgtactgggcttagcatttattttttaaatctttatagtaatccctgtttgtctaatatttccaatgtaattg

SEQ ID NO: 47216 - DNA, 876 bp, Zea Mays
ccatttatccgatcggtaatgggtgctaaatatttcttcataacaagtcaaggtttttatcagattctagtaaaaataaataaacatagaacatgtttctaatccgtttctatcgttaaattttaatagcgtaaaatttagagttcaccctactacccatcaatccgtgctgtcaaaccaaacactcctccaagcgcacgcgcgcacagtaagaccgtcggtgggccagggcccaccgtttccagttcctcttgcgtgctgggcctgcccacggcccacctctggctgctcccactgcgcagttccagttccagtgtgcgaaccgaggtcccccaatcccccaaacatttcccccaaacatttttttgtcgaatctgtcgtgagatcctccccgacgagatggcggggaagggagccaaggccacggccgccaagtcggcggacaaggacaaggggaagaaggccggcggccccgtctcgcgctcctcccgcgccgcacctcaggagaattcaactccgaagaaagatgtttatcaattgttcgctgagaaggttagggataacaaacagctggaatcaagatgggcaatcatgcaagaaacccgtgtggagtattttcgtggaaaagatttcaatgccttcatcaagaattatccagaagtcagggaaattttggggccagataaggatttagaagtggaagacattgttaacactttgttgaccaagaaccttgtgataaggtgtgaccgagttatgaaaactgtgaggcctggcaagaaaaagttatcatcatggcctgctcacttggagatacataattaagagctgccatctttggcatcttatgggttctccttgggaaacgcggtggtg

SEQ ID NO: 47217 - DNA, 2477 bp, Zea Mays
cgaacacatcgttcgcgaagttggagaggaagctccacgcagtagtttgaggaggaggctaaggtttcacatgcagtcgagggaaaaagggagagagagggaggcatggtgttagcgatgcctagcgaggctgcagaagagaaacgagcagcaatggcagatttcgtggagaagagaatgacgaaccttgcgcctactaaggacacattttccacgcaagacgcatcacatcgtcatcgatgtacgggcgtaaattccacatgaggcagtatccctcgagctctgatgatggtgttttcaaggacaatgcacagacaatcttttcctgtaggcaagataagagaaaggcaaaatgtaaagcgcaaaaagcaaatgcacatcctggcacttcaatttacctgcatcgtgtagtcagccttcagcgcgttgcgaaccatgaccattactgtagcaaacgacacatccctgtccaaccgatctgcacttctgtcctcctgctgtgtacaaacaccctgtcacccattttccatttcacttcatcgttgccagacacaccaaggttttctccgatgagtagaaagaacagtgaaagaagaagaaaagaatgtgcaaacagcataccctacctccacggagcagcgatcggtacttagcatgctgtcaaggcactgactgtctgaaacttccagagcacttaaactggctgttagtgtgatgccatagacattctcaaccagacattcaagctcttcaagcaaggtcttaactaggagaacaataaaaaaagaacacaaggtcaattagagccgaatattttcacaaacatgtaaaaaaaggtgatattataaacccatagctccaagtttaaaaatatgaaccaaggacaaaaattgcattggttaacgcttctatgtccaacataagaataaatccctttggaccacagtccacaagcaaacgtttgccgcgccaatctgaccgtatctggccactcaagcagtctatagagtttgcacaagtgcagcatggtcttaacactaaaaaagtgcttgtgaatattgaacaggataaagacaaacaaactcatgtaagatacaaagatcaagtacctttctttatatgatctttaagtccattttcgcatgagctcactggcacaaggaaaagaaaaaatcaataccaaactaattaaagagtatgaaattatcattaaaattgaacagttatgttctctagagctcatacttcaataagaaatccaagaataacagcagaatacatagaattagcccaaaaatcacaatatgagagaaaactctacagtcaggaccttccatagtcttttctacttcagttcaggaaaaaaaagatgtacagaacgaattcagatgagcgagtcatatcaaccgttagcatgtaagaataaaaaaggctgttcactaacaaagctatataactcacgctgattaatgtttgagatgttttggcagtggaccctgcagccagtttcaatataggacctcattctgacagtgcagtttgatttaagtatctgattcattacatctgcttccttagaaatctgcggcctacgaaaatactctgcaataagattgttatgtgcctcagtcatcacaattacagaaaattgaccggtggacaagtacataataccatcacaaaatggcttcccagtggataatataaactgaacctccatggcaaatcagacgtgtcaacaaaaactaaccaagctcctcacgaaatctcccaagcaatcgctccccagattcaacaagctcattgaactgagcgaccctgtgacgcggcagatgtaagaatcagctcagttaatgcaaatttcagtcgaaaaaggagatggataccgttcacataagcaaggatgaattacttggtcatgaactccacgaagacaccacggctattgctctcatcctcacccgctacctcaggtggcggcagttgcacgacaagcattgctggaatttctccctcgcctgcaacagtgccgggtccagtattttaagattgggtattaaaaacatctgaaggggtttaaaaaaaacaacctaaagagtattttgcattgttataattgtataatatatagcagattcaactgtgagcacggatagtgaaactggtggtttggagtaacaattctaatcaatgtcattgatacgatcttgatgcctaatttaatcagtaggattgagtatgtaaaacaacaaacaaaaaacaagatgtacaattaaaattggaatccacaacatgtttcaatttgatattgatagtacaaagtacaaaaatctgtcaatttaaaggacaaatcaataagaaatggcattagtaatcataaaagaactcatctccgcaccaactatgaagcatcggcaaaaaaaccagtaaatcgttgagccagatcagggacgaactcgacgtcgagcaaaggagag

SEQ ID NO: 47218 - DNA, 2732 bp, Zea Mays
atcgacgcttcgacgagggctcggatggaactcgtccgtgcttcgggcggcgatggtcagcacagcactcggtagtcggttcggaggtcaggccctgtcgactttgtggccttgagttctggatgaggagatctcttgtatttgtggtctcgttactacagcccatgttatctcgggtccgtcctggacgaggcaacggccgccgcgaacggagaacggccgtcgagaggccacgtgtccacagccgtggcctcactcgcactactcgccctgctcgtcgtctccccagtccccaccagttgccttcgcatcgccggacgccgctcgccctccgcttctgcgactacgtccgagatggccgcctcggcattggcctcccgcgcgctgcggcctccgcacggccgccaccctcccgccccttcgccgcgtccgcgtccgcgctcggcaaccgccgccgctccaaggacgcgctgccgcgcggtggctgcggacgagcgccccgccgaccccgcgttccccgagcgccagaaccgcgggatttccgggcttcgcctcctcatcgcgtcgcagttgtcgaccagggcggtggagaggccggaggcggacgtggttgtgataggcagcgggctcggcgggctgtgctgcgccggcctcctggcgaggtacggccaggacgtgctggtgctcgagagccatgaccgcccgggaggcgccgcgcactcgttcgatatcaagggattcaacttcgattcagggccatccttgttctccggattccagtccagaggcccccaggcaaatccacttgctcaggtccttgatgcattaggcgaatcagtcccttgtgcgtcttatgactcttggatggtttatgtacctgaaggacaattcctctcacggataggaccaactgaattcctcaaggaccttgagatgtttgttggtgttgacgctgtccaggagtggaaaaaacttcttctgcaatggctttgcctccgctttccattcgaggtgatctgggcattatatctacagctgttggtagatacactccttcgttgttgaaatcattcatacaaatgggaccgcaaggagctctgggcgctacgaaacttctacgtccattcaaagaaattgttgattcgctggagctgaaaaatccatttgttcgtaactggatcgatcttctgtgctttctacttgctggagttaaatctgatggtgctctttctgcagaaatggtttatatgtttgcagaatggtacaaaccaggatgcttgcttgagtaccctctgggtggaactggagcaataatagatgcccttgtgagcggtattgaaaaatttggtggcagacttgctcttcgttctcatgttgaaaagatcttaatagagaatggtcgagcagttggtgtcaagctacaaagtggacaagttatccgtgcaaagaaagcggttgttagcaatgcatctatgtgggacactttggatctgttaccacccgatgctgtcccaaaatcatatgaagatagagtgaaagcaactccacaatgtgaatcgtttatgcatctccaccttggttttgatgcagagaatgctagagaggaccttgggatccatcacattgtggttgatgattggaacaaaggagttgatggtgaacaaaatgttgttttgatatccgttcccagtgttcttagcaaggacctggcaccgcccggaaagcacattcttcatgcatatactccagggacagaacctttcagtttgtgggagggactggacaggaaaagtgcagaatatcgaagactgaaggaagaacgttctgaggtgatgtggaaagctgtggagcttgctctcggcccaaaatttagccgcgaaaaatgcgacgtgaaattggtcgggacaccgctaacgcacaggagatttctccgaaggaacaggggaacctatggtccagccataaaagccggagaagccactttccctgggcaagcaacaccgatcccccagctcttttgctgcggtgactcgacctttccagggatcggagtgccggcagttgcggccagcggcgcgattgtggcgaacacgctggttccggtgtcgcagcattcagagctccttgacgctgttggaatctgagtggcagatacgtccgtcggtcctgaacgataatcaaagattttcccactgctgttggaaaaagatcgtatggctgaatggagaagaagacgacgacgacgaccgatacagtagagttttctagtcagaacggagactgggaaaatatgttgtacagtatattatttactacgactgcatgaagcttgtgctgcttctgacaaattggtcgcctcgttcgcctgcatgctccttgtattgttctaccgaaagctctgtggcgcatgcaggccttttgtcggacattttttttttctggtatacggaggaaggaccatgtgcttgtttgtacaactctagtcgcagtttgctgaagtccttgaacgacggcaacaaatgccagctgcgctgtcttttcattggagggcagcactggcctggttgttgtttattattattattattattattattattattattattattattattattattattattattattattattattattattatttaaaagagataataaggccaaaccaccatcgtctttcgtatacccccataaaagtccttttctcattttatgtgccta

SEQ ID NO: 47219 - DNA, 2689 bp, Zea Mays
cgggcggcgatggtcagcacagcactcggtagtcggttcggaggtcaggccctgtcgactttgtggccttgagttctggatgaggagatctcttgtatttgtggtctcgttactacagcccatgttatctcgggtccgtcctggacgaggcaacggccgccgcgaacggagaacggccgtcgagaggccacgtgtccacagccgtggcctcactcgcactactcgccctgctcgtcgtctccccagtccccaccagttgccttcgcatcgccggacgccgctcgccctccgcttctgcgactacgtccgagatggccgcctcggcattggcctcccgcgcgctgcggcctccgcacggccgccaccctcccgccccttcgccgcgtccgcgtccgcgctcggcaaccgccgccgctccaaggacgcgctgccgcgcggtggctgcggacgagcgccccgccgaccccgcgttccccgagcgccagaaccgcgggatttccggttgtcgaccagggcggtggagaggccggaggcggacgtggttgtgataggcagcgggctcggcgggctgtgctgcgccggcctcctggcgaggtacggccaggacgtgctggtgctcgagagccatgaccgcccgggaggcgccgcgcactcgttcgatatcaagggattcaacttcgattcagggccatccttgttctccggattccagtccagaggcccccaggcaaatccacttgctcaggtccttgatgcattaggcgaatcagtcccttgtgcgtcttatgactcttggatggtttatgtacctgaaggacaattcctctcacggataggaccaactgaattcctcaaggaccttgagatgtttgttggtgttgacgctgtccaggagtggaaaaaacttcttgatgcagttattcctatgtctgcagctgcaatggctttgcctccgctttccattcgaggtgatctgggcattatatctacagctgttggtagatacactccttcgttgttgaaatcattcatacaaatgggaccgcaaggagctctgggcgctacgaaacttctacgtccattcaaagaaattgttgattcgctggagctgaaaaatccatttgttcgtaactggatcgatcttctgtgctttctacttgctggagttaaatctgatggtgctctttctgcagaaatggtttatatgtttgcagaatggtacaaaccaggatgcttgcttgagtaccctctgggtggaactggagcaataatagatgcccttgtgagcggtattgaaaaatttggtggcagacttgctcttcgttctcatgttgaaaagatcttaatagagaatggtcgagcagttggtgtcaagctacaaagtggacaagttatccgtgcaaagaaagcggttgttagcaatgcatctatgtgggacactttggatctgttaccacccgatgctgtcccaaaatcatatgaagatagagtgaaagcaactccacaatgtgaatcgtttatgcatctccaccttggttttgatgcagagaatgctagagaggaccttgggatccatcacattgtggttgatgattggaacaaaggagttgatggtgaacaaaatgttgttttgatatccgttcccagtgttcttagcaaggacctggcaccgcccggaaagcacattcttcatgcatatactccagggacagaacctttcagtttgtgggagggactggacaggaaaagtgcagaatatcgaagactgaaggaagaacgttctgaggtgatgtggaaagctgtggagcttgctctcggcccaaaatttagccgcgaaaaatgcgacgtgaaattggtcgggacaccgctaacgcacaggagatttctccgaaggaacaggggaacctatggtccagccataaaagccggagaagccactttccctgggcaagcaacaccgatcccccagctcttttgctgcggtgactcgacctttccagggatcggagtgccggcagttgcggccagcggcgcgattgtggcgaacacgctggttccggtgtcgcagcattcagagctccttgacgctgttggaatctgagtggcagatacgtccgtcggtcctgaacgataatcaaagattttcccactgctgttggaaaaagatcgtatggctgaatggagaagaagacgacgacgacgaccgatacagtagagttttctagtcagaacggagactgggaaaatatgttgtacagtatattatttactacgactgcatgaagcttgtgctgcttctgacaaattggtcgcctcgttcgcctgcatgctccttgtattgttctaccgaaagctctgtggcgcatgcaggccttttgtcggacattttttttttctggtatacggaggaaggaccatgtgcttgtttgtacaactctagtcgcagtttgctgaagtccttgaacgacggcaacaaatgccagctgcgctgtcttttcattggagggcagcactggcctggttgttgtttattattattattattattattattattattattattattattattattattattattattattattattattattattatttaaaagagataataaggccaaaccaccatcgtctttcgtatacccccataaaagtccttttctcattttatgtgccta

SEQ ID NO: 47220 - DNA, 2493 bp, Zea Mays
cgcgaacggagaacggccgtcgagaggccacgtgtccacagccgtggcctcactcgcactactcgccctgctcgtcgtctccccagtccccaccagttgccttcgcatcgccggacgccgctcgccctccgcttctgcgactacgtccgagatggccgcctcggcattggcctcccgcgcgctgcggcctccgcacggccgccaccctcccgccccttcgccgcgtccgcgtccgcgctcggcaaccgccgccgctccaaggacgcgctgccgcgcggtggctgcggacgagcgccccgccgaccccgcgttccccgagcgccagaaccgcgggatttccggggcggtggagaggccggaggcggacgtggttgtgataggcagcgggctcggcgggctgtgctgcgccggcctcctggcgaggtacggccaggacgtgctggtgctcgagagccatgaccgcccgggaggcgccgcgcactcgttcgatatcaagggattcaacttcgattcagggccatccttgttctccggattccagtccagaggcccccaggcaaatccacttgctcaggtccttgatgcattaggcgaatcagtcccttgtgcgtcttatgactcttggatggtttatgtacctgaaggacaattcctctcacggataggaccaactgaattcctcaaggaccttgagatgtttgttggtgttgacgctgtccaggagtggaaaaaacttcttctgcaatggctttgcctccgctttccattcgaggtgatctgggcattatatctacagctgttggtagatacactccttcgttgttgaaatcattcatacaaatgggaccgcaaggagctctgggcgctacgaaacttctacgtccattcaaagaaattgttgattcgctggagctgaaaaatccatttgttcgtaactggatcgatcttctgtgctttctacttgctggagttaaatctgatggtgctctttctgcagaaatggtttatatgtttgcagaatggtacaaaccaggatgcttgcttgagtaccctctgggtggaactggagcaataatagatgcccttgtgagcggtattgaaaaatttggtggcagacttgctcttcgttctcatgttgaaaagatcttaatagagaatggtcgagcagttggtgtcaagctacaaagtggacaagttatccgtgcaaagaaagcggttgttagcaatgcatctatgtgggacactttggatctgttaccacccgatgctgtcccaaaatcatatgaagatagagtgaaagcaactccacaatgtgaatcgtttatgcatctccaccttggttttgatgcagagaatgctagagaggaccttgggatccatcacattgtggttgatgattggaacaaaggagttgatggtgaacaaaatgttgttttgatatccgttcccagtgttcttagcaaggacctggcaccgcccggaaagcacattcttcatgcatatactccagggacagaacctttcagtttgtgggagggactggacaggaaaagtgcagaatatcgaagactgaaggaagaacgttctgaggtgatgtggaaagctgtggagcttgctctcggcccaaaatttagccgcgaaaaatgcgacgtgaaattggtcgggacaccgctaacgcacaggagatttctccgaaggaacaggggaacctatggtccagccataaaagccggagaagccactttccctgggcaagcaacaccgatcccccagctcttttgctgcggtgactcgacctttccagggatcggagtgccggcagttgcggccagcggcgcgattgtggcgaacacgctggttccggtgtcgcagcattcagagctccttgacgctgttggaatctgagtggcagatacgtccgtcggtcctgaacgataatcaaagattttcccactgctgttggaaaaagatcgtatggctgaatggagaagaagacgacgacgacgaccgatacagtagagttttctagtcagaacggagactgggaaaatatgttgtacagtatattatttactacgactgcatgaagcttgtgctgcttctgacaaattggtcgcctcgttcgcctgcatgctccttgtattgttctaccgaaagctctgtggcgcatgcaggccttttgtcggacattttttttttctggtatacggaggaaggaccatgtgcttgtttgtacaactctagtcgcagtttgctgaagtccttgaacgacggcaacaaatgccagctgcgctgtcttttcattggagggcagcactggcctggttgttgtttattattattattattattattattattattattattattattattattattattattattattattattattattattatttaaaagagataataaggccaaaccaccatcgtctttcgtatacccccataaaagtccttttctcattttatgtgccta

SEQ ID NO: 47221 - DNA, 2514 bp, Zea Mays
aacggagaacggccgtcgagaggccacgtgtccacagccgtggcctcactcgcactactcgccctgctcgtcgtctccccagtccccaccagttgccttcgcatcgccggacgccgctcgccctccgcttctgcgactacgtccgagatggccgcctcggcattggcctcccgcgcgctgcggcctccgcacggccgccaccctcccgccccttcgccgcgtccgcgtccgcgctcggcaaccgccgccgctccaaggacgcgctgccgcgcggtggctgcggacgagcgccccgccgaccccgcgttccccgagcgccagaaccgcgggatttccggggcggtggagaggccggaggcggacgtggttgtgataggcagcgggctcggcgggctgtgctgcgccggcctcctggcgaggtacggccaggacgtgctggtgctcgagagccatgaccgcccgggaggcgccgcgcactcgttcgatatcaagggattcaacttcgattcagggccatccttgttctccggattccagtccagaggcccccaggcaaatccacttgctcaggtccttgatgcattaggcgaatcagtcccttgtgcgtcttatgactcttggatggtttatgtacctgaaggacaattcctctcacggataggaccaactgaattcctcaaggaccttgagatgtttgttggtgttgacgctgtccaggagtggaaaaaacttcttgatgcagttattcctatgtctgcagctgcaatggctttgcctccgctttccattcgaggtgatctgggcattatatctacagctgttggtagatacactccttcgttgttgaaatcattcatacaaatgggaccgcaaggagctctgggcgctacgaaacttctacgtccattcaaagaaattgttgattcgctggagctgaaaaatccatttgttcgtaactggatcgatcttctgtgctttctacttgctggagttaaatctgatggtgctctttctgcagaaatggtttatatgtttgcagaatggtacaaaccaggatgcttgcttgagtaccctctgggtggaactggagcaataatagatgcccttgtgagcggtattgaaaaatttggtggcagacttgctcttcgttctcatgttgaaaagatcttaatagagaatggtcgagcagttggtgtcaagctacaaagtggacaagttatccgtgcaaagaaagcggttgttagcaatgcatctatgtgggacactttggatctgttaccacccgatgctgtcccaaaatcatatgaagatagagtgaaagcaactccacaatgtgaatcgtttatgcatctccaccttggttttgatgcagagaatgctagagaggaccttgggatccatcacattgtggttgatgattggaacaaaggagttgatggtgaacaaaatgttgttttgatatccgttcccagtgttcttagcaaggacctggcaccgcccggaaagcacattcttcatgcatatactccagggacagaacctttcagtttgtgggagggactggacaggaaaagtgcagaatatcgaagactgaaggaagaacgttctgaggtgatgtggaaagctgtggagcttgctctcggcccaaaatttagccgcgaaaaatgcgacgtgaaattggtcgggacaccgctaacgcacaggagatttctccgaaggaacaggggaacctatggtccagccataaaagccggagaagccactttccctgggcaagcaacaccgatcccccagctcttttgctgcggtgactcgacctttccagggatcggagtgccggcagttgcggccagcggcgcgattgtggcgaacacgctggttccggtgtcgcagcattcagagctccttgacgctgttggaatctgagtggcagatacgtccgtcggtcctgaacgataatcaaagattttcccactgctgttggaaaaagatcgtatggctgaatggagaagaagacgacgacgacgaccgatacagtagagttttctagtcagaacggagactgggaaaatatgttgtacagtatattatttactacgactgcatgaagcttgtgctgcttctgacaaattggtcgcctcgttcgcctgcatgctccttgtattgttctaccgaaagctctgtggcgcatgcaggccttttgtcggacattttttttttctggtatacggaggaaggaccatgtgcttgtttgtacaactctagtcgcagtttgctgaagtccttgaacgacggcaacaaatgccagctgcgctgtcttttcattggagggcagcactggcctggttgttgtttattattattattattattattattattattattattattattattattattattattattattattattattattattatttaaaagagataataaggccaaaccaccatcgtctttcgtatacccccataaaagtccttttctcattttatgtgccta

SEQ ID NO: 47222 - DNA, 2496 bp, Zea Mays
cgccctgctcgtcgtctccccagtccccaccagttgccttcgcatcgccggacgccgctcgccctccgcttctgcgactacgtccgagatggccgcctcggcattggcctcccgcgcgctgcggcctccgcacggccgccaccctcccgccccttcgccgcgtccgcgtccgcgctcggcaaccgccgccgctccaaggacgcgctgccgcgcggtggctgcggacgagcgccccgccgaccccgcgttccccgagcgccagaaccgcgggatttccgggcttcgcctcctcatcgcgtcgcagttgtcgaccagggcggtggagaggccggaggcggacgtggttgtgataggcagcgggctcggcgggctgtgctgcgccggcctcctggcgaggtacggccaggacgtgctggtgctcgagagccatgaccgcccgggaggcgccgcgcactcgttcgatatcaagggattcaacttcgattcagggccatccttgttctccggattccagtccagaggcccccaggcaaatccacttgctcaggtccttgatgcattaggcgaatcagtcccttgtgcgtcttatgactcttggatggtttatgtacctgaaggacaattcctctcacggataggaccaactgaattcctcaaggaccttgagatgtttgttggtgttgacgctgtccaggagtggaaaaaacttcttctgcaatggctttgcctccgctttccattcgaggtgatctgggcattatatctacagctgttggtagatacactccttcgttgttgaaatcattcatacaaatgggaccgcaaggagctctgggcgctacgaaacttctacgtccattcaaagaaattgttgattcgctggagctgaaaaatccatttgttcgtaactggatcgatcttctgtgctttctacttgctggagttaaatctgatggtgctctttctgcagaaatggtttatatgtttgcagaatggtacaaaccaggatgcttgcttgagtaccctctgggtggaactggagcaataatagatgcccttgtgagcggtattgaaaaatttggtggcagacttgctcttcgttctcatgttgaaaagatcttaatagagaatggtcgagcagttggtgtcaagctacaaagtggacaagttatccgtgcaaagaaagcggttgttagcaatgcatctatgtgggacactttggatctgttaccacccgatgctgtcccaaaatcatatgaagatagagtgaaagcaactccacaatgtgaatcgtttatgcatctccaccttggttttgatgcagagaatgctagagaggaccttgggatccatcacattgtggttgatgattggaacaaaggagttgatggtgaacaaaatgttgttttgatatccgttcccagtgttcttagcaaggacctggcaccgcccggaaagcacattcttcatgcatatactccagggacagaacctttcagtttgtgggagggactggacaggaaaagtgcagaatatcgaagactgaaggaagaacgttctgaggtgatgtggaaagctgtggagcttgctctcggcccaaaatttagccgcgaaaaatgcgacgtgaaattggtcgggacaccgctaacgcacaggagatttctccgaaggaacaggggaacctatggtccagccataaaagccggagaagccactttccctgggcaagcaacaccgatcccccagctcttttgctgcggtgactcgacctttccagggatcggagtgccggcagttgcggccagcggcgcgattgtggcgaacacgctggttccggtgtcgcagcattcagagctccttgacgctgttggaatctgagtggcagatacgtccgtcggtcctggctgattagctgatacccctgcatacacagaacgataatcaaagattttcccactgctgttggaaaaagatcgtatggctgaatggagaagaagacgacgacgacgaccgatacagtagagttttctagtcagaacggagactgggaaaatatgttgtacagtatattatttactacgactgcatgaagcttgtgctgcttctgacaaattggtcgcctcgttcgcctgcatgctccttgtattgttctaccgaaagctctgtggcgcatgcaggccttttgtcggacattttttttttctggtatacggaggaaggaccatgtgcttgtttgtacaactctagtcgcagtttgctgaagtccttgaacgacggcaacaaatgccagctgcgctgtcttttcattggagggcagcactggcctggttgttgtttattattattattattattattattattattattattattattattattattattattattattattattattattattatttaaaagagataataaggccaaaccaccatcgtctttcgtatacccccataaaagtccttttctcattttatgtgccta

SEQ ID NO: 47223 - DNA, 2705 bp, Zea Mays
cgccctgctcgtcgtctccccagtccccaccagttgccttcgcatcgccggacgccgctcgccctccgcttctgcgactacgtccgagatggccgcctcggcattggcctcccgcgcgctgcggcctccgcacggccgccaccctcccgccccttcgccgcgtccgcgtccgcgctcggcaaccgccgccgctccaaggacgcgctgccgcgcggtggctgcggacgagcgccccgccgaccccgcgttccccgagcgccagaaccgcgggatttccgggcttcgcctcctcatcgcgtcgcagttgtcgaccagggcggtggagaggccggaggcggacgtggttgtgataggcagcgggctcggcgggctgtgctgcgccggcctcctggcgaggtacggccaggacgtgctggtgctcgagagccatgaccgcccgggaggcgccgcgcactcgttcgatatcaagggattcaacttcgattcagggccatccttgttctccggattccagtccagaggcccccaggcaaatccacttgctcaggtccttgatgcattaggcgaatcagtcccttgtgcgtcttatgactcttggatggtttatgtacctgaaggacaattcctctcacggataggaccaactgaattcctcaaggaccttgagatgtttgttggtgttgacgctgtccaggagtggaaaaaacttcttgtgagtttgcttcatatttgggtttagctgtttagtaaaggctttgctagatgtagatgaacactttgaagtactgaacaatgcatgggtatgcactaggtattatcctccttgtgtgttagcactcacatacactataccacacaaagttcataacttaggatgctatattgccttcaaaagtgtgctgataccatactgaaaacaatctcaggatgcagttattcctatgtctgcagctgcaatggctttgcctccgctttccattcgaggtgatctgggcattatatctacagctgttggtagatacactccttcgttgttgaaatcattcatacaaatgggaccgcaaggagctctgggcgctacgaaacttctacgtccattcaaagaaattgttgattcgctggagctgaaaaatccatttgttcgtaactggatcgatcttctgtgctttctacttgctggagttaaatctgatggtgctctttctgcagaaatggtttatatgtttgcagaatggtacaaaccaggatgcttgcttgagtaccctctgggtggaactggagcaataatagatgcccttgtgagcggtattgaaaaatttggtggcagacttgctcttcgttctcatgttgaaaagatcttaatagagaatggtcgagcagttggtgtcaagctacaaagtggacaagttatccgtgcaaagaaagcggttgttagcaatgcatctatgtgggacactttggatctgttaccacccgatgctgtcccaaaatcatatgaagatagagtgaaagcaactccacaatgtgaatcgtttatgcatctccaccttggttttgatgcagagaatgctagagaggaccttgggatccatcacattgtggttgatgattggaacaaaggagttgatggtgaacaaaatgttgttttgatatccgttcccagtgttcttagcaaggacctggcaccgcccggaaagcacattcttcatgcatatactccagggacagaacctttcagtttgtgggagggactggacaggaaaagtgcagaatatcgaagactgaaggaagaacgttctgaggtgatgtggaaagctgtggagcttgctctcggcccaaaatttagccgcgaaaaatgcgacgtgaaattggtcgggacaccgctaacgcacaggagatttctccgaaggaacaggggaacctatggtccagccataaaagccggagaagccactttccctgggcaagcaacaccgatcccccagctcttttgctgcggtgactcgacctttccagggatcggagtgccggcagttgcggccagcggcgcgattgtggcgaacacgctggttccggtgtcgcagcattcagagctccttgacgctgttggaatctgagtggcagatacgtccgtcggtcctgaacgataatcaaagattttcccactgctgttggaaaaagatcgtatggctgaatggagaagaagacgacgacgacgaccgatacagtagagttttctagtcagaacggagactgggaaaatatgttgtacagtatattatttactacgactgcatgaagcttgtgctgcttctgacaaattggtcgcctcgttcgcctgcatgctccttgtattgttctaccgaaagctctgtggcgcatgcaggccttttgtcggacattttttttttctggtatacggaggaaggaccatgtgcttgtttgtacaactctagtcgcagtttgctgaagtccttgaacgacggcaacaaatgccagctgcgctgtcttttcattggagggcagcactggcctggttgttgtttattattattattattattattattattattattattattattattattattattattattattattattattattattatttaaaagagataataaggccaaaccaccatcgtctttcgtatacccccataaaagtccttttctcattttatgtgccta

SEQ ID NO: 47224 - DNA, 2521 bp, Zea Mays
cgccctgctcgtcgtctccccagtccccaccagttgccttcgcatcgccggacgccgctcgccctccgcttctgcgactacgtccgagatggccgcctcggcattggcctcccgcgcgctgcggcctccgcacggccgccaccctcccgccccttcgccgcgtccgcgtccgcgctcggcaaccgccgccgctccaaggacgcgctgccgcgcggtggctgcggacgagcgccccgccgaccccgcgttccccgagcgccagaaccgcgggatttccgggcttcgcctcctcatcgcgtcgcagttgtcgaccagggcggtggagaggccggaggcggacgtggttgtgataggcagcgggctcggcgggctgtgctgcgccggcctcctggcgaggtacggccaggacgtgctggtgctcgagagccatgaccgcccgggaggcgccgcgcactcgttcgatatcaagggattcaacttcgattcagggccatccttgttctccggattccagtccagaggcccccaggcaaatccacttgctcaggtccttgatgcattaggcgaatcagtcccttgtgcgtcttatgactcttggatggtttatgtacctgaaggacaattcctctcacggataggaccaactgaattcctcaaggaccttgagatgtttgttggtgttgacgctgtccaggagtggaaaaaacttcttgatgcagttattcctatgtctgcagctgcaatggctttgcctccgctttccattcgaggtgatctgggcattatatctacagctgttggtagatacactccttcgttgttgaaatcattcatacaaatgggaccgcaaggagctctgggcgctacgaaacttctacgtccattcaaagaaattgttgattcgctggagctgaaaaatccatttgttcgtaactggatcgatcttctgtgctttctacttgctggagttaaatctgatggtgctctttctgcagaaatggtttatatgtttgcagaatggtacaaaccaggatgcttgcttgagtaccctctgggtggaactggagcaataatagatgcccttgtgagcggtattgaaaaatttggtggcagacttgctcttcgttctcatgttgaaaagatcttaatagagaatggtcgagcagttggtgtcaagctacaaagtggacaagttatccgtgcaaagaaagcggttgttagcaatgcatctatgtgggacactttggatctgttaccacccgatgctgtcccaaaatcatatgaagatagagtgaaagcaactccacaatgtgaatcgtttatgcatctccaccttggttttgatgcagagaatgctagagaggaccttgggatccatcacattgtggttgatgattggaacaaaggagttgatggtgaacaaaatgttgttttgatatccgttcccagtgttcttagcaaggacctggcaccgcccggaaagcacattcttcatgcatatactccagggacagaacctttcagtttgtgggagggactggacaggaaaagtgcagaatatcgaagactgaaggaagaacgttctgaggtgatgtggaaagctgtggagcttgctctcggcccaaaatttagccgcgaaaaatgcgacgtgaaattggtcgggacaccgctaacgcacaggagatttctccgaaggaacaggggaacctatggtccagccataaaagccggagaagccactttccctgggcaagcaacaccgatcccccagctcttttgctgcggtgactcgacctttccagggatcggagtgccggcagttgcggccagcggcgcgattgtggcgaacacgctggttccggtgtcgcagcattcagagctccttgacgctgttggaatctgagtggcagatacgtccgtcggtcctggctgattagctgatacccctgcatacacagaacgataatcaaagattttcccactgctgttggaaaaagatcgtatggctgaatggagaagaagacgacgacgacgaccgatacagtagagttttctagtcagaacggagactgggaaaatatgttgtacagtatattatttactacgactgcatgaagcttgtgctgcttctgacaaattggtcgcctcgttcgcctgcatgctccttgtattgttctaccgaaagctctgtggcgcatgcaggccttttgtcggacattttttttttctggtatacggaggaaggaccatgtgcttgtttgtacaactctagtcgcagtttgctgaagtccttgaacgacggcaacaaatgccagctgcgctgtcttttcattggagggcagcactggcctggttgttgtttattattattattattattattattattattattattattattattattattattattattattattattattattattatttaaaagagataataaggccaaaccaccatcgtctttcgtatacccccataaaagtccttttctcattttatgtgccta

SEQ ID NO: 47225 - DNA, 2409 bp, Zea Mays
cgccctgctcgtcgtctccccagtccccaccagttgccttcgcatcgccggacgccgctcgccctccgcttctgcgactacgtccgagatggccgcctcggcattggcctcccgcgcgctgcggcctccgcacggccgccaccctcccgccccttcgccgcgtccgcgtccgcgctcggcaaccgccgccgctccaaggacgcgctgccgcgcggtggctgcggacgagcgccccgccgaccccgcgttccccgagcgccagaaccgcgggatttccgggcttcgcctcctcatcgcgtcgcagttgtcgaccagggcggtggagaggccggaggcggacgtggttgtgataggcagcgggctcggcgggctgtgctgcgccggcctcctggcgaggtacggccaggacgtgctggtgctcgagagccatgaccgcccgggaggcgccgcgcactcgttcgatatcaagggattcaacttcgattcagggccatccttgttctccggattccagtccagaggcccccaggcaaatccacttgctcaggtccttgatgcattaggcgaatcagtcccttgtgcgtcttatgactcttggatggtttatgtacctgaaggacaattcctctcacggataggaccaactgaattcctcaaggaccttgagatgtttgttggtgttgacgctgtccaggagtggaaaaaacttcttctgttggtagatacactccttcgttgttgaaatcattcatacaaatgggaccgcaaggagctctgggcgctacgaaacttctacgtccattcaaagaaattgttgattcgctggagctgaaaaatccatttgttcgtaactggatcgatcttctgtgctttctacttgctggagttaaatctgatggtgctctttctgcagaaatggtttatatgtttgcagaatggtacaaaccaggatgcttgcttgagtaccctctgggtggaactggagcaataatagatgcccttgtgagcggtattgaaaaatttggtggcagacttgctcttcgttctcatgttgaaaagatcttaatagagaatggtcgagcagttggtgtcaagctacaaagtggacaagttatccgtgcaaagaaagcggttgttagcaatgcatctatgtgggacactttggatctgttaccacccgatgctgtcccaaaatcatatgaagatagagtgaaagcaactccacaatgtgaatcgtttatgcatctccaccttggttttgatgcagagaatgctagagaggaccttgggatccatcacattgtggttgatgattggaacaaaggagttgatggtgaacaaaatgttgttttgatatccgttcccagtgttcttagcaaggacctggcaccgcccggaaagcacattcttcatgcatatactccagggacagaacctttcagtttgtgggagggactggacaggaaaagtgcagaatatcgaagactgaaggaagaacgttctgaggtgatgtggaaagctgtggagcttgctctcggcccaaaatttagccgcgaaaaatgcgacgtgaaattggtcgggacaccgctaacgcacaggagatttctccgaaggaacaggggaacctatggtccagccataaaagccggagaagccactttccctgggcaagcaacaccgatcccccagctcttttgctgcggtgactcgacctttccagggatcggagtgccggcagttgcggccagcggcgcgattgtggcgaacacgctggttccggtgtcgcagcattcagagctccttgacgctgttggaatctgagtggcagatacgtccgtcggtcctgaacgataatcaaagattttcccactgctgttggaaaaagatcgtatggctgaatggagaagaagacgacgacgacgaccgatacagtagagttttctagtcagaacggagactgggaaaatatgttgtacagtatattatttactacgactgcatgaagcttgtgctgcttctgacaaattggtcgcctcgttcgcctgcatgctccttgtattgttctaccgaaagctctgtggcgcatgcaggccttttgtcggacattttttttttctggtatacggaggaaggaccatgtgcttgtttgtacaactctagtcgcagtttgctgaagtccttgaacgacggcaacaaatgccagctgcgctgtcttttcattggagggcagcactggcctggttgttgtttattattattattattattattattattattattattattattattattattattattattattattattattattattatttaaaagagataataaggccaaaccaccatcgtctttcgtatacccccataaaagtccttttctcattttatgtgccta

SEQ ID NO: 47226 - DNA, 3089 bp, Zea Mays
cgccctgctcgtcgtctccccagtccccaccagttgccttcgcatcgccggacgccgctcgccctccgcttctgcgactacgtccgagatggccgcctcggcattggcctcccgcgcgctgcggcctccgcacggccgccaccctcccgccccttcgccgcgtccgcgtccgcgctcggcaaccgccgccgctccaaggacgcgctgccgcgcggtggctgcggacgagcgccccgccgaccccgcgttccccgagcgccagaaccgcgggatttccgggcttcgcctcctcatcgcgtcgcagttgtcgaccagggcggtggagaggccggaggcggacgtggttgtgataggcagcgggctcggcgggctgtgctgcgccggcctcctggcgaggtacggccaggacgtgctggtgctcgagagccatgaccgcccgggaggcgccgcgcactcgttcgatatcaagggattcaacttcgattcagggccatccttgttctccggattccagtccagaggcccccaggcaaatccacttgctcaggtccttgatgcattaggcgaatcagtcccttgtgcgtcttatgactcttggatggtttatgtacctgaaggacaattcctctcacggataggaccaactgaattcctcaaggaccttgagatgtttgttggtgttgacgctgtccaggagtggaaaaaacttcttctgcaatggctttgcctccgctttccattcgaggtgatctgggcattatatctacagctgttggtagatacactccttcgttgttgaaatcattcatacaaatgggaccgcaaggagctctgggcgctacgaaacttctacgtccattcaaagaaattgttgattcgctggagctgaaaaatccatttgttcgtaactggatcgatcttctgtgctttctacttgctggagttaaatctgatggtgctctttctgcagaaatggtttatatgtttgcagaatggtacaaaccaggatgcttgcttgagtaccctctgggtggaactggagcaataatagatgcccttgtgagcggtattgaaaaatttggtggcagacttgctcttcgttctcatgttgaaaagatcttaatagagaatggtcgagcagttggtgtcaagctacaaagtggacaagtaagctctagaagatattttattggcaagcaaacttaaatattgccccttcagaataaaaaagagagagagggagatgtcacagacacagccaataacagccagaactagcatggctttgatttaggtgtcatatgcttatcatagacaatgattttgtttggtgtttaatttcacaatatttttttgagagtccgacactgggaccgtctgcccttttttagatgataaaaggccttcgatgaggatgcactatgaacaatatcaatagcctgtgtctgtgaaaagcaaattaagtgttatccctaggaccacatatcttttttagtttaggcctttctccatgccttcaaactagtggcaaacaatcgagggtggagccaggatttagctatagggaggtcagtctataagtgcagagcatcaggatttagattaggataacaatgtcagaacccacgacttggtgactcggtgagacaactctcaccaccacactcttatcacatgtcagtctaagccactagacaaacttttcattacaatggctgctatcatccaatctatggtttgaagaaatatgtagctgttgaaatcttgttgggaatcatgtccttttgcaggttatccgtgcaaagaaagcggttgttagcaatgcatctatgtgggacactttggatctgttaccacccgatgctgtcccaaaatcatatgaagatagagtgaaagcaactccacaatgtgaatcgtttatgcatctccaccttggttttgatgcagagaatgctagagaggaccttgggatccatcacattgtggttgatgattggaacaaaggagttgatggtgaacaaaatgttgttttgatatccgttcccagtgttcttagcaaggacctggcaccgcccggaaagcacattcttcatgcatatactccagggacagaacctttcagtttgtgggagggactggacaggaaaagtgcagaatatcgaagactgaaggaagaacgttctgaggtgatgtggaaagctgtggagcttgctctcggcccaaaatttagccgcgaaaaatgcgacgtgaaattggtcgggacaccgctaacgcacaggagatttctccgaaggaacaggggaacctatggtccagccataaaagccggagaagccactttccctgggcaagcaacaccgatcccccagctcttttgctgcggtgactcgacctttccagggatcggagtgccggcagttgcggccagcggcgcgattgtggcgaacacgctggttccggtgtcgcagcattcagagctccttgacgctgttggaatctgagtggcagatacgtccgtcggtcctgaacgataatcaaagattttcccactgctgttggaaaaagatcgtatggctgaatggagaagaagacgacgacgacgaccgatacagtagagttttctagtcagaacggagactgggaaaatatgttgtacagtatattatttactacgactgcatgaagcttgtgctgcttctgacaaattggtcgcctcgttcgcctgcatgctccttgtattgttctaccgaaagctctgtggcgcatgcaggccttttgtcggacattttttttttctggtatacggaggaaggaccatgtgcttgtttgtacaactctagtcgcagtttgctgaagtccttgaacgacggcaacaaatgccagctgcgctgtcttttcattggagggcagcactggcctggttgttgtttattattattattattattattattattattattattattattattattattattattattattattattattattattatttaaaagagataataaggccaaaccaccatcgtctttcgtatacccccataaaagtccttttctcattttatgtgccta

SEQ ID NO: 47227 - DNA, 2475 bp, Zea Mays
cgccctgctcgtcgtctccccagtccccaccagttgccttcgcatcgccggacgccgctcgccctccgcttctgcgactacgtccgagatggccgcctcggcattggcctcccgcgcgctgcggcctccgcacggccgccaccctcccgccccttcgccgcgtccgcgtccgcgctcggcaaccgccgccgctccaaggacgcgctgccgcgcggtggctgcggacgagcgccccgccgaccccgcgttccccgagcgccagaaccgcgggatttccgggcttcgcctcctcatcgcgtcgcagttgtcgaccagggcggtggagaggccggaggcggacgtggttgtgataggcagcgggctcggcgggctgtgctgcgccggcctcctggcgaggtacggccaggacgtgctggtgctcgagagccatgaccgcccgggaggcgccgcgcactcgttcgatatcaagggattcaacttcgattcagggccatccttgttctccggattccagtccagaggcccccaggcaaatccacttgctcaggtccttgatgcattaggcgaatcagtcccttgtgcgtcttatgactcttggatggtttatgtacctgaaggacaattcctctcacggataggaccaactgaattcctcaaggaccttgagatgtttgttggtgttgacgctgtccaggagtggaaaaaacttcttgatgcagttattcctatgtctgcagctgcaatggctttgcctccgctttccattcgaggtgatctgggcattatatctacagctgttggtagatacactccttcgttgttgaaatcattcatacaaatgggaccgcaaggagctctgggcgctacgaaacttctacgtccattcaaagaaattgttgattcgctggagctgaaaaatccatttgttcgtaactggatcgatcttctgtgctttctacttgctggagttaaatctgatggtgctctttctgcagaaatgaatggtacaaaccaggatgcttgcttgagtaccctctgggtggaactggagcaataatagatgcccttgtgagcggtattgaaaaatttggtggcagacttgctcttcgttctcatgttgaaaagatcttaatagagaatggtcgagcagttggtgtcaagctacaaagtggacaagttatccgtgcaaagaaagcggttgttagcaatgcatctatgtgggacactttggatctgttaccacccgatgctgtcccaaaatcatatgaagatagagtgaaagcaactccacaatgtgaatcgtttatgcatctccaccttggttttgatgcagagaatgctagagaggaccttgggatccatcacattgtggttgatgattggaacaaaggagttgatggtgaacaaaatgttgttttgatatccgttcccagtgttcttagcaaggacctggcaccgcccggaaagcacattcttcatgcatatactccagggacagaacctttcagtttgtgggagggactggacaggaaaagtgcagaatatcgaagactgaaggaagaacgttctgaggtgatgtggaaagctgtggagcttgctctcggcccaaaatttagccgcgaaaaatgcgacgtgaaattggtcgggacaccgctaacgcacaggagatttctccgaaggaacaggggaacctatggtccagccataaaagccggagaagccactttccctgggcaagcaacaccgatcccccagctcttttgctgcggtgactcgacctttccagggatcggagtgccggcagttgcggccagcggcgcgattgtggcgaacacgctggttccggtgtcgcagcattcagagctccttgacgctgttggaatctgagtggcagatacgtccgtcggtcctgaacgataatcaaagattttcccactgctgttggaaaaagatcgtatggctgaatggagaagaagacgacgacgacgaccgatacagtagagttttctagtcagaacggagactgggaaaatatgttgtacagtatattatttactacgactgcatgaagcttgtgctgcttctgacaaattggtcgcctcgttcgcctgcatgctccttgtattgttctaccgaaagctctgtggcgcatgcaggccttttgtcggacattttttttttctggtatacggaggaaggaccatgtgcttgtttgtacaactctagtcgcagtttgctgaagtccttgaacgacggcaacaaatgccagctgcgctgtcttttcattggagggcagcactggcctggttgttgtttattattattattattattattattattattattattattattattattattattattattattattattattattattatttaaaagagataataaggccaaaccaccatcgtctttcgtatacccccataaaagtccttttctcattttatgtgccta

SEQ ID NO: 47228 - DNA, 1841 bp, Zea Mays
cgcaagttgctactactaaaagacaaatgcctcacagcacaggtatggcgtattctggacaaaggcatgctggtgttgggagctcctcgaggccagctaatggattcaagggggcagccaactcggtggagttcctgggtagggagatgctgggaatgcgactgagggatgccaagcccgacacagatgatgaaagggagatgtggtcaagttcagatgtgactgatagttctagtaatgaagctggtcatgtaatagcgactactgttcacgggcgcaacggcctgcctaaacagtctgtcacatacatcgctgaacatgtggttggaactggttcttttggggttgtgtatcaggcaaaatgccgagaaacaggggaaattgttgccataaaaaaggtccttcaagataagcgttataagaacagagagctgcaaatcatgcatatgcttgaccatcctaacatcatcggtcttaagcattacttcttttcaacaactgaaagggatgagctttatctcaaccttgttcttgagtttgttccagagacagtaaacaggattgcaaggcagtacaatcgaatgaatcagcggatgcccctcatttatgtcaaactgtacacgtatcagatatgccgagcgcttgcttatatacataactgcattggcatctgccaccgtgatatcaaaccgcagaatgttcttgttaacccacatacacaccaactcaaaatttgcgatttcggaagtgctaaagtattggtcagaggagagccaaacatctcctacatatgctcaaggtattatcgagcaccagagctcatatttggtgcaacggaatatactactgctattgatttgtggtcaacaggctgtgtcatggcagagctgcttctaggacaggctctgtttcctggagaaagtggagtcgaccaactagttgagatcatcaaggttttgggtactccaacaagggaagagatcaagtgcatgaacccaaactatacggagttcaagttcccacaaattaaagctcatccgtggcacaaggtttttcaaagaaggcttccacctgaagcagtggaccttgttagcaggtttctacaatactcaccaaatctacggtgcactgctttggaggcctgtatgcaccctttcttcgatgagctgagagacccaaacactcgtctacccaatggtcggcctctgccgcctctcttcaacttcagatctcaagagctaaaaggcgttcccccagaagtcatcgatcgccttgtcccagagcactcaagaaggcagagtttgttcatggcgctaaggacctagtttttgccgttctttttgcccccttttttcccaccgtttgccaccttgagggaagcttgtaaagctatagcttctcctttcccctcgtccttactttcctcccctctctttcttccgagctttgtgtggatgagagatccttgagatacactgctagagctgtgagttccaggatgtgaggttcgagtgtgtgtgatgtgcagttgtcgcctttgaggtcggagatttcagttgcagtgttgtgagaggcttgtgaagcttttttgtctacttttcagtgcttctctggcttgaagttttccttcaattcttgtgaactggcttcaagatttggcttcgtgaaccctgtgtgcgtgtaaaagtactggttggatgctgctgcaccaattctggaaaaaaaaagcttacaactaaacacctacttatgttttgtttagccaaattcagtgccttcctgttatgcattgcggttcaagatcagatgaatttatatagggtctgattatttagccaaat

SEQ ID NO: 47229 - DNA, 2861 bp, Zea Mays
tcccgataaatttctctggtcctttttcctaattcttttttaccggaaatggaaaagtttggaaggacccaaccccacccagctagaagctgccctcactcgctccagtctctccctctcatggcctcagcctcagcctcactcgctcgctcgcaccaccagctttgctccagagtcctgactcctcctagccttctcctccctctctcccctaccaccacacaacgggataaaccccagcacgaggccggagctgctgctggaaccgtcaggccgtgaagagcctgcggttcgatctgctgcaagagctcctcgtcgatctcttctctgcgaggtttcggtctgaggtatggcgtattctggacaaaggcatgctggtgttgggagctcctcgaggccagctaatggattcaagggggcagccaactcggtggagttcctgggtagggagatgctgggaatgcgactgagggatgccaagcccgacacagatgatgaaagggagatgtggtcaagttcagatgtgactgatagttctagtaatgaagctggtcatgtaatagcgactactgttcacgggcgcaacggcctgcctaaacagtctgtcacatacatcgctgaacatgtggttggaactggttcttttggggttgtgtatcaggcaaaatgccgagaaacaggggaaattgttgccataaaaaaggtccttcaagataagcgttataagaacagagagctgcaaatcatgcatatgcttgaccatcctaacatcatcggtcttaagcattacttcttttcaacaactgaaagggatgagctttatctcaaccttgttcttgagtttgttccagagacagtaaacaggattgcaaggcagtacaatcgaatgaatcagcggatgcccctcatttatgtcaaactgtacacgtatcagatatgccgagcgcttgcttatatacataactgcattggcatctgccaccgtgatatcaaaccgcagaatgttcttgtgagatatgattttttttcttttctataatgatttttgttgctttacatgtatcattcgcatttgttggatgttttgttgctgggatggtatgataacgccatagaatagcaattggtttttacaagtgggactgaatttttagatcatgtgtagcccgatgtcataattattggtagtttcacccaacatctacggcactagcagtttgaaattggaaatgtcaatccacgtgtgcattatttagtttcatatataggtgctatcccatgtgcatcattttattcctaggctgcacatatcatattttataccctgtgtatgctgtttttcttgtcaatggtatcttactatcttctcttgtggaacatttcgtcatcatctgttcttttataacaaggctggacaaaaaaccatgctcccagttccacagatgtcaattggttctgtacatcccactagtgcgtaaatgctaaactaattcaaaatttatttgagcaaactgtgagcctcggaaaggagcatggaagatcaatgcaactagctagcttgttaacccaccatgactccataaccgcatagattagagattgtttgaagaagcaggagaaactgaaactcaattgtagagtatgtacgaaacgaggtttccataattgccttctttttgtctcctttgaatgctgaggtagctactgtttagctacttgaccttttctttacctcgggaatagcagattacatatttatgatgagtgatgctttttgctaatacttctactgtaggttaacccacatacacaccaactcaaaatttgcgatttcggaagtgctaaagtattggtcagaggagagccaaacatctcctacatatgctcaaggctgtgtcatggcagagctgcttctaggacaggctctgtttcctggagaaagtggagtcgaccaactagttgagatcatcaaggttttgggtactccaacaagggaagagatcaagtgcatgaacccaaactatacggagttcaagttcccacaaattaaagctcatccgtggcacaaggtttttcaaagaaggcttccacctgaagcagtggaccttgttagcaggtttctacaatactcaccaaatctacggtgcactgctttggaggcctgtatgcaccctttcttcgatgagctgagagacccaaacactcgtctacccaatggtcggcctctgccgcctctcttcaacttcagatctcaagagctaaaaggcgttcccccagaagtcatcgatcgccttgtcccagagcactcaagaaggcagagtttgttcatggcgctaaggacctagtttttgccgttctttttgcccccttttttcccaccgtttgccaccttgagggaagcttgtaaagctatagcttctcctttcccctcgtccttactttcctcccctctctttcttccgagctttgtgtggatgagagatccttgagatacactgctagagctgtgagttccaggatgtgaggttcgagtgtgtgtgatgtgcagttgtcgcctttgaggtcggagatttcagttgcagtgttgtgagaggcttgtgaagcttttttgtctacttttcagtgcttctctggcttgaagttttccttcaattcttgtgaactggcttcaagatttggcttcgtgaaccctgtgtgcgtgtaaaagtactggttggatgctgctgcaccaattctggaaaaaaaaagcttacaactaaacacctacttatgttttgtttagccaaattcagtgccttcctgttatgcattgcggttcaagatcagatgaatttatatagggtctgattatttagccaaat

SEQ ID NO: 47230 - DNA, 2865 bp, Zea Mays
gtcctttttcctaattcttttttaccggaaatggaaaagtttggaaggacccaaccccacccagctagaagctgccctcactcgctccagtctctccctctcatggcctcagcctcagcctcactcgctcgctcgcaccaccagctttgctccagagtcctgactcctcctagccttctcctccctctctcccctaccaccacacaacgggataaaccccagcacgaggccggagctgctgctggaaccgtcaggccgtgaagagcctgcggttcgatctgctgcaagagctcctcgtcgatctcttctctgcgaggtttcggtctgagttaccacattgctggagtggaggtatggcgtattctggacaaaggcatgctggtgttgggagctcctcgaggccagctaatggattcaagggggcagccaactcggtggagttcctgggtagggagatgctgggaatgcgactgagggatgccaagcccgacacagatgatgaaagggagatgtggtcaagttcagatgtgactgatagttctagtaatgaagctggtcatgtaatagcgactactgttcacgggcgcaacggcctgcctaaacagtctgtcacatacatcgctgaacatgtggttggaactggttcttttggggttgtgtatcaggcaaaatgccgagaaacaggggaaattgttgccataaaaaaggtccttcaagataagcgttataagaacagagagctgcaaatcatgcatatgcttgaccatcctaacatcatcggtcttaagcattacttcttttcaacaactgaaagggatgagctttatctcaaccttgttcttgagtttgttccagagacagtaaacaggattgcaaggcagtacaatcgaatgaatcagcggatgcccctcatttatgtcaaactgtacacgtatcagatatgccgagcgcttgcttatatacataactgcattggcatctgccaccgtgatatcaaaccgcagaatgttcttgtgagatatgattttttttcttttctataatgatttttgttgctttacatgtatcattcgcatttgttggatgttttgttgctgggatggtatgataacgccatagaatagcaattggtttttacaagtgggactgaatttttagatcatgtgtagcccgatgtcataattattggtagtttcacccaacatctacggcactagcagtttgaaattggaaatgtcaatccacgtgtgcattatttagtttcatatataggtgctatcccatgtgcatcattttattcctaggctgcacatatcatattttataccctgtgtatgctgtttttcttgtcaatggtatcttactatcttctcttgtggaacatttcgtcatcatctgttcttttataacaaggctggacaaaaaaccatgctcccagttccacagatgtcaattggttctgtacatcccactagtgcgtaaatgctaaactaattcaaaatttatttgagcaaactgtgagcctcggaaaggagcatggaagatcaatgcaactagctagcttgttaacccaccatgactccataaccgcatagattagagattgtttgaagaagcaggagaaactgaaactcaattgtagagtatgtacgaaacgaggtttccataattgccttctttttgtctcctttgaatgctgaggtagctactgtttagctacttgaccttttctttacctcgggaatagcagattacatatttatgatgagtgatgctttttgctaatacttctactgtaggttaacccacatacacaccaactcaaaatttgcgatttcggaagtgctaaagtattggtcagaggagagccaaacatctcctacatatgctcaaggctgtgtcatggcagagctgcttctaggacaggctctgtttcctggagaaagtggagtcgaccaactagttgagatcatcaaggttttgggtactccaacaagggaagagatcaagtgcatgaacccaaactatacggagttcaagttcccacaaattaaagctcatccgtggcacaaggtttttcaaagaaggcttccacctgaagcagtggaccttgttagcaggtttctacaatactcaccaaatctacggtgcactgctttggaggcctgtatgcaccctttcttcgatgagctgagagacccaaacactcgtctacccaatggtcggcctctgccgcctctcttcaacttcagatctcaagagctaaaaggcgttcccccagaagtcatcgatcgccttgtcccagagcactcaagaaggcagagtttgttcatggcgctaaggacctagtttttgccgttctttttgcccccttttttcccaccgtttgccaccttgagggaagcttgtaaagctatagcttctcctttcccctcgtccttactttcctcccctctctttcttccgagctttgtgtggatgagagatccttgagatacactgctagagctgtgagttccaggatgtgaggttcgagtgtgtgtgatgtgcagttgtcgcctttgaggtcggagatttcagttgcagtgttgtgagaggcttgtgaagcttttttgtctacttttcagtgcttctctggcttgaagttttccttcaattcttgtgaactggcttcaagatttggcttcgtgaaccctgtgtgcgtgtaaaagtactggttggatgctgctgcaccaattctggaaaaaaaaagcttacaactaaacacctacttatgttttgtttagccaaattcagtgccttcctgttatgcattgcggttcaagatcagatgaatttatatagggtctgattatttagccaaat

SEQ ID NO: 47231 - DNA, 1970 bp, Zea Mays
ctttttcctaattcttttttaccggaaatggaaaagtttggaaggacccaaccccacccagctagaagctgccctcactcgctccagtctctccctctcatggcctcagcctcagcctcactcgctcgctcgcaccaccagctttgctccagagtcctgactcctcctagccttctcctccctctctcccctaccaccacacaacgggataaaccccagcacgaggccggagctgctgctggaaccgtcaggccgtgaagagcctgcggttcgatctgctgcaagagctcctcgtcgatctcttctctgcgaggtttcggtctgaggagatgtggtcaagttcagatgtgactgatagttctagtaatgaagctggtcatgtaatagcgactactgttcacgggcgcaacggcctgcctaaacagtctgtcacatacatcgctgaacatgtggttggaactggttcttttggggttgtgtatcaggcaaaatgccgagaaacaggggaaattgttgccataaaaaaggtccttcaagataagcgttataagaacagagagctgcaaatcatgcatatgcttgaccatcctaacatcatcggtcttaagcattacttcttttcaacaactgaaagggatgagctttatctcaaccttgttcttgagtttgttccagagacagtaaacaggattgcaaggcagtacaatcgaatgaatcagcggatgcccctcatttatgtcaaactgtacacgtatcagatatgccgagcgcttgcttatatacataactgcattggcatctgccaccgtgatatcaaaccgcagaatgttcttgttaacccacatacacaccaactcaaaatttgcgatttcggaagtgctaaagtattggtcagaggagagccaaacatctcctacatatgctcaaggtattatcgagcaccagagctcatatttggtgcaacggaatatactactgctattgatttgtggtcaacaggctgtgtcatggcagagctgcttctaggacaggctctgtttcctggagaaagtggagtcgaccaactagttgagatcatcaaggttttgggtactccaacaagggaagagatcaagtgcatgaacccaaactatacggagttcaagttcccacaaattaaagctcatccgtggcacaaggtttttcaaagaaggcttccacctgaagcagtggaccttgttagcaggtttctacaatactcaccaaatctacggtgcactgctttggaggcctgtatgcaccctttcttcgatgagctgagagacccaaacactcgtctacccaatggtcggcctctgccgcctctcttcaacttcagatctcaagagctaaaaggcgttcccccagaagtcatcgatcgccttgtcccagagcactcaagaaggcagagtttgttcatggcgctaaggacctagtttttgccgttctttttgcccccttttttcccaccgtttgccaccttgagggaagcttgtaaagctatagcttctcctttcccctcgtccttactttcctcccctctctttcttccgagctttgtgtggatgagagatccttgagatacactgctagagctgtgagttccaggatgtgaggttcgagtgtgtgtgatgtgcagttgtcgcctttgaggtcggagatttcagttgcagtgttgtgagaggcttgtgaagcttttttgtctacttttcagtgcttctctggcttgaagttttccttcaattcttgtgaactggcttcaagatttggcttcgtgaaccctgtgtgcgtgtaaaagtactggttggatgctgctgcaccaattctggaaaaaaaaagcttacaactaaacacctacttatgttttgtttagccaaattcagtgccttcctgttatgcattgcggttcaagatcagatgaatttatatagggtctgattatttagccaaat

SEQ ID NO: 47232 - DNA, 4089 bp, Zea Mays
gctgccctcactcgctccagtctctccctctcatggcctcagcctcagcctcactcgctcgctcgcaccaccagctttgctccagagtcctgactcctcctagccttctcctccctctctcccctaccaccacacaacgggataaaccccagcacgaggccggagctgctgctggaaccgtcaggccgtgaagagcctgcggttcgatctgctgcaagagctcctcgtcgatctcttctctgcgaggtttcggtctgaggtatggcgtattctggacaaaggcatgctggtgttgggagctcctcgaggccagctaatggattcaagggggcagccaactcggtggagttcctgggtagggagatgctgggaatgcgactgagggatgccaagcccgacacagatgatgaaagggagatgtggtcaagttcagatgtgactgatagttctagtaatgaagctggtcatgtaatagcgactactgttcacgggcgcaacggcctgcctaaacagtctgtcacatacatcgctgaacatgtggttggaactggttcttttggggttgtgtatcaggcaaaatgccgagaaacaggggaaattgttgccataaaaaaggtccttcaagataagcgttataagaacagagagctgcaaatcatgcatatgcttgaccatcctaacatcatcggtcttaagcattacttcttttcaacaactgaaagggatgagctttatctcaaccttgttcttgagtttgttccagagacagtaaacaggattgcaaggcagtacaatcgaatgaatcagcggatgcccctcatttatgtcaaactgtacacgtatcaggtctgccttgactaggtggtttttactaatcattcatgttaaatgctgttttttctttataattttttcgttcagttttaccattggtcttctagctatagcacttctttgcacactattaaaaaaatcttttctctatgcattttttggaatagtacaaaaaagcatcttagaagccctcgcacactattattatcatttaactgattttaaagaagagaaggggacagataccggaaaatgagggtactagtttggtagagttgtctaatggtcatgcgcatgccgcatgccacatgttccgcaatcaaccttacgcatcatggattctgcaggacattattttgtcatgttcattcatttgaaataagcttaaagcaatggagaaaacagagcatgggtccccatgacttcctctggtactgggtcctgccccctttagtcatatagggtcacaaatcaaaataatatacatgtttgacttaggtctattttggaccgtttctgtcttttcttaatatattgaaacgcagctctcctgcattttcgagagaagaaaatgtatgagtgtgtctgttccctgaaaactaaacatgttactactttaatgtatgtgctaccttgtagaactaaaattgtggcgacatcggtagcttcttggcatccatatttatgttttatcctttgaaacagaatatatattcctcatgttcttcaacagtagcactgtactggaagtatggaacttctattggagttgcctatcaatgattcacattgtttgtttccatgcagaatctaagataaatattattgagacataatggtgacagcttgtcaattatcctgcctttggaattattttctactacttgcttcctatatgtttagagtgatctgtttgaatgatcacttgggtttacgacgcgtgtccaccagacatttaaattcctgagtttagttgacgtagtgattttaatccattcttcacggactagtactgtctgtttattgtatgacttacagttagtgcaggcatgaatgtttgcatgactcaaatcttattttgattcagctgtattttgtcttttatgacagtgagaatatctgctattctgttttaatataattttgtttgctccatacaatcgttggagtcaaacaatttctagctgccttaccttttagtgtcatacccaatcgcagatttctgctttgcattaatttatctaatttgtcctgcagatatgccgagcgcttgcttatatacataactgcattggcatctgccaccgtgatatcaaaccgcagaatgttcttgtgagatatgattttttttcttttctataatgatttttgttgctttacatgtatcattcgcatttgttggatgttttgttgctgggatggtatgataacgccatagaatagcaattggtttttacaagtgggactgaatttttagatcatgtgtagcccgatgtcataattattggtagtttcacccaacatctacggcactagcagtttgaaattggaaatgtcaatccacgtgtgcattatttagtttcatatataggtgctatcccatgtgcatcattttattcctaggctgcacatatcatattttataccctgtgtatgctgtttttcttgtcaatggtatcttactatcttctcttgtggaacatttcgtcatcatctgttcttttataacaaggctggacaaaaaaccatgctcccagttccacagatgtcaattggttctgtacatcccactagtgcgtaaatgctaaactaattcaaaatttatttgagcaaactgtgagcctcggaaaggagcatggaagatcaatgcaactagctagcttgttaacccaccatgactccataaccgcatagattagagattgtttgaagaagcaggagaaactgaaactcaattgtagagtatgtacgaaacgaggtttccataattgccttctttttgtctcctttgaatgctgaggtagctactgtttagctacttgaccttttctttacctcgggaatagcagattacatatttatgatgagtgatgctttttgctaatacttctactgtaggttaacccacatacacaccaactcaaaatttgcgatttcggaagtgctaaagtattggtcagaggagagccaaacatctcctacatatgctcaaggtattatcgagcaccagagctcatatttggtgcaacggaatatactactgctattgatttgtggtcaacaggctgtgtcatggcagagctgcttctaggacaggctctgtttcctggagaaagtggagtcgaccaactagttgagatcatcaaggttttgggtactccaacaagggaagagatcaagtgcatgaacccaaactatacggagttcaagttcccacaaattaaagctcatccgtggcacaaggtttttcaaagaaggcttccacctgaagcagtggaccttgttagcaggtttctacaatactcaccaaatctacggtgcactgctttggaggcctgtatgcaccctttcttcgatgagctgagagacccaaacactcgtctacccaatggtcggcctctgccgcctctcttcaacttcagatctcaagagctaaaaggcgttcccccagaagtcatcgatcgccttgtcccagagcactcaagaaggcagagtttgttcatggcgctaaggacctagtttttgccgttctttttgcccccttttttcccaccgtttgccaccttgagggaagcttgtaaagctatagcttctcctttcccctcgtccttactttcctcccctctctttcttccgagctttgtgtggatgagagatccttgagatacactgctagagctgtgagttccaggatgtgaggttcgagtgtgtgtgatgtgcagttgtcgcctttgaggtcggagatttcagttgcagtgttgtgagaggcttgtgaagcttttttgtctacttttcagtgcttctctggcttgaagttttccttcaattcttgtgaactggcttcaagatttggcttcgtgaaccctgtgtgcgtgtaaaagtactggttggatgctgctgcaccaattctggaaaaaaaaagcttacaactaaacacctacttatgttttgtttagccaaattcagtgccttcctgttatgcattgcggttcaagatcagatgaatttatatagggtctgattatttagccaaat

SEQ ID NO: 47233 - DNA, 3320 bp, Zea Mays
gccctcactcgctccagtctctccctctcatggcctcagcctcagcctcactcgctcgctcgcaccaccagctttgctccagagtcctgactcctcctagccttctcctccctctctcccctaccaccacacaacgggataaaccccagcacgaggccggagctgctgctggaaccgtcaggccgtgaagagcctgcggttcgatctgctgcaagagctcctcgtcgatctcttctctgcgaggtttcggtctgaggtactggctgtggattctttgatccgagacccatcccctatctctctctctctctcctatgggcgcggctttcgcccgattatcgggaggtattgtatttgggacggattgacccgcttatctgagaggatcttcactccagtttcgagtttgatctgccactatttggagaaagccacggctgttcttctgcttgatctctgggtggttggtgtagcagtgcttctagcgtgttctctgaattggttgaatcaccagcacaagatttgttgcgtttccccccctccgctctatttctgcgattttgcacgaaaatgatcctgtcatggacatttttggttgtcatttaatttgcctggcattcgaattggcaacatgatcttccacaaaagcgaagaaactgcgcgcccagtatttgcccatcttgaccttggtgatctcgattgagccttaccagttaccacattgctggagtggaggtatggcgtattctggacaaaggcatgctggtgttgggagctcctcgaggccagctaatggattcaagggggcagccaactcggtggagttcctgggtagggagatgctgggaatgcgactgagggatgccaagcccgacacagatgatgaaagggagatgtggtcaagttcagatgtgactgatagttctagtaatgaagctggtcatgtaatagcgactactgttcacgggcgcaacggcctgcctaaacagtctgtcacatacatcgctgaacatgtggttggaactggttcttttggggttgtgtatcaggcaaaatgccgagaaacaggggaaattgttgccataaaaaaggtccttcaagataagcgttataagaacagagagctgcaaatcatgcatatgcttgaccatcctaacatcatcggtcttaagcattacttcttttcaacaactgaaagggatgagctttatctcaaccttgttcttgagtttgttccagagacagtaaacaggattgcaaggcagtacaatcgaatgaatcagcggatgcccctcatttatgtcaaactgtacacgtatcagatatgccgagcgcttgcttatatacataactgcattggcatctgccaccgtgatatcaaaccgcagaatgttcttgtgagatatgattttttttcttttctataatgatttttgttgctttacatgtatcattcgcatttgttggatgttttgttgctgggatggtatgataacgccatagaatagcaattggtttttacaagtgggactgaatttttagatcatgtgtagcccgatgtcataattattggtagtttcacccaacatctacggcactagcagtttgaaattggaaatgtcaatccacgtgtgcattatttagtttcatatataggtgctatcccatgtgcatcattttattcctaggctgcacatatcatattttataccctgtgtatgctgtttttcttgtcaatggtatcttactatcttctcttgtggaacatttcgtcatcatctgttcttttataacaaggctggacaaaaaaccatgctcccagttccacagatgtcaattggttctgtacatcccactagtgcgtaaatgctaaactaattcaaaatttatttgagcaaactgtgagcctcggaaaggagcatggaagatcaatgcaactagctagcttgttaacccaccatgactccataaccgcatagattagagattgtttgaagaagcaggagaaactgaaactcaattgtagagtatgtacgaaacgaggtttccataattgccttctttttgtctcctttgaatgctgaggtagctactgtttagctacttgaccttttctttacctcgggaatagcagattacatatttatgatgagtgatgctttttgctaatacttctactgtaggttaacccacatacacaccaactcaaaatttgcgatttcggaagtgctaaagtattggtcagaggagagccaaacatctcctacatatgctcaaggtattatcgagcaccagagctcatatttggtgcaacggaatatactactgctattgatttgtggtcaacaggctgtgtcatggcagagctgcttctaggacaggctctgtttcctggagaaagtggagtcgaccaactagttgagatcatcaaggttttgggtactccaacaagggaagagatcaagtgcatgaacccaaactatacggagttcaagttcccacaaattaaagctcatccgtggcacaaggtttttcaaagaaggcttccacctgaagcagtggaccttgttagcaggtttctacaatactcaccaaatctacggtgcactgctttggaggcctgtatgcaccctttcttcgatgagctgagagacccaaacactcgtctacccaatggtcggcctctgccgcctctcttcaacttcagatctcaagagctaaaaggcgttcccccagaagtcatcgatcgccttgtcccagagcactcaagaaggcagagtttgttcatggcgctaaggacctagtttttgccgttctttttgcccccttttttcccaccgtttgccaccttgagggaagcttgtaaagctatagcttctcctttcccctcgtccttactttcctcccctctctttcttccgagctttgtgtggatgagagatccttgagatacactgctagagctgtgagttccaggatgtgaggttcgagtgtgtgtgatgtgcagttgtcgcctttgaggtcggagatttcagttgcagtgttgtgagaggcttgtgaagcttttttgtctacttttcagtgcttctctggcttgaagttttccttcaattcttgtgaactggcttcaagatttggcttcgtgaaccctgtgtgcgtgtaaaagtactggttggatgctgctgcaccaattctggaaaaaaaaagcttacaactaaacacctacttatgttttgtttagccaaattcagtgccttcctgttatgcattgcggttcaagatcagatgaatttatatagggtctgattatttagccaaat

SEQ ID NO: 47234 - DNA, 1635 bp, Zea Mays
gccctcactcgctccagtctctccctctcatggcctcagcctcagcctcactcgctcgctcgcaccaccagctttgctccagagtcctgactcctcctagccttctcctccctctctcccctaccaccacacaacgggataaaccccagcacgaggccggagctgctgctggaaccgtcaggccgtgaagagcctgcggttcgatctgctgcaagagctcctcgtcgatctcttctctgcgaggtttcggtctgaggagatgtggtcaagttcagatgtgactgatagttctagtaatgaagctggtcatgtaatagcgactactgttcacgggcgcaacggcctgcctaaacagtctgtcacatacatcgctgaacatgtggttggaactggttcttttggggttgtgtatcagagacagtaaacaggattgcaaggcagtacaatcgaatgaatcagcggatgcccctcatttatgtcaaactgtacacgtatcaggttaacccacatacacaccaactcaaaatttgcgatttcggaagtgctaaagtattggtcagaggagagccaaacatctcctacatatgctcaaggtattatcgagcaccagagctcatatttggtgcaacggaatatactactgctattgatttgtggtcaacaggctgtgtcatggcagagctgcttctaggacaggctctgtttcctggagaaagtggagtcgaccaactagttgagatcatcaaggttttgggtactccaacaagggaagagatcaagtgcatgaacccaaactatacggagttcaagttcccacaaattaaagctcatccgtggcacaaggtttttcaaagaaggcttccacctgaagcagtggaccttgttagcaggtttctacaatactcaccaaatctacggtgcactgctttggaggcctgtatgcaccctttcttcgatgagctgagagacccaaacactcgtctacccaatggtcggcctctgccgcctctcttcaacttcagatctcaagagctaaaaggcgttcccccagaagtcatcgatcgccttgtcccagagcactcaagaaggcagagtttgttcatggcgctaaggacctagtttttgccgttctttttgcccccttttttcccaccgtttgccaccttgagggaagcttgtaaagctatagcttctcctttcccctcgtccttactttcctcccctctctttcttccgagctttgtgtggatgagagatccttgagatacactgctagagctgtgagttccaggatgtgaggttcgagtgtgtgtgatgtgcagttgtcgcctttgaggtcggagatttcagttgcagtgttgtgagaggcttgtgaagcttttttgtctacttttcagtgcttctctggcttgaagttttccttcaattcttgtgaactggcttcaagatttggcttcgtgaaccctgtgtgcgtgtaaaagtactggttggatgctgctgcaccaattctggaaaaaaaaagcttacaactaaacacctacttatgttttgtttagccaaattcagtgccttcctgttatgcattgcggttcaagatcagatgaatttatatagggtctgattatttagccaaat

SEQ ID NO: 47235 - DNA, 1247 bp, Zea Mays
agaaaacagagcatgggtccccatgacttcctctgatatgccgagcgcttgcttatatacataactgcattggcatctgccaccgtgatatcaaaccgcagaatgttcttgttaacccacatacacaccaactcaaaatttgcgatttcggaagtgctaaagtattggtcagaggagagccaaacatctcctacatatgctcaaggtattatcgagcaccagagctcatatttggtgcaacggaatatactactgctattgatttgtggtcaacaggctgtgtcatggcagagctgcttctaggacaggctctgtttcctggagaaagtggagtcgaccaactagttgagatcatcaaggttttgggtactccaacaagggaagagatcaagtgcatgaacccaaactatacggagttcaagttcccacaaattaaagctcatccgtggcacaaggtttttcaaagaaggcttccacctgaagcagtggaccttgttagcaggtttctacaatactcaccaaatctacggtgcactgctttggaggcctgtatgcaccctttcttcgatgagctgagagacccaaacactcgtctacccaatggtcggcctctgccgcctctcttcaacttcagatctcaagagctaaaaggcgttcccccagaagtcatcgatcgccttgtcccagagcactcaagaaggcagagtttgttcatggcgctaaggacctagtttttgccgttctttttgcccccttttttcccaccgtttgccaccttgagggaagcttgtaaagctatagcttctcctttcccctcgtccttactttcctcccctctctttcttccgagctttgtgtggatgagagatccttgagatacactgctagagctgtgagttccaggatgtgaggttcgagtgtgtgtgatgtgcagttgtcgcctttgaggtcggagatttcagttgcagtgttgtgagaggcttgtgaagcttttttgtctacttttcagtgcttctctggcttgaagttttccttcaattcttgtgaactggcttcaagatttggcttcgtgaaccctgtgtgcgtgtaaaagtactggttggatgctgctgcaccaattctggaaaaaaaaagcttacaactaaacacctacttatgttttgtttagccaaattcagtgccttcctgttatgcattgcggttcaagatcagatgaatttatatagggtctgattatttagccaaat

SEQ ID NO: 47236 - DNA, 110 bp, Zea Mays
cacacccctgcctaagcagtggagaggtaaagcatcacagtagtctggaggaaactgacaacacaccggtgaccaagcagtggagaggaggagcatcacagtagtctcgt

SEQ ID NO: 47237 - DNA, 485 bp, Zea Mays
cacgcactagttcgcatcaagcttcaagcatccccacacgcactccgcctccgctccgctgtctccaccggtagccctactactcgctgggcatcagttacccttggggctggtgtggggataggggctgcatacactgaatgctcatacttgttcagtggtggtcctccaaattggtcacccaaagtatcaacaattccttctgcacactctgaaggagaagacaagtaaacccttgcccgttggatggtggagttgtggtgtgtgtgaagtactggctgtttgtgctggatattgcactgcctgtggccataccatagcatgcattgagttttctggcaaacccattgaattccccaattgtggtctagcgaggaagtgcctttgcttggtaacttgttcgcgccatacttctggggctgtatcatcgccaaaccatgcgacgcttacttatttcatttggttctctgcatgcttctccccaa

SEQ ID NO: 47238 - DNA, 1189 bp, Zea Mays
cttgttcccattatcacggcggcggtggcggagcgtaaggcgaaggagtagcagcagcaggcggcgccgagtagcggctccccatctcgagcttgccaccatgaggattgaagaagcatttgaagaggctcaatgcccccaagcattggatgctggacaagcttggcggagcttttgctcccaagccatcttctggacctcacaagtctagggagtgcctgccactgatcctcatcatcaggaacaggctcaagtatgctcttacataccgtgaggtcatttccatcctgatgcaacgccatgtacttgttgatggcaaggtcaggacagacaagacctaccctgctgggttcatggatgtcatttccatccccaagaccaatgagaactacaggctgctgtacgataccaagggccgcttccgccttcacccaatcagggatgaggatgctaagttcaagctttgcaaggttaggtctgttcagtttgggcagaagggcatcccttatctgaacacgtatgacggccgcaccatccgctaccctgaccccctcatcaaggccaacgacaccatcaagatcgatctggagaccaacaagattgtggacttcatcaagtttgatgttggcaacgtcgtcatggtgactggcggaaggaacactggccgcgtgggtgttatcaagaacagggagaagcacaagggcagctttgagaccattcacgtggaggactccctgggccaccagttcgccacccgtatgggcaacgtgttcaccatcggcaagggtaataagccgtgggtgagcctgcccaagggcaagggaatcaagctgagcatcatagaagagcaaaggaagcgggatgccgctgcccaggctgctgccaacgcataaatcctctgaatgtgctgtgttgagagttttttctagttgctctgcaaggatatagaacaatgttctaagactaccatgtttttaagtctgcctgatgcttataattcatgaacgatttttgcagctagctgtaatgtgactatttatcttatctgcttgttcaaccctgttgtcgtgtgttgattctctgtttcatggtcttttcactcgacagaaacagttatttcttaagaacttcaccattatattcacagctgtgaactatgatattggaagtctttggtcatttttcgttg

SEQ ID NO: 47239 - DNA, 1156 bp, Zea Mays
ccttttgcgcatagcgggggcggctgatgcacggttggctacctcagctattcgtcaggctactcgctagaggattgaagaagcatttgaagaggctcaatgcccccaagcattggatgctggacaagcttggcggagcttttgctcccaagccatcttctggacctcacaagtctagggagtgcctgccactgatcctcatcatcaggaacaggctcaagtatgctcttacataccgtgaggtcatttccatcctgatgcaacgccatgtacttgttgatggcaaggtcaggacagacaagacctaccctgctgggttcatggatgtcatttccatccccaagaccaatgagaactacaggctgctgtacgataccaagggccgcttccgccttcacccaatcagggatgaggatgctaagttcaagctttgcaaggttaggtctgttcagtttgggcagaagggcatcccttatctgaacacgtatgacggccgcaccatccgctaccctgaccccctcatcaaggccaacgacaccatcaagatcgatctggagaccaacaagattgtggacttcatcaagtttgatgttggcaacgtcgtcatggtgactggcggaaggaacactggccgcgtgggtgttatcaagaacagggagaagcacaagggcagctttgagaccattcacgtggaggactccctgggccaccagttcgccacccgtatgggcaacgtgttcaccatcggcaagggtaataagccgtgggtgagcctgcccaagggcaagggaatcaagctgagcatcatagaagagcaaaggaagcgggatgccgctgcccaggctgctgccaacgcataaatcctctgaatgtgctgtgttgagagttttttctagttgctctgcaaggatatagaacaatgttctaagactaccatgtttttaagtctgcctgatgcttataattcatgaacgatttttgcagctagctgtaatgtgactatttatcttatctgcttgttcaaccctgttgtcgtgtgttgattctctgtttcatggtcttttcactcgacagaaacagttatttcttaagaacttcaccattatattcacagctgtgaactatgatattggaagtctttggtcatttttcgttg

SEQ ID NO: 47240 - DNA, 1848 bp, Zea Mays
ctcccaccgcgcgggcccgcctcgcttcacgccgcggcaattacctccgcttcactgctcgcactcgctcgctcggctgctcctgccggctgccgagaagtctccctccctcccatggccgcggccacctccaccccatgctgagccaaaccccccaactagtttcagtgtccgcccagcagtcagcagaggaggagcgcgacagatcctcggcgccggcgcgccctccgggtcccccgccccaccaccactcacatcacatcacatggcggactccacgcaccacaccatccgccgcgccgcggcgcgcccgcgcggctggtgctgctcgttcgcgggcgtcccggagagccccgagcaccgccgcgcgctcccggcgcccgcctccgccgccgacgccgtcccgaagcctccgcctccgccgccgccaaagtccccgctggcgccgtcgtcgcacggctcgccctcgtccaagctcgcggggctcatcgacacgcggaggatcctctcgccgggccgcgtgtccccgatcgactccgaggggtcaccggcggcggcgccgagggagcaggccgcgcctttcgtggcggtgcgggaggacgaggacgagggcggggacggcggcgaggcgccggcgctggatctgaggctgtgcctcagggccagcgacggccggtgcgtcgccatggacctcgactccgccgtgctgtgcgggagcagcgccttcttcgccggcatggtgccggacgcatctgcggccgggggaaggagggtcgaggtggatggggtggacgacttggaggcgttcaaggacgcggtggagctcatgttcgagcccgacgccttgcggtggctcgccagggccggcgtgtcacgggcaaccgctgtgctccaggtttgctcctctattgcgttcgacaaaggagtcgaatcatgtttgaagtacatcgaggcagttccatggagcgagagcgaggaagagaagctgaaacacgtttttgccagatgcactttcggcgaatcagttagtaaagatgtgctggcaagattgcagcagcagtgcgcgagcggctcggaggacctggcggtgcagctcgtggaatctatcacgagcggagccaacaacggcgcgaggaaagaaatgcagtctttggtgagcggtctcctaagcagaagctcagtctaccataaggacctgtccggggtgaacaaggggggcctttaccgaatctgccgttcctgcttgagctcacttgtggaacttttcatggaggactcagatggcggccaagctatggcaccttcaggcagaaggcctatggttgaaaggatcagtcagcaaactgagaatctcaactggctcttggacatccttctgaacaacgacatggcagaagaatacgttgagctgtggggtacgcaggaggagctcatcagaatgcacgagcgagcatcgccgatgttcaggtacgagctcagccgggtatcggcgagcgtgttcatggctctggggagagggagaatccagtgccccagcgacacgaggagccagctgttccgtggatggttcaggcccatgcttgtggacttcggctggctgcagaggtgctccaaggggctggatgtgagagtcctggaggagaacctggggcaggccctgctcacccttccgctccacctacaacagagcttgttcgtagaatggtttcagtgctttgcgtctagaggcacaggaggatgccctaatctcagcagagctttccagatctggttcctctgtttgcaaagctggaatggatccatgcacgctggctggattggatcggccaggcagtcagcataagcgag

SEQ ID NO: 47241 - DNA, 434 bp, Zea Mays
gatcgacaaagcctagctatatattcaaaataataagaaaaatgtttttttaatcttacagttttttttttttttttgtaaacgtaacttgtgcctgttgtcccaccaaacggaatgggacttaaaaattagcttcttgtacgtctgattgcagcctgagccttgtacgtcgccatctcgatctctagaagcgtacacagcagcaattgataagcaaaaagttggtcttattgttgtttcgtgaatcttgacacacaggagctagagtctgcatagcgcaagccctcgctgcaaaggcaatgttggagccttttgcgactgtatttacaacgaccatcattatatatatatcgctaaagacttttagttgttgaatgcgtttttagtaaccaattgtacgtcgctgtaagtaaaccgtcataatgagagagacc

SEQ ID NO: 47242 - DNA, 1352 bp, Zea Mays
ttttttttttttttttcatgagaacattgtagcactaaggggattcagcttcgagaactacaaccttgtgttggcatatgattacatgccccgagggagcttggacaaagctcttcatgggaagaatgatggcacagagtttcttgtctgggagaggagaattaagatagcaattgacatcgcaagagcactcgaatttctccatctcggcggtgtgacccagtctgtgatccatggagatgttaagtcttcaaatatcctcctttcagaggattttggggcacggctctgcgatttcgggttagcaaagcgagtgtcggcttcgactccccacctaacatgtactgacatcaccgggacttttgggtacatggcgccggagtatttttcacacggggaggtcaacgagaagattgacgtctacgcattcggagttgttctgctggagattgtttcgggaaggaggcccatcacaccagggagcgcgaagggtcaagaaagcctggtcggttgggcgaagcctttgctgtccagtggcgggatcaagcacctggtcgatccgtttctggggaacgattacgactgcgatgagatggagaggatgacgctcgcggcctcgctttgcacgaggacgtcgtggcactctcgacctgagatgtcactggtcctgaaacttctccagggggacgacgagacgatgggctgggcgaggtcggccagcttcgacgggtcagacgaggaggccatcgcggcgggacctgacctgaacatgcagtcgcacctgagcctcgcgctcctcggggtggatgcggacgacacgctgtcgcgctgcagcagcacggagcgcacctcggccgacggctactggagccggtcgtccagtttcgactagcggtagctgcgtgatggaactgatgcggcagagtagagtagtggtagtgtggttacgtacagcaggcaggcaggcaggcgattggtatgcttggtgagatggatgttcatatcaggattcaggtggttggaatgtggacagctgctgatttagtttagatggcagtgttgctttgctgatttggctaggagtcgagttctgttggtagtatagatctgaatctgaccttacgatgcaattggtttcgtatttgtattgttatcttttttttttcctttatcaagtcttcatgcaagaataggctaccaattggttgttggataggcttgtctagcaacaagcctgtaagataagggacttggtaggaaagaatctgcaggatgaataaacctgtgaggattaaattaattgccgttagcccatggtggccagccagagccaacttgggcttcaaggcctt

SEQ ID NO: 47243 - DNA, 3578 bp, Zea Mays
cgcagtcacagactagggcatctccaggattaagaacacaagcgggaaagttaacaaatcctgacgtaaaaaaaaactcggattccacaccgtgtgagaaaaagagagggggaaggaaaaagggcggcaggcgaaatgcgcaacgggacggtgtgaaaagagcggttgctggcaacccaaatggtgggacttggagagagaaaccgcagcagcacaactgccacaagcaaagcaagccagcctgcgctgcgagagggaggaccgaggagggagagggagagagagagaccggacaggcgggcagcaagcaacgggcacgaaccgccgccgacctctcacaggcggaggagggagggaccgagggagagacgctctcctctctctctctctcacacacacacgcacagtcccatggtcgcgcacgccgcagcatccgcatccgcatccgcctcctccctgtgagtcgccgagcgacgccgcgcagatgaaggtgtcgtccaggaagaaaccgccgccgcagcaacagcgggaggagacggaggagcaagggtcgtcgggggcggccgaggccatggacgccgccgcagccgcggccgttcaggaggaggcggaggcggaggcggaggcggaggcggaggggaggacagtgctggtaggcgtgcgcgcggacgccgagagccgggcgctgctcacctgggtgctcgtcaatgtggccgcgcccctggaccgcgtcgtcgccgtccacgtcgcgccgccgtccgccgccgaggcggtcgacttcgacgccatgctcgccgtctacgagggcttctgcaacctcaagcagatcaatctaaacctgaagatttgcaaggactcgtcggtgcgcaaggcgctagttcgtgaggccagcctgttcggggccgcaaaggttgtcctcggcgtcgccaagaagaggcgtgcgatttcgtcgtcgcactcagttgcaaagtactgcgcaaagaagctgcccgcgaagtgtgcggtcctcgccgtgagcaatggcaagattgagttccggagagagtcgagcgtccatccagatgacggtgagggtgacgccacgcgtgactttggcaccaagggaagtgaattggagaatttgtcaacggatcaggtcgagatcgacgcagatccttctagtacaaatgctgaagagtcaactgtcaaacagggagacgagatttccgagcttccaggtaagggtgccagtgtgctctactgtgttcttcctgagagaagcagcggttctgttgcaagtacatctagtaggcaagaccaagattcagtggatctgccatctgaaggggctggggagctatattgcttattgccacccaggaatggccattcagtcaggagcattggtgattctaagcgttcaaatgcgagccaaaaggatgataaaccagccaatccatcactggaaggagatggcgatctgtactgccggctgccgaggactggacgaccgggtaggaattctgggggatccaatcgttctgccggtataagaggtgcagttaggcgtagcagtagtttctccagcgatatccatctgagctcagagacatcacctattaagaaggatggctcggttagcatgactgccaccgaaaggagttcttctgctgtatccacagaagctgaggactcaccgaaatacaccgcacgaactgctgaaacaccctcgagctccccaatgtcgctgagacggatggtagaggggagatctgaccgctgtcacctccatagaagaatctttagacatcaaagaagttcatcttttgaatgggcaaagatctcaatggttcaatgggcgatgagacttccgagccgatacacttcggtccacccagatggcaaaccactgaaaccgggtgcaagtccaaggctgaactgtgattctgaaactgagtccactgcagctgttgagccagaatcaatgttttctttcgctttctatgatgtagcatggcctccaagtgaactggaatcactgcgagagaagtattcttcagtttgtaggatgttttcttatgaagaactgaagcttgcgacgtccaactactcacctgatatgttaattgggaagggtggaaccagccaggttttcaaggcacaacttgatggcggaacatttgctgccataaagattctgaaaccctcggttgatgcaatacacgagtttgttacggaggttgagaccgtaaccagcttgcagcatgagaacattgtagcactaaggggattcagcttcgagaactacaaccttgtgttggcatatgattacatgccccgagggagcttggacaaagctcttcatgggaagaatgatggcacagagtttcttgtctgggagaggagaattaagatagcaattgacatcgcaagagcactcgaatttctccatctcggcggtgtgacccagtctgtgatccatggagatgttaagtcttcaaatatcctcctttcagaggattttggggcacggctctgcgatttcgggttagcaaagcgagtgtcggcttcgactccccacctaacatgtactgacatcaccgggacttttgggtacatggcgccggagtatttttcacacggggaggtcaacgagaagattgacgtctacgcattcggagttgttctgctggagattgtttcgggaaggaggcccatcacaccagggagcgcgaagggtcaagaaagcctggtcggttgggcgaagcctttgctgtccagtggcgggatcaagcacctggtcgatccgtttctggggaacgattacgactgcgatgagatggagaggatgacgctcgcggcctcgctttgcacgaggacgtcgtggcactctcgacctgagatgtcactggtcctgaaacttctccagggggacgacgagacgatgggctgggcgaggtcggccagcttcgacgggtcagacgaggaggccatcgcggcgggacctgacctgaacatgcagtcgcacctgagcctcgcgctcctcggggtggatgcggacgacacgctgtcgcgctgcagcagcacggagcgcacctcggccgacggctactggagccggtcgtccagtttcgactagcggtagctgcgtgatggaactgatgcggcagagtagagtagtggtagtgtggttacgtacagcaggcaggcaggcaggcgattggtatgcttggtgagatggatgttcatatcaggattcaggtggttggaatgtggacagctgctgatttagtttagatggcagtgttgctttgctgatttggctaggagtcgagttctgttggtagtatagatctgaatctgaccttacgatgcaattggtttcgtatttgtattgttatcttttttttttcctttatcaagtcttcatgcaagaataggctaccaattggttgttggataggcttgtctagcaacaagcctgtaagataagggacttggtaggaaagaatctgcaggatgaataaacctgtgaggattaaattaattgccgttagcccatggtggccagccagagccaacttgggcttcaaggcctt

SEQ ID NO: 47244 - DNA, 3343 bp, Zea Mays
aaaagagcggttgctggcaacccaaatggtgggacttggagagagaaaccgcagcagcacaactgccacaagcaaagcaagccagcctgcgctgcgagagggaggaccgaggagggagagggagagagagagaccggacaggcgggcagcaagcaacgggcacgaaccgccgccgacctctcacaggcggaggagggagggaccgagggagagacgctctcctctctctctctctcacacacacacgcacagtcccatggtcgcgcacgccgcagcatccgcatccgcatccgcctcctccctgtgagtcgccgagcgacgccgcgcagatgaaggtgtcgtccaggaagaaaccgccgccgcagcaacagcgggaggagacggaggagcaagggtcgtcgggggcggccgaggccatggacgccgccgcagccgcggccgttcaggaggaggcggaggcggaggcggaggcggaggcggaggggaggacagtgctggtaggcgtgcgcgcggacgccgagagccgggcgctgctcacctgggtgctcgtcaatgtggccgcgcccctggaccgcgtcgtcgccgtccacgtcgcgccgccgtccgccgccgaggcggtcgacttcgacgccatgctcgccgtctacgagggcttctgcaacctcaagcagatcaatctaaacctgaagatttgcaaggactcgtcggtgcgcaaggcgctagttcgtgaggccagcctgttcggggccgcaaaggttgtcctcggcgtcgccaagaagaggcgtgcgatttcgtcgtcgcactcagttgcaaagtactgcgcaaagaagctgcccgcgaagtgtgcggtcctcgccgtgagcaatggcaagattgagttccggagagagtcgagcgtccatccagatgacggtgagggtgacgccacgcgtgactttggcaccaagggaagtgaattggagaatttgtcaacggatcaggtcgagatcgacgcagatccttctagtacaaatgctgaagagtcaactgtcaaacagggagacgagatttccgagcttccaggtaagggtgccagtgtgctctactgtgttcttcctgagagaagcagcggttctgttgcaagtacatctagtaggcaagaccaagattcagtggatctgccatctgaaggggctggggagctatattgcttattgccacccaggaatggccattcagtcaggagcattggtgattctaagcgttcaaatgcgagccaaaaggatgataaaccagccaatccatcactggaaggagatggcgatctgtactgccggctgccgaggactggacgaccgggtaggaattctgggggatccaatcgttctgccggtataagaggtgcagttaggcgtagcagtagtttctccagcgatatccatctgagctcagagacatcacctattaagaaggatggctcggttagcatgactgccaccgaaaggagttcttctgctgtatccacagaagctgaggactcaccgaaatacaccgcacgaactgctgaaacaccctcgagctccccaatgtcgctgagacggatggtagaggggagatctgaccgctgtcacctccatagaagaatctttagacatcaaagaagttcatcttttgaatgggcaaagatctcaatggttcaatgggcgatgagacttccgagccgatacacttcggtccacccagatggcaaaccactgaaaccgggtgcaagtccaaggctgaactgtgattctgaaactgagtccactgcagctgttgagccagaatcaatgttttctttcgctttctatgatgtagcatggcctccaagtgaactggaatcactgcgagagaagtattcttcagtttgtaggatgttttcttatgaagaactgaagcttgcgacgtccaactactcacctgatatgttaattgggaagggtggaaccagccaggttttcaaggcacaacttgatggcggaacatttgctgccataaagattctgaaaccctcggttgatgcaatacacgagtttgttacggaggttgagaccgtaaccagcttgcagcatgagaacattgtagcactaaggggattcagcttcgagaactacaaccttgtgttggcatatgattacatgccccgagggagcttggacaaagctcttcatgggaagaatgatggcacagagtttcttgtctgggagaggagaattaagatagcaattgacatcgcaagagcactcgaatttctccatctcggcggtgtgacccagtctgtgatccatggagatgttaagtcttcaaatatcctcctttcagaggattttggggcacgggtacatggcgccggagtatttttcacacggggaggtcaacgagaagattgacgtctacgcattcggagttgttctgctggagattgtttcgggaaggaggcccatcacaccagggagcgcgaagggtcaagaaagcctggtcggttgggcgaagcctttgctgtccagtggcgggatcaagcacctggtcgatccgtttctggggaacgattacgactgcgatgagatggagaggatgacgctcgcggcctcgctttgcacgaggacgtcgtggcactctcgacctgagatgtcactggtcctgaaacttctccagggggacgacgagacgatgggctgggcgaggtcggccagcttcgacgggtcagacgaggaggccatcgcggcgggacctgacctgaacatgcagtcgcacctgagcctcgcgctcctcggggtggatgcggacgacacgctgtcgcgctgcagcagcacggagcgcacctcggccgacggctactggagccggtcgtccagtttcgactagcggtagctgcgtgatggaactgatgcggcagagtagagtagtggtagtgtggttacgtacagcaggcaggcaggcaggcgattggtatgcttggtgagatggatgttcatatcaggattcaggtggttggaatgtggacagctgctgatttagtttagatggcagtgttgctttgctgatttggctaggagtcgagttctgttggtagtatagatctgaatctgaccttacgatgcaattggtttcgtatttgtattgttatcttttttttttcctttatcaagtcttcatgcaagaataggctaccaattggttgttggataggcttgtctagcaacaagcctgtaagataagggacttggtaggaaagaatctgcaggatgaataaacctgtgaggattaaattaattgccgttagcccatggtggccagccagagccaacttgggcttcaaggcctt

SEQ ID NO: 47245 - DNA, 3259 bp, Zea Mays
gtgggacttggagagagaaaccgcagcagcacaactgccacaagcaaagcaagccagcctgcgctgcgagagggaggaccgaggagggagagggagagagagagaccggacaggcgggcagcaagcaacgggcacgaaccgccgccgacctctcacaggcggaggagggagggaccgagggagagacgctctcctctctctctctctcacacacacacgcacagtcccatggtcgcgcacgccgcagcatccgcatccgcatccgcctcctccctgtgagtcgccgagcgacgccgcgcagatgaaggtgtcgtccaggaagaaaccgccgccgcagcaacagcgggaggagacggaggagcaagggtcgtcgggggcggccgaggccatggacgccgccgcagccgcggccgttcaggaggaggcggaggcggaggcggaggcggaggcggaggggaggacagtgctggtaggcgtgcgcgcggacgccgagagccgggcgctgctcacctgggtgctcgtcaatgtggccgcgcccctggaccgcgtcgtcgccgtccacgtcgcgccgccgtccgccgccgaggcggtcgacttcgacgccatgctcgccgtctacgagggcttctgcaacctcaagcagatcaatctaaacctgaagatttgcaaggactcgtcggtgcgcaaggcgctagttcgtgaggccagcctgttcggggccgcaaaggttgtcctcggcgtcgccaagaagaggcgtgcgatttcgtcgtcgcactcagttgcaaagtactgcgcaaagaagctgcccgcgaagtgtgcggtcctcgccgtgagcaatggcaagattgagttccggagagagtcgagcgtccatccaggtaaggtctcggcagaagttctcccgtgtggtgatgatgagatgtattgcgtagtgccgttccgagctcgtcaggctaaagggggcgcactttctttacaagaaaataaagatgacggtgagggtgacgccacgcgtgactttggcaccaagggaagtgaattggagaatttgtcaacggatcaggtcgagatcgacgcagatccttctagtacaaatgctgaagagtcaactgtcaaacagggagacgagatttccgagcttccaggtaagggtgccagtgtgctctactgtgttcttcctgagagaagcagcggttctgttgcaagtacatctagtaggcaagaccaagattcagtggatctgccatctgaaggggctggggagctatattgcttattgccacccaggaatggccattcagtcaggagcattggtgattctaagcgttcaaatgcgagccaaaaggatgataaaccagccaatccatcactggaaggagatggcgatctgtactgccggctgccgaggactggacgaccgggtaggaattctgggggatccaatcgttctgccggtataagaggtgcagttaggcgtagcagtagtttctccagcgatatccatctgagctcagagacatcacctattaagaaggatggctcggttagcatgactgccaccgaaaggagttcttctgctgtatccacagaagctgaggactcaccgaaatacaccgcacgaactgctgaaacaccctcgagctccccaatgtcgctgagacggatggtagaggggagatctgaccgctgtcacctccatagaagaatctttagacatcaaagaagttcatcttttgaatgggcaaagatctcaatggttcaatgggcgatgagacttccgagccgatacacttcggtccacccagatggcaaaccactgaaaccgggtgcaagtccaaggctgaactgtgattctgaaactgagtccactgcagctgttgagccagaatcaatgttttctttcgctttctatgatgtagcatggcctccaagtgaactggaatcactgcgagagaagtattcttcagtttgtaggatgttttcttatgaagaactgaagcttgcgacgtccaactactcacctgatatgttaattgggaagggtggaaccagccaggttttcaaggcacaacttgatggcggaacatttgctgccataaagattctgaaaccctcggttgatgcaatacacgagtttgttacggaggttgagaccgtaaccagcttgcagcatgagaacattgtagcactaaggggattcagcttcgagaactacaaccttgtgttggcatatgattacatgccccgagggagcttggacaaagctcttcatggtacatggcgccggagtatttttcacacggggaggtcaacgagaagattgacgtctacgcattcggagttgttctgctggagattgtttcgggaaggaggcccatcacaccagggagcgcgaagggtcaagaaagcctggtcggttgggcgaagcctttgctgtccagtggcgggatcaagcacctggtcgatccgtttctggggaacgattacgactgcgatgagatggagaggatgacgctcgcggcctcgctttgcacgaggacgtcgtggcactctcgacctgagatgtcactggtcctgaaacttctccagggggacgacgagacgatgggctgggcgaggtcggccagcttcgacgggtcagacgaggaggccatcgcggcgggacctgacctgaacatgcagtcgcacctgagcctcgcgctcctcggggtggatgcggacgacacgctgtcgcgctgcagcagcacggagcgcacctcggccgacggctactggagccggtcgtccagtttcgactagcggtagctgcgtgatggaactgatgcggcagagtagagtagtggtagtgtggttacgtacagcaggcaggcaggcaggcgattggtatgcttggtgagatggatgttcatatcaggattcaggtggttggaatgtggacagctgctgatttagtttagatggcagtgttgctttgctgatttggctaggagtcgagttctgttggtagtatagatctgaatctgaccttacgatgcaattggtttcgtatttgtattgttatcttttttttttcctttatcaagtcttcatgcaagaataggctaccaattggttgttggataggcttgtctagcaacaagcctgtaagataagggacttggtaggaaagaatctgcaggatgaataaacctgtgaggattaaattaattgccgttagcccatggtggccagccagagccaacttgggcttcaaggcctt

SEQ ID NO: 47246 - DNA, 3390 bp, Zea Mays
gtgggacttggagagagaaaccgcagcagcacaactgccacaagcaaagcaagccagcctgcgctgcgagagggaggaccgaggagggagagggagagagagagaccggacaggcgggcagcaagcaacgggcacgaaccgccgccgacctctcacaggcggaggagggagggaccgagggagagacgctctcctctctctctctctcacacacacacgcacagtcccatggtcgcgcacgccgcagcatccgcatccgcatccgcctcctccctgtgagtcgccgagcgacgccgcgcagatgaaggtgtcgtccaggaagaaaccgccgccgcagcaacagcgggaggagacggaggagcaagggtcgtcgggggcggccgaggccatggacgccgccgcagccgcggccgttcaggaggaggcggaggcggaggcggaggcggaggcggaggggaggacagtgctggtaggcgtgcgcgcggacgccgagagccgggcgctgctcacctgggtgctcgtcaatgtggccgcgcccctggaccgcgtcgtcgccgtccacgtcgcgccgccgtccgccgccgaggcggtcgacttcgacgccatgctcgccgtctacgagggcttctgcaacctcaagcagatcaatctaaacctgaagatttgcaaggactcgtcggtgcgcaaggcgctagttcgtgaggccagcctgttcggggccgcaaaggttgtcctcggcgtcgccaagaagaggcgtgcgatttcgtcgtcgcactcagttgcaaagtactgcgcaaagaagctgcccgcgaagtgtgcggtcctcgccgtgagcaatggcaagattgagttccggagagagtcgagcgtccatccagatgacggtgagggtgacgccacgcgtgactttggcaccaagggaagtgaattggagaatttgtcaacggatcaggtcgagatcgacgcagatccttctagtacaaatgctgaagagtcaactgtcaaacagggagacgagatttccgagcttccaggtaagggtgccagtgtgctctactgtgttcttcctgagagaagcagcggttctgttgcaagtacatctagtaggcaagaccaagattcagtggatctgccatctgaaggggctggggagctatattgcttattgccacccaggaatggccattcagtcaggagcattggtgattctaagcgttcaaatgcgagccaaaaggatgataaaccagccaatccatcactggaaggagatggcgatctgtactgccggctgccgaggactggacgaccgggtaggaattctgggggatccaatcgttctgccggtataagaggtgcagttaggcgtagcagtagtttctccagcgatatccatctgagctcagagacatcacctattaagaaggatggctcggttagcatgactgccaccgaaaggagttcttctgctgtatccacagaagctgaggactcaccgaaatacaccgcacgaactgctgaaacaccctcgagctccccaatgtcgctgagacggatggtagaggggagatctgaccgctgtcacctccatagaagaatctttagacatcaaagaagttcatcttttgaatgggcaaagatctcaatggttcaatgggcgatgagacttccgagccgatacacttcggtccacccagatggcaaaccactgaaaccgggtgcaagtccaaggctgaactgtgattctgaaactgagtccactgcagctgttgagccagaatcaatgttttctttcgctttctatgatgtagcatggcctccaagtgaactggaatcactgcgagagaagtattcttcagtttgtaggatgttttcttatgaagaactgaagcttgcgacgtccaactactcacctgatatgttaattgggaagggtggaaccagccaggttttcaaggcacaacttgatggcggaacatttgctgccataaagattctgaaaccctcggttgatgcaatacacgagtttgttacggaggttgagaccgtaaccagcttgcagcatgagaacattgtagcactaaggggattcagcttcgagaactacaaccttgtgttggcatatgattacatgccccgagggagcttggacaaagctcttcatgaatgatggcacagagtttcttgtctgggagaggagaattaagatagcaattgacatcgcaagagcactcgaatttctccatctcggcggtgtgacccagtctgtgatccatggagatgttaagtcttcaaatatcctcctttcagaggattttggggcacggctctgcgatttcgggttagcaaagcgagtgtcggcttcgactccccacctaacatgtactgacatcaccgggacttttgggtacatggcgccggagtatttttcacacggggaggtcaacgagaagattgacgtctacgcattcggagttgttctgctggagattgtttcgggaaggaggcccatcacaccagggagcgcgaagggtcaagaaagcctggtcggttgggcgaagcctttgctgtccagtggcgggatcaagcacctggtcgatccgtttctggggaacgattacgactgcgatgagatggagaggatgacgctcgcggcctcgctttgcacgaggacgtcgtggcactctcgacctgagatgtcactggtcctgaaacttctccagggggacgacgagacgatgggctgggcgaggtcggccagcttcgacgggtcagacgaggaggccatcgcggcgggacctgacctgaacatgcagtcgcacctgagcctcgcgctcctcggggtggatgcggacgacacgctgtcgcgctgcagcagcacggagcgcacctcggccgacggctactggagccggtcgtccagtttcgactagcggtagctgcgtgatggaactgatgcggcagagtagagtagtggtagtgtggttacgtacagcaggcaggcaggcaggcgattggtatgcttggtgagatggatgttcatatcaggattcaggtggttggaatgtggacagctgctgatttagtttagatggcagtgttgctttgctgatttggctaggagtcgagttctgttggtagtatagatctgaatctgaccttacgatgcaattggtttcgtatttgtattgttatcttttttttttcctttatcaagtcttcatgcaagaataggctaccaattggttgttggataggcttgtctagcaacaagcctgtaagataagggacttggtaggaaagaatctgcaggatgaataaacctgtgaggattaaattaattgccgttagcccatggtggccagccagagccaacttgggcttcaaggcctt

SEQ ID NO: 47247 - DNA, 1372 bp, Zea Mays
cccatagaggtatggcattgtagccgacggacgaccgacgcgcaccccccgccatgctctccagccgaagatgcttcgcggcggcggccaaccgggtccggccgctcgccagggccttctgcgacgcgccggcctcgcgcgcggatgcgggggcctccgggacgcccagcccgcaggatcacgccgagaaggttgctgccctgaaggatccgcccgatgtgctagacgttgctatcgttggtggaggcatggtgggcttggctgtcgcttgtgcattgtcaaatatgccgttaacgaaacaccttagagtcgctattatcgatagcaatccagcgctgaagtcaaggagttacctggataaaaacagtatacccgattctagggtcagcaccgttacccctgcaaccatttctttcttcaaggtggcaacactgccaattttctttcaggtcaccagtttagactttcagctgtgtgtacatttattttgacagaggtaaacctggctttcataaaaagcttagaatgttacagataagcaactgctagggattctagcttagagataagcaacacaactaacaacagagaacagagttacagaaaagctaagaaaggggatacagcagaaagcctaaaccacaagctcctcaactgagtccacctcaaaacaaaactaaaaagcctaacgactggcgactccctccacctctagatcttcagttttcttccaaaatgcctgcaaccaactctttgttcttccaaaatgtctcagaagaattcgtcatttctgcaagaacactatgatctgtggtttcatttttttagttgtgtgtacatttcactactgtaactgtaacaatcacaaattaccatctgttgttaaattttctgcactttgtgcacattggaaatacaaaaataaatgtctattttcaccaagtataatttaaaaatgatacttttccatgttttaatgtgcatggcttgttttgctaccggagacaatagtgcattattggtaatgttcttcgtgagtgtgtgtgcattattgtggcagatattggcgcctgggagcatgttcaacagcaaagacatgctttctttggtaaaatgcaggtgagagtataacttgcttctgtctataaacaatttatttcataatgtatggccattttttttcatggtttcaccttttgcctcttttgaccaaacatattcttgttgtatgtgcattttgagctttgctgattagatgccaagttaatgatgagttagtactaagttaactaaacatttgaagttatcatttatgtgctttacattatgctagcaataccagtgggtcatgcaagcctcatgtttccaaaaa

SEQ ID NO: 47248 - DNA, 2396 bp, Zea Mays
cccatagaggtatggcattgtagccgacggacgaccgacgcgcaccccccgccatgctctccagccgaagatgcttcgcggcggcggccaaccgggtccggccgctcgccagggccttctgcgacgcgccggcctcgcgcgcggatgcgggggcctccgggacgcccagcccgcaggatcacgccgagaaggttgctgccctgaaggatccgcccgatgtgctagacgttgctatcgttggtggaggcatggtgggcttggctgtcgcttgtgcattgtcaaatatgccgttaacgaaacaccttagagtcgctattatcgatagcaatccagcgctgaagtcaaggagttacctggataaaaacagtatacccgattctagggtcagcaccgttacccctgcaaccatttctttcttcaaggtggcaacactgccaattttctttcaggtcaccagtttagactttcagctgtgtgtacatttattttgacagagatattggcgcctgggagcatgttcaacagcaaagacatgctttctttggtaaaatgcaggtgtgggattacactggacttggatacacgaggtataatgctagagatgtgggcaaagaacaccttggatgtgtggtggagaacaaggtgctttgcaactcactgctcttacgtttacaggaagaattggatgatattgaaaatgtgatatatcctaccagattggtgtctcttactttcccgttgaagaccagacaagcaggaatgaaaccaacatcaagagaaccattatctgttggtcatactacagaagagttccatcgcagtcatttagttaaacttgatctcagtgatggacggagtttatattccaaattggtgataggagctgatggttcgaagtccaatgttagacagattgcaggcataaaaacaactagttggaattatccgcagagtgcaattatctgtacagtagagcatgttgtggaaaatgattgtgcgtggcagaggtttctcccttctggtccaattgcgctacttccgataggcaataacttcagcaacattgtatggacaatgagtccagaggagtcactgcgccataagtcaatgagcccagaagagtttgtgaattctgtgaaccacgcattggattttggttatggtccgcatccacactctaccgctcttgaccattacatggaacagttcttttctggcattgggagcagtgcagcatctacaaaggaatgcttcgaagtgccaccgaaagcaacccgtgtagtttctgagagaatggcgtttccattgtcgttgatgcattcccatgattatgtttccaaaaggttagcattagttggagatgctgctcatactgtccaccccttagccggccaaggtgtaaacttgggctttggtgatgctgctgctttagcaaaagttattgctgagggagtttcagtgggctcggatgttggggatctgactttgctacagcggtatgagaaggagaggaaggctgccaatgtggcgatggcagcagtgctagatggttttcagaagatgtactctgttgatttggggccccttaatgtagtgagagctgctgcgttccacggtgcccagtacatatcaccactaaaaaagaacatcatctcttatgcaacgggtgacacgaaatggtcactatttcagtgaacagcactgctttgaaactcttgtcctcacctcgttctttgtttcggcatgtactggaaacaaagaacgcaatcagtaatttcgttcgaaagacatcctcatttgggctgtttggttactgggacacgtcaagcgcccgtctcgcgctagcctggatccctgggaacgtagctcttctgcgtttctgctcgtacaggccagcgaccaaaaaaagctctatactgcatgcgcgggtgcaagcagtcgtcatgcactacagtcatccaaacacgagctcagcatggtcaacgtgacgccgtgggcctagacgccaccagccaatcaaccaatcatgcgaattgtgttgctttcgatcttagtgttaatttgagcgcccgaggcccgacctagtttgtgaggttagtctctttccgtgctcactttgtatttgtactagctagagatataatactcagcgcgttgctacgtgagttgagttgctgacgatttaaataaaagtagactatatacaattatcagtacgaaggagtaaactattccctgtgccctaaaatataatttgttttagactaaacacatatgtaatttgtatgtaagtctacaatcattattatgattcattcgcactataaattaatattaatggactctggcatgttgacgtggacagcaaaatgctttgttcttttttttttaatttc

SEQ ID NO: 47249 - DNA, 3335 bp, Zea Mays
cccatagaggtatggcattgtagccgacggacgaccgacgcgcaccccccgccatgctctccagccgaagatgcttcgcggcggcggccaaccgggtccggccgctcgccagggccttctgcgacgcgccggcctcgcgcgcggatgcgggggcctccgggacgcccagcccgcaggatcacgccgagaaggttgctgccctgaaggatccgcccgatgtgctagacgttgctatcgttggtggaggcatggtgggcttggctgtcgcttgtgcattgtcaaatatgccgttaacgaaacaccttagagtcgctattatcgatagcaatccagcgctgaagtcaaggagttacctggataaaaacagtatacccgattctagggtcagcaccgttacccctgcaaccatttctttcttcaagggtatgattctgaatcaactatgtgtatcatcgattcatcgtatttaattttagttgtatttcatcttgattcttgcaacggtatttggatttatgtttgagcttgtatgttcaggtggcatttcgtctagatgacctttcatgttgtttccacagatatttacacattttgtttgatcaactataccatgtgaccacattggatgtacataaaaagcagttcaatcatcattagttagcgtttggttcaaagttcgagcttgccatggtgtactagccctggagtcctgaacccagctgtcactcatggttgcaaaggcgactaggcatccaggctagagcttggtgtgccttgacacctaggcgataaggccccattgttccccaaggcgagctgggtatgcctaggtggcgcctttgaaaccgggttgacactcacccattttcttttcatagcttgcacaagtttgccgaaccgatttggctgccacagatggctccccaaatgaaatacagtaaagcatttctttcataatctccacgttccaaatcacagtttactttagctttggtctaagtcaaattttactaactttgacctagttctttaggaaaatatactaacatccatgatatcaaataaatatactattaataaatgtttaatagaaatttagtgtaactattttgatgttctagatttgatgattttttctataaacttcatcaatgttactccatccagtgttttcttagtttcctatccagtgggacatattatggtgatatgtcggaaatcagttagaaacaagcatgtcaatatatatggttctgacaaccactctttaatttatccaaccttcttcaaagtttatcacaacaaatgccaaattttccattattgtgttgttctttgattgtttctgtttcattgtggcagtggcaacactgccaattttctttcaggtcaccagtttagactttcagctgtgtgtacatttattttgacagagatattggcgcctgggagcatgttcaacagcaaagacatgctttctttggtaaaatgcaggtgtgggattacactggacttggatacacgaggtataatgctagagatgtgggcaaagaacaccttggatgtgtggtggagaacaaggtgctttgcaactcactgctcttacgtttacaggaagaattggatgatattgaaaatgtgatatatcctaccagattggtgtctcttactttcccgttgaagaccagacaagcaggaatgaaaccaacatcaagagaaccattatctgttggtcatactacagaagagttccatcgcagtcatttagttaaacttgatctcagtgatggacggagtttatattccaaattggtgataggagctgatggttcgaagtccaatgttagacagattgcaggcataaaaacaactagttggaattatccgcagagtgcaattatctgtacagtagagcatgttgtggaaaatgattgtgcgtggcagaggtttctcccttctggtccaattgcgctacttccgataggcaataacttcagcaacattgtatggacaatgagtccagaggagtcactgcgccataagtcaatgagcccagaagagtttgtgaattctgtgaaccacgcattggattttggttatggtccgcatccacactctaccgctcttgaccattacatggaacagttcttttctggcattgggagcagtgcagcatctacaaaggaatgcttcgaagtgccaccgaaagcaacccgtgtagtttctgagagaatggcgtttccattgtcgttgatgcattcccatgattatgtttccaaaaggttagcattagttggagatgctgctcatactgtccaccccttagccggccaaggtgtaaacttgggctttggtgatgctgctgctttagcaaaagttattgctgagggagtttcagtgggctcggatgttggggatctgactttgctacagcggtatgagaaggagaggaaggctgccaatgtggcgatggcagcagtgctagatggttttcagaagatgtactctgttgatttggggccccttaatgtagtgagagctgctgcgttccacggtgcccagtacatatcaccactaaaaaagaacatcatctcttatgcaacgggtgacacgaaatggtcactatttcagtgaacagcactgctttgaaactcttgtcctcacctcgttctttgtttcggcatgtactggaaacaaagaacgcaatcagtaatttcgttcgaaagacatcctcatttgggctgtttggttactgggacacgtcaagcgcccgtctcgcgctagcctggatccctgggaacgtagctcttctgcgtttctgctcgtacaggccagcgaccaaaaaaagctctatactgcatgcgcgggtgcaagcagtcgtcatgcactacagtcatccaaacacgagctcagcatggtcaacgtgacgccgtgggcctagacgccaccagccaatcaaccaatcatgcgaattgtgttgctttcgatcttagtgttaatttgagcgcccgaggcccgacctagtttgtgaggttagtctctttccgtgctcactttgtatttgtactagctagagatataatactcagcgcgttgctacgtgagttgagttgctgacgatttaaataaaagtagactatatacaattatcagtacgaaggagtaaactattccctgtgccctaaaatataatttgttttagactaaacacatatgtaatttgtatgtaagtctacaatcattattatgattcattcgcactataaattaatattaatggactctggcatgttgacgtggacagcaaaatgctttgttcttttttttttaatttc

SEQ ID NO: 47250 - DNA, 2327 bp, Zea Mays
cccatagaggtatggcattgtagccgacggacgaccgacgcgcaccccccgccatgctctccagccgaagatgcttcgcggcggcggccaaccgggtccggccgctcgccagggccttctgcgacgcgccggcctcgcgcgcggatgcgggggcctccgggacgcccagcccgcaggatcacgccgagaaggttgctgccctgaaggatccgcccgatgtgctagacgttgctatcgttggtggaggcatggtgggcttggctgtcgcttgtgcattgtgtagcaaatatgccgttaacgaaacaccttagagtcgctattatcgatagcaatccagcgctgaagtcaaggagttacctggataaaaacagtatacccgattctagggtcagcaccgttacccctgcaaccatttctttcttcaaggatattggcgcctgggagcatgttcaacagcaaagacatgctttctttggtaaaatgcaggtgtgggattacactggacttggatacacgaggtataatgctagagatgtgggcaaagaacaccttggatgtgtggtggagaacaaggtgctttgcaactcactgctcttacgtttacaggaagaattggatgatattgaaaatgtgatatatcctaccagattggtgtctcttactttcccgttgaagaccagacaagcaggaatgaaaccaacatcaagagaaccattatctgttggtcatactacagaagagttccatcgcagtcatttagttaaacttgatctcagtgatggacggagtttatattccaaattggtgataggagctgatggttcgaagtccaatgttagacagattgcaggcataaaaacaactagttggaattatccgcagagtgcaattatctgtacagtagagcatgttgtggaaaatgattgtgcgtggcagaggtttctcccttctggtccaattgcgctacttccgataggcaataacttcagcaacattgtatggacaatgagtccagaggagtcactgcgccataagtcaatgagcccagaagagtttgtgaattctgtgaaccacgcattggattttggttatggtccgcatccacactctaccgctcttgaccattacatggaacagttcttttctggcattgggagcagtgcagcatctacaaaggaatgcttcgaagtgccaccgaaagcaacccgtgtagtttctgagagaatggcgtttccattgtcgttgatgcattcccatgattatgtttccaaaaggttagcattagttggagatgctgctcatactgtccaccccttagccggccaaggtgtaaacttgggctttggtgatgctgctgctttagcaaaagttattgctgagggagtttcagtgggctcggatgttggggatctgactttgctacagcggtatgagaaggagaggaaggctgccaatgtggcgatggcagcagtgctagatggttttcagaagatgtactctgttgatttggggccccttaatgtagtgagagctgctgcgttccacggtgcccagtacatatcaccactaaaaaagaacatcatctcttatgcaacgggtgacacgaaatggtcactatttcagtgaacagcactgctttgaaactcttgtcctcacctcgttctttgtttcggcatgtactggaaacaaagaacgcaatcagtaatttcgttcgaaagacatcctcatttgggctgtttggttactgggacacgtcaagcgcccgtctcgcgctagcctggatccctgggaacgtagctcttctgcgtttctgctcgtacaggccagcgaccaaaaaaagctctatactgcatgcgcgggtgcaagcagtcgtcatgcactacagtcatccaaacacgagctcagcatggtcaacgtgacgccgtgggcctagacgccaccagccaatcaaccaatcatgcgaattgtgttgctttcgatcttagtgttaatttgagcgcccgaggcccgacctagtttgtgaggttagtctctttccgtgctcactttgtatttgtactagctagagatataatactcagcgcgttgctacgtgagttgagttgctgacgatttaaataaaagtagactatatacaattatcagtacgaaggagtaaactattccctgtgccctaaaatataatttgttttagactaaacacatatgtaatttgtatgtaagtctacaatcattattatgattcattcgcactataaattaatattaatggactctggcatgttgacgtggacagcaaaatgctttgttcttttttttttaatttc

SEQ ID NO: 47251 - DNA, 2272 bp, Zea Mays
cccatagaggtatggcattgtagccgacggacgaccgacgcgcaccccccgccatgctctccagccgaagatgcttcgcggcggcggccaaccgggtccggccgctcgccagggccttctgcgacgcgccggcctcgcgcgcggatgcgggggcctccgggacgcccagcccgcaggatcacgccgagaaggttgctgccctgaaggatccgcccgatgtgctagacgttgctatcgttggtggaggcatggtgggcttggctgtcgcttgtgcattgtcaaatatgccgttaacgaaacaccttagagtcgctattatcgatagcaatccagcgctgaagtcaaggagttacctggataaaaacagtatacccgattctagggtcagcaccgttacccctgcaaccatttctttcttcaaggatattggcgcctgggagcatgttcaacagcaaagacatgctttctttggtaaaatgcaggtgtgggattacactggacttggatacacgaggtataatgctagagatgtgggcaaagaacaccttggatgtgtggtggagaacaaggtgctttgcaactcactgctcttacgtttacaggaagaattggatgatattgaaaatgtgatatatcctaccagattggtgtctcttactttcccgttgaagaccagacaagcaggaatgaaaccaacatcaagagaaccattatctgttggtcatactacagaagagttccatcgcagtcatttagttaaacttgatctcagtgatggacggagtttatattccaaattggtgataggagctgatggttcgaagtccaatgttagacagattgcaggcataaaaacaactagttggaattatccgcagagtgcaattatctgtacagtagagcatgttgtggaaaatgattgtgcgtggcagaggtttctcccttctggtccaattgcgctacttccgataggcaataacttcagcaacattgtatggacaatgagtccagaggagtcactgcgccataagtcaatgagcccagaagagtttgtgaattctgtgaaccacgcattggattttggttatggtccgcatccacactctaccgctcttgaccattacatggaacagttcttttctggcattgggagcagtgcagcatctacaaaggaatgcttcgaagtgccaccgaaagcaacccgtgtagtttctgagagaatggcgtttccattgtcgttgatgcattcccatgattatgtttccaaaaggttagcattagttggagatgctgctcatactgtccaccccttagccggccaaggtgtaaacttgggctttggtgatgctgctgctttagcaaaagttattgctgagggagtttcagtgggctcggatgttggggatctgactttgctacagcggtatgagaaggagaggaaggctgccaatgtggcgatggcagcagtgctagatggttttcagaagatgtactctgttgatttggggccccttaatgtagtgagagctgctgcgttccacggtgcccagtacatatcaccactaaaaaagaacatcatctcttatgcaacgggtgacacgaaatggtcactatttcagtgaacagcactgctttgaaactcttgtcctcacctcgttctttgtttcggcatgtactggaaacaaagaacgcaatcagtaatttcgttcgaaagacatcctcatttgggctgtttggttactgggacacgtcaagcgcccgtctcgcgctagcctggatccctgggaacgtagctcttctgcgtttctgctcgtacaggccagcgaccaaaaaaagctctatactgcatgcgcgggtgcaagcagtcgtcatgcactacagtcatccaaacacgagctcagcatggtcaacgtgacgccgtgggcctagacgccaccagccaatcaaccaatcatgcgaattgtgttgctttcgatcttagtgttaatttgagcgcccgaggcccgacctagtttgtgaggggtttgtcgacggatgagcttgctctggctggtgcatggatggaagaagcgggatcagctgacgccgtcgaacttgctgctcatcagagacaaggtcgcgctcggcagcacccggctcacctgaggttgctctgcatgcgttaagcaaggatcagatcgacagagcacctcatatgcatgcatggcatgaatctatagaacgatgaggaggacggatcagaataaagaaataaaagcaagcttaattactc

SEQ ID NO: 47252 - DNA, 3852 bp, Zea Mays
cccatagaggtatggcattgtagccgacggacgaccgacgcgcaccccccgccatgctctccagccgaagatgcttcgcggcggcggccaaccgggtccggccgctcgccagggccttctgcgacgcgccggcctcgcgcgcggatgcgggggcctccgggacgcccagcccgcaggatcacgccgagaaggttgctgccctgaaggatccgcccgatgtgctagacgttgctatcgttggtggaggcatggtgggcttggctgtcgcttgtgcattgtgtagcaaatatgccgttaacgaaacaccttagagtcgctattatcgatagcaatccagcgctgaagtcaaggagttacctggataaaaacagtatacccgattctagggtcagcaccgttacccctgcaaccatttctttcttcaagggtatgattctgaatcaactatgtgtatcatcgattcatcgtatttaattttagttgtatttcatcttgattcttgcaacggtatttggatttatgtttgagcttgtatgttcaggtggcatttcgtctagatgacctttcatgttgtttccacagatatttacacattttgtttgatcaactataccatgtgaccacattggatgtacataaaaagcagttcaatcatcattagttagcgtttggttcaaagttcgagcttgccatggtgtactagccctggagtcctgaacccagctgtcactcatggttgcaaaggcgactaggcatccaggctagagcttggtgtgccttgacacctaggcgataaggccccattgttccccaaggcgagctgggtatgcctaggtggcgcctttgaaaccgggttgacactcacccattttcttttcatagcttgcacaagtttgccgaaccgatttggctgccacagatggctccccaaatgaaatacagtaaagcatttctttcataatctccacgttccaaatcacagtttactttagctttggtctaagtcaaattttactaactttgacctagttctttaggaaaatatactaacatccatgatatcaaataaatatactattaataaatgtttaatagaaatttagtgtaactattttgatgttctagatttgatgattttttctataaacttcatcaatgttactccatccagtgttttcttagtttcctatccagtgggacatattatggtgatatgtcggaaatcagttagaaacaagcatgtcaatatatatggttctgacaaccactctttaatttatccaaccttcttcaaagtttatcacaacaaatgccaaattttccattattgtgttgttctttgattgtttctgtttcattgtggcagtggcaacactgccaattttctttcaggtcaccagtttagactttcagctgtgtgtacatttattttgacagaggtaaacctggctttcataaaaagcttagaatgttacagataagcaactgctagggattctagcttagagataagcaacacaactaacaacagagaacagagttacagaaaagctaagaaaggggatacagcagaaagcctaaaccacaagctcctcaactgagtccacctcaaaacaaaactaaaaagcctaacgactggcgactccctccacctctagatcttcagttttcttccaaaatgcctgcaaccaactctttgttcttccaaaatgtctcagaagaattcgtcatttctgcaagaacactatgatctgtggtttcatttttttagttgtgtgtacatttcactactgtaactgtaacaatcacaaattaccatctgttgttaaattttctgcactttgtgcacattggaaatacaaaaataaatgtctattttcaccaagtataatttaaaaatgatacttttccatgttttaatgtgcatggcttgttttgctaccggagacaatagtgcattattggtaatgttcttcgtgagtgtgtgtgcattattgtggcagatattggcgcctgggagcatgttcaacagcaaagacatgctttctttggtaaaatgcaggtgtgggattacactggacttggatacacgaggtataatgctagagatgtgggcaaagaacaccttggatgtgtggtggagaacaaggtgctttgcaactcactgctcttacgtttacaggaagaattggatgatattgaaaatgtgatatatcctaccagattggtgtctcttactttcccgttgaagaccagacaagcaggaatgaaaccaacatcaagagaaccattatctgttggtcatactacagaagagttccatcgcagtcatttagttaaacttgatctcagtgatggacggagtttatattccaaattggtgataggagctgatggttcgaagtccaatgttagacagattgcaggcataaaaacaactagttggaattatccgcagagtgcaattatctgtacagtagagcatgttgtggaaaatgattgtgcgtggcagaggtttctcccttctggtccaattgcgctacttccgataggcaataacttcagcaacattgtatggacaatgagtccagaggagtcactgcgccataagtcaatgagcccagaagagtttgtgaattctgtgaaccacgcattggattttggttatggtccgcatccacactctaccgctcttgaccattacatggaacagttcttttctggcattgggagcagtgcagcatctacaaaggaatgcttcgaagtgccaccgaaagcaacccgtgtagtttctgagagaatggcgtttccattgtcgttgatgcattcccatgattatgtttccaaaaggttagcattagttggagatgctgctcatactgtccaccccttagccggccaaggtgtaaacttgggctttggtgatgctgctgctttagcaaaagttattgctgagggagtttcagtgggctcggatgttggggatctgactttgctacagcggtatgagaaggagaggaaggctgccaatgtggcgatggcagcagtgctagatggttttcagaagatgtactctgttgatttggggccccttaatgtagtgagagctgctgcgttccacggtgcccagtacatatcaccactaaaaaagaacatcatctcttatgcaacgggtgacacgaaatggtcactatttcagtgaacagcactgctttgaaactcttgtcctcacctcgttctttgtttcggcatgtactggaaacaaagaacgcaatcagtaatttcgttcgaaagacatcctcatttgggctgtttggttactgggacacgtcaagcgcccgtctcgcgctagcctggatccctgggaacgtagctcttctgcgtttctgctcgtacaggccagcgaccaaaaaaagctctatactgcatgcgcgggtgcaagcagtcgtcatgcactacagtcatccaaacacgagctcagcatggtcaacgtgacgccgtgggcctagacgccaccagccaatcaaccaatcatgcgaattgtgttgctttcgatcttagtgttaatttgagcgcccgaggcccgacctagtttgtgaggggtttgtcgacggatgagcttgctctggctggtgcatggatggaagaagcgggatcagctgacgccgtcgaacttgctgctcatcagagacaaggtcgcgctcggcagcacccggctcacctgaggttgctctgcatgcgttaagcaaggatcagatcgacagagcacctcatatgcatgcatggcatgaatctatagaacgatgaggaggacggatcagaataaagaaataaaagcaagcttaattactc

SEQ ID NO: 47253 - DNA, 3848 bp, Zea Mays
cccatagaggtatggcattgtagccgacggacgaccgacgcgcaccccccgccatgctctccagccgaagatgcttcgcggcggcggccaaccgggtccggccgctcgccagggccttctgcgacgcgccggcctcgcgcgcggatgcgggggcctccgggacgcccagcccgcaggatcacgccgagaaggttgctgccctgaaggatccgcccgatgtgctagacgttgctatcgttggtggaggcatggtgggcttggctgtcgcttgtgcattgtcaaatatgccgttaacgaaacaccttagagtcgctattatcgatagcaatccagcgctgaagtcaaggagttacctggataaaaacagtatacccgattctagggtcagcaccgttacccctgcaaccatttctttcttcaagggtatgattctgaatcaactatgtgtatcatcgattcatcgtatttaattttagttgtatttcatcttgattcttgcaacggtatttggatttatgtttgagcttgtatgttcaggtggcatttcgtctagatgacctttcatgttgtttccacagatatttacacattttgtttgatcaactataccatgtgaccacattggatgtacataaaaagcagttcaatcatcattagttagcgtttggttcaaagttcgagcttgccatggtgtactagccctggagtcctgaacccagctgtcactcatggttgcaaaggcgactaggcatccaggctagagcttggtgtgccttgacacctaggcgataaggccccattgttccccaaggcgagctgggtatgcctaggtggcgcctttgaaaccgggttgacactcacccattttcttttcatagcttgcacaagtttgccgaaccgatttggctgccacagatggctccccaaatgaaatacagtaaagcatttctttcataatctccacgttccaaatcacagtttactttagctttggtctaagtcaaattttactaactttgacctagttctttaggaaaatatactaacatccatgatatcaaataaatatactattaataaatgtttaatagaaatttagtgtaactattttgatgttctagatttgatgattttttctataaacttcatcaatgttactccatccagtgttttcttagtttcctatccagtgggacatattatggtgatatgtcggaaatcagttagaaacaagcatgtcaatatatatggttctgacaaccactctttaatttatccaaccttcttcaaagtttatcacaacaaatgccaaattttccattattgtgttgttctttgattgtttctgtttcattgtggcagtggcaacactgccaattttctttcaggtcaccagtttagactttcagctgtgtgtacatttattttgacagaggtaaacctggctttcataaaaagcttagaatgttacagataagcaactgctagggattctagcttagagataagcaacacaactaacaacagagaacagagttacagaaaagctaagaaaggggatacagcagaaagcctaaaccacaagctcctcaactgagtccacctcaaaacaaaactaaaaagcctaacgactggcgactccctccacctctagatcttcagttttcttccaaaatgcctgcaaccaactctttgttcttccaaaatgtctcagaagaattcgtcatttctgcaagaacactatgatctgtggtttcatttttttagttgtgtgtacatttcactactgtaactgtaacaatcacaaattaccatctgttgttaaattttctgcactttgtgcacattggaaatacaaaaataaatgtctattttcaccaagtataatttaaaaatgatacttttccatgttttaatgtgcatggcttgttttgctaccggagacaatagtgcattattggtaatgttcttcgtgagtgtgtgtgcattattgtggcagatattggcgcctgggagcatgttcaacagcaaagacatgctttctttggtaaaatgcaggtgtgggattacactggacttggatacacgaggtataatgctagagatgtgggcaaagaacaccttggatgtgtggtggagaacaaggtgctttgcaactcactgctcttacgtttacaggaagaattggatgatattgaaaatgtgatatatcctaccagattggtgtctcttactttcccgttgaagaccagacaagcaggaatgaaaccaacatcaagagaaccattatctgttggtcatactacagaagagttccatcgcagtcatttagttaaacttgatctcagtgatggacggagtttatattccaaattggtgataggagctgatggttcgaagtccaatgttagacagattgcaggcataaaaacaactagttggaattatccgcagagtgcaattatctgtacagtagagcatgttgtggaaaatgattgtgcgtggcagaggtttctcccttctggtccaattgcgctacttccgataggcaataacttcagcaacattgtatggacaatgagtccagaggagtcactgcgccataagtcaatgagcccagaagagtttgtgaattctgtgaaccacgcattggattttggttatggtccgcatccacactctaccgctcttgaccattacatggaacagttcttttctggcattgggagcagtgcagcatctacaaaggaatgcttcgaagtgccaccgaaagcaacccgtgtagtttctgagagaatggcgtttccattgtcgttgatgcattcccatgattatgtttccaaaaggttagcattagttggagatgctgctcatactgtccaccccttagccggccaaggtgtaaacttgggctttggtgatgctgctgctttagcaaaagttattgctgagggagtttcagtgggctcggatgttggggatctgactttgctacagcggtatgagaaggagaggaaggctgccaatgtggcgatggcagcagtgctagatggttttcagaagatgtactctgttgatttggggccccttaatgtagtgagagctgctgcgttccacggtgcccagtacatatcaccactaaaaaagaacatcatctcttatgcaacgggtgacacgaaatggtcactatttcagtgaacagcactgctttgaaactcttgtcctcacctcgttctttgtttcggcatgtactggaaacaaagaacgcaatcagtaatttcgttcgaaagacatcctcatttgggctgtttggttactgggacacgtcaagcgcccgtctcgcgctagcctggatccctgggaacgtagctcttctgcgtttctgctcgtacaggccagcgaccaaaaaaagctctatactgcatgcgcgggtgcaagcagtcgtcatgcactacagtcatccaaacacgagctcagcatggtcaacgtgacgccgtgggcctagacgccaccagccaatcaaccaatcatgcgaattgtgttgctttcgatcttagtgttaatttgagcgcccgaggcccgacctagtttgtgaggggtttgtcgacggatgagcttgctctggctggtgcatggatggaagaagcgggatcagctgacgccgtcgaacttgctgctcatcagagacaaggtcgcgctcggcagcacccggctcacctgaggttgctctgcatgcgttaagcaaggatcagatcgacagagcacctcatatgcatgcatggcatgaatctatagaacgatgaggaggacggatcagaataaagaaataaaagcaagcttaattactc

SEQ ID NO: 47254 - DNA, 1120 bp, Zea Mays
gaggaattttacgaacagggaaaggaaaaagaaattcaccatcaaaataggacgaagaaaatctaagaaactgaaatccaacaggggaatttccctttcggctgctgcgaaactgcagccaaccaaggagtggaggagtaggagtagcggcagtcaaagcgtggcgggcggacgggcgggcaagctggaacccgttggatcggtggtatcaaggaatcggaagagggacccggctctcccctccccaccccgcgtcccacgtcggttcccctaatctgcgtccgcggcgtgatatgagacggttctgtaattgctgatcggcgtgatgaattttaggccaatagttcttatcttcctcctgctcgtgctcattgtcacatcacagtttgagtggaagcagcatattggtgaggctgaggcgaatccaacagctacacgaaggaggcaacaggcgcttggaagggaggatgctgttaaagagaaagtaatattggcacaagagaaaaacattcagcagcttaatgagcttattcagagccttcagcttcagctattgcattgccggggcagtaacagttctgctcagaccgcctcaagccacagcgaagtggagggacatgaaatgattggtgactgataacctctcatcccctcccctctgttgacataggtagtttgcttcagagtataaccaagacaagaacagaagctcttcaggcaatggaaactcttgttgtcgccttacggtgggccggtagagttactggtattatgtgctttacgttatcagtatcacctccttttgcattctcacccagcgtgtacagggttttagtatgttggtctaggttactttgctgatcaaggttcgaatgtatttgttcttttaaacatatgcactccgatctttatatgatggaccatttctttgtgtctgtgacggcgtttttttcatgctcggcatgttgcagagctcttgtttctgtgcaagattcaaaattttacccagcaaattttgttctttgccaactacgggtgacagcggagcgaagaggagagggcaagaaagagataaaagcggcactctccagtttgaagcaagggattgaattccacttcg

SEQ ID NO: 47255 - DNA, 803 bp, Zea Mays
agaaattcaccatcaaaataggacgaagaaaatctaagaaactgaaatccaacaggggaatttccctttcggctgctgcgaaactgcagccaaccaaggagtggaggagtaggagtagcggcagtcaaagcgtggcgggcggacgggcgggcaagctggaacccgttggatcggtggtatcaaggaatcggaagagggacccggctctcccctccccaccccgcgtcccacgtcggttcccctaatctgcgtccgcggcgtgatatgagacggttctgtaattgctgatcggcgtgatgaattttaggccaatagttcttatcttcctcctgctcgtgctcattgtcacatcacagtttgagtggaagcagcatattggtgaggctgaggcgaatccaacagctacacgaaggaggcaacaggcgcttggaagggaggatgctgttaaagagaaagtaatattggcacaagagaaaaacattcagcagcttaatgagcttattcagagccttcagcttcagctattgcattgccggggcagtaacagttctgctcagaccgcctcaagccacagcgaagtggagggacatgaaatgattggtgactgataacctctcatcccctcccctctgttgacataggtagtttgcttcagagtataaccaagacaagaacagaagctcttcaggcaatggaaactcttgttgtcgccttacggtgggccgcggagcgaagaggagagggcaagaaagagataaaagcggcactctccagtttgaagcaagggattgaattccacttcg

SEQ ID NO: 47256 - DNA, 2311 bp, Zea Mays
  misc_feature (1)..(2): n is a, c, g, or t
nnagaaccaaacatttctgaaaatggaagttctgtggaggctcaggacaaagacgttattctggaaggccttagtactgttagttctcatgatcagtggactccattatctgtcagtggtcttcgtccgaagcctcgttatgagcatggagcaactgtgctgcaaaataagatgtatatatttggtggaaaccataatggacgttaccttagtgaccttcaggctttggatctgaagagtttgacctggtccaaggttgatgccaaattgcaagcagaacctgctgattccactaaaacaacacaaattgctccatgtgctggtcattctttgatttcatggggcaacaaatttttatctattgctgggcatacaaaagatccatctgaaggcgttacagtgaaggaatttgatccacatacttgtacttggtcgattgtcaggacttatgggaaaccaccggtttctcgtggaggtcaaacagtgactcttgttggaacgacgctagttttgtttggtggtgaagatgcagaacggtgtctcttgaatgacttgcacatccttgatcttgaaaccatgacatgggatgatgtggatgcaataggcacccctccttctccaaggtcagaccatgctgctgcttgccatgctgaccgctatcttttaatttttggtggggggtctcatgcaacatgtttcaatgacctacatgtccttgatttgcagacgatggaatggtcaagacccaaacaacaaggcccgactccaagtccaagagctggccatgcaggtggaactgtcggcgagaactggtacatagttgggggtggcaataataaaagtggtgtttctgaaacacttgtgcttaacatgtcaactctgacgtggtcggttgttagcactgtggaaggacgagtcccccttgctagtgagggcatgactttagtgcatagcaattatggtggttatgattatctcatctcttttggaggatacaatggacgatacaacaatgaggtttacactcttaaacttagcctcaaatcagattcacagtcaactttaaaagaagaaactctctcagatactacatctagggtcatagaacctgaggctgaaatttatcaagatgggaagatacgggagatttctgtggacaacgctgattcagacctgaataacagaaatgatgaagcaagtgaacagcttttagcagatcttaaagctcagaaagaggaactagaagcaacacttagcagggaacagctgcaaactgtgcaacttaaagaagacattgcccgagcagagactagaaatgcagagctgacaaaggaacttcaagctgtccgtggccaacttgcttctgagcagtcaagatgtttcaaacttgaggttgatgttgcggaacttcgacaaaagcttcagagtatggatgcattggaaaaggaggtcgagctgcttcggcgacagagagccgcttcggagcaagcagcaatggacgctaagcagaggcaaagttcgggtggcatgtggggttggctcgctggaagcccgacaccagcagtttagttccgtgattcatatattttacttgtaacattatatatcattgactgacaccctctacaatttttttatttggttacttacgcattcgtgttcattttggaccacacaaagaataaggtgttctagcgatcgttatactcacaattactcaaaatgtattctttaggtttagcaagggggtgttcatgttagtcgatgtgctggttatccttttgacgctgtgctggttgtccatagattgttcgcttcacaaggggatgttcatgttagtcgatgactttttcgtgaaactgcagtttgatatatgaagtgcaagtatcgtgaacatactgacgtcgtcagcttcgaaattagacattgtgtgattgacattgttcgatgatttcatcttattagggccctacgggcaaatgaaaatgcaaagagtacacaactataacggcaacatatttcttctatgggatcttcttcaggaactcatccagaaccccaaacagatcagcatccagtccgtaatctgcagcttggacaattccaatgcccggttggccttaatactggcggacaacacataataatttattaaatgggagaagcaacctgaaatatgggggcatcggcatctttattaacagccacaataacctttgagtctctcgttcctgccaagtgctgtatcgctccagatactccaaaagccatataaagctccggcgccacaattttccctgtctgaccaacc

SEQ ID NO: 47257 - DNA, 626 bp, Zea Mays
aaacatttctgaaaatggaagttctgtggaggctcaggacaaagacgttattctggaaggccttagtactgttagttctcatgatcagtggactccattatctgtcagtggtcttcgtccgaagcctcgttatgagcatggagcaactgtgctgcaaaataagatgtatatatttggtggaaaccataatggacgttaccttagtgaccttcaggctttggatctgaagagtttgacctggtccaaggttgatgccaaattgcaagcagaacctgctgattccactaaaacaacacaaattgctccatgtgctggtcattctttgatttcatggggcaacaaatttttatctattgctgggcatacaaaagatccatctgaaggcgttacagtgaaggaatttgatccacatacttgtacttggtcgattgtcaggacttatgggaaaccaccggtttctcgtggaggtcaaacagtgactcttgttggaacgacgctagttttgtttggtggtgaagatgcagaacggtgtctcttgaatgacttgcacatccttgatcttgaaaccatgacatgggatgatgtggatgcaattggtttttataatggatcaagaacagaatgtc

SEQ ID NO: 47258 - DNA, 2035 bp, Zea Mays
gaggctcaggacaaagacgttattctggaaggccttagtactgttagttctcatgatcagtggactccattatctgtcagtggtcttcgtccgaagcctcgttatgagcatggagcaactgtgctgcaaaataagatgtatatatttggtggaaaccataatggacgttaccttagtgaccttcaggtttctcgtggaggtcaaacagtgactcttgttggaacgacgctagttttgtttggtggtgaagatgcagaacggtgtctcttgaatgacttgcacatccttgatcttgaaaccatgacatgggatgatgtggatgcaataggcacccctccttctccaaggtcagaccatgctgctgcttgccatgctgaccgctatcttttaatttttggtggggggtctcatgcaacatgtttcaatgacctacatgtccttgatttgcagacgatggaatggtcaagacccaaacaacaaggcccgactccaagtccaagagctggccatgcaggtggaactgtcggcgagaactggtacatagttgggggtggcaataataaaagtggtgtttctgaaacacttgtgcttaacatgtcaactctgacgtggtcggttgttagcactgtggaaggacgagtcccccttgctagtgagggcatgactttagtgcatagcaattatggtggttatgattatctcatctcttttggaggatacaatggacgatacaacaatgaggtttacactcttaaacttagcctcaaatcagattcacagtcaactttaaaagaagaaactctctcagatactacatctagggtcatagaacctgaggctgaaatttatcaagatgggaagatacgggagatttctgtggacaacgctgattcagacctgaataacagaaatgatgaagcaagtgaacagcttttagcagatcttaaagctcagaaagaggaactagaagcaacacttagcagggaacagctgcaaactgtgcaacttaaagaagacattgcccgagcagagactagaaatgcagagctgacaaaggaacttcaagctgtccgtggccaacttgcttctgagcagtcaagatgtttcaaacttgaggttgatgttgcggaacttcgacaaaagcttcagagtatggatgcattggaaaaggaggtcgagctgcttcggcgacagagagccgcttcggagcaagcagcaatggacgctaagcagaggcaaagttcgggtggcatgtggggttggctcgctggaagcccgacaccagcagtttagttccgtgattcatatattttacttgtaacattatatatcattgactgacaccctctacaatttttttatttggttacttacgcattcgtgttcattttggaccacacaaagaataaggtgttctagcgatcgttatactcacaattactcaaaatgtattctttaggtttagcaagggggtgttcatgttagtcgatgtgctggttatccttttgacgctgtgctggttgtccatagattgttcgcttcacaaggggatgttcatgttagtcgatgactttttcgtgaaactgcagtttgatatatgaagtgcaagtatcgtgaacatactgacgtcgtcagcttcgaaattagacattgtgtgattgacattgttcgatgatttcatcttattagggccctacgggcaaatgaaaatgcaaagagtacacaactataacggcaacatatttcttctatgggatcttcttcaggaactcatccagaaccccaaacagatcagcatccagtccgtaatctgcagcttggacaattccaatgcccggttggccttaatactggcggacaacacataataatttattaaatgggagaagcaacctgaaatatgggggcatcggcatctttattaacagccacaataacctttgagtctctcgttcctgccaagtgctgtatcgctccagatactccaaaagccatataaagctccggcgccacaattttccctgtctgaccaacc

SEQ ID NO: 47259 - DNA, 2138 bp, Zea Mays
acaaagacgttattctggaaggccttagtactgttagttctcatgatcagtggactccattatctgtcagtggtcttcgtccgaagcctcgttatgagcatggagcaactgtgctgcaaaataagatgtatatatttggtggaaaccataatggacgttaccttagtgaccttcaggctttggatctgaagagtttgacctggtccaaggttgatgccaaattgcaagcagaacctgctgattccactaaaacaacacaaattgctccatgtgctggtcattctttgatttcatggggcaacaaatttttatctattgctgggcatacaaaagatccatctgaaggcgttacagtgaaggaatttgatccacatacttgtacttggtcgattgtcaggacttatgggaaaccaccggtttctcgtggaggtcaaacagtgactcttgttggaacgacgctagttttgtttggtggtgaagatgcagaacggtgtctcttgaatgacttgcacatccttgatcttgaaaccatgacatgggatgatgtggatgcaatatggaatggtcaagacccaaacaacaaggcccgactccaagtccaagagctggccatgcaggtggaactgtcggcgagaactggtacatagttgggggtggcaataataaaagtggtgtttctgaaacacttgtgcttaacatgtcaactctgacgtggtcggttgttagcactgtggaaggacgagtcccccttgctagtgagggcatgactttagtgcatagcaattatggtggttatgattatctcatctcttttggaggatacaatggacgatacaacaatgaggtttacactcttaaacttagcctcaaatcagattcacagtcaactttaaaagaagaaactctctcagatactacatctagggtcatagaacctgaggctgaaatttatcaagatgggaagatacgggagatttctgtggacaacgctgattcagacctgaataacagaaatgatgaagcaagtgaacagcttttagcagatcttaaagctcagaaagaggaactagaagcaacacttagcagggaacagctgcaaactgtgcaacttaaagaagacattgcccgagcagagactagaaatgcagagctgacaaaggaacttcaagctgtccgtggccaacttgcttctgagcagtcaagatgtttcaaacttgaggttgatgttgcggaacttcgacaaaagcttcagagtatggatgcattggaaaaggaggtcgagctgcttcggcgacagagagccgcttcggagcaagcagcaatggacgctaagcagaggcaaagttcgggtggcatgtggggttggctcgctggaagcccgacaccagcagtttagttccgtgattcatatattttacttgtaacattatatatcattgactgacaccctctacaatttttttatttggttacttacgcattcgtgttcattttggaccacacaaagaataaggtgttctagcgatcgttatactcacaattactcaaaatgtattctttaggtttagcaagggggtgttcatgttagtcgatgtgctggttatccttttgacgctgtgctggttgtccatagattgttcgcttcacaaggggatgttcatgttagtcgatgactttttcgtgaaactgcagtttgatatatgaagtgcaagtatcgtgaacatactgacgtcgtcagcttcgaaattagacattgtgtgattgacattgttcgatgatttcatcttattagggccctacgggcaaatgaaaatgcaaagagtacacaactataacggcaacatatttcttctatgggatcttcttcaggaactcatccagaaccccaaacagatcagcatccagtccgtaatctgcagcttggacaattccaatgcccggttggccttaatactggcggacaacacataataatttattaaatgggagaagcaacctgaaatatgggggcatcggcatctttattaacagccacaataacctttgagtctctcgttcctgccaagtgctgtatcgctccagatactccaaaagccatataaagctccggcgccacaattttccctgtctgaccaacc

SEQ ID NO: 47260 - DNA, 1735 bp, Zea Mays
aaaaaacgtgagggcacaagcacatgaggcacccctccttctccaaggtcagaccatgctgctgcttgccatgctgaccgctatcttttaatttttggtggggggtctcatgcaacatgtttcaatgacctacatgtccttgatttgcagacgatggaatggtcaagacccaaacaacaaggcccgactccaagtccaagagctggccatgcaggtggaactgtcggcgagaactggtacatagttgggggtggcaataataaaagtggtgtttctgaaacacttgtgcttaacatgtcaactctgacgtggtcggttgttagcactgtggaaggacgagtcccccttgctagtgagggcatgactttagtgcatagcaattatggtggttatgattatctcatctcttttggaggatacaatggacgatacaacaatgaggtttacactcttaaacttagcctcaaatcagattcacagtcaactttaaaagaagaaactctctcagatactacatctagggtcatagaacctgaggctgaaatttatcaagatgggaagatacgggagatttctgtggacaacgctgattcagacctgaataacagaaatgatgaagcaagtgaacagcttttagcagatcttaaagctcagaaagaggaactagaagcaacacttagcagggaacagctgcaaactgtgcaacttaaagaagacattgcccgagcagagactagaaatgcagagctgacaaaggaacttcaagctgtccgtggccaacttgcttctgagcagtcaagatgtttcaaacttgaggttgatgttgcggaacttcgacaaaagcttcagagtatggatgcattggaaaaggaggtcgagctgcttcggcgacagagagccgcttcggagcaagcagcaatggacgctaagcagaggcaaagttcgggtggcatgtggggttggctcgctggaagcccgacaccagcagtttagttccgtgattcatatattttacttgtaacattatatatcattgactgacaccctctacaatttttttatttggttacttacgcattcgtgttcattttggaccacacaaagaataaggtgttctagcgatcgttatactcacaattactcaaaatgtattctttaggtttagcaagggggtgttcatgttagtcgatgtgctggttatccttttgacgctgtgctggttgtccatagattgttcgcttcacaaggggatgttcatgttagtcgatgactttttcgtgaaactgcagtttgatatatgaagtgcaagtatcgtgaacatactgacgtcgtcagcttcgaaattagacattgtgtgattgacattgttcgatgatttcatcttattagggccctacgggcaaatgaaaatgcaaagagtacacaactataacggcaacatatttcttctatgggatcttcttcaggaactcatccagaaccccaaacagatcagcatccagtccgtaatctgcagcttggacaattccaatgcccggttggccttaatactggcggacaacacataataatttattaaatgggagaagcaacctgaaatatgggggcatcggcatctttattaacagccacaataacctttgagtctctcgttcctgccaagtgctgtatcgctccagatactccaaaagccatataaagctccggcgccacaattttccctgtctgaccaacc

SEQ ID NO: 47261 - DNA, 1648 bp, Zea Mays
atggagaggcacccctccttctccaaggtcagaccatgctgctgcttgccatgctgaccgctatcttttaatttttggtggggggtctcatgcaacatgtttcaatgacctacatgtccttgatttgcagacgatggaatggtcaagacccaaacaacaaggcccgactccaagtccaagagctggccatgcaggtggaactgtcggcgagaactggtacatagttgggggtggcaataataaaagtggtgtttctgaaacacttgtgcttaacatgtcaactctgacgtggtcggttgttagcactgtggaaggacgagtcccccttgctagtgagggcatgactttagtgcatagcaattatggtggttatgattatctcatctcttttggaggatacaatggacgatacaacaatgagatactacatctagggtcatagaacctgaggctgaaatttatcaagatgggaagatacgggagatttctgtggacaacgctgattcagacctgaataacagaaatgatgaagcaagtgaacagcttttagcagatcttaaagctcagaaagaggaactagaagcaacacttagcagggaacagctgcaaactgtgcaacttaaagaagacattgcccgagcagagactagaaatgcagagctgacaaaggaacttcaagctgtccgtggccaacttgcttctgagcagtcaagatgtttcaaacttgaggttgatgttgcggaacttcgacaaaagcttcagagtatggatgcattggaaaaggaggtcgagctgcttcggcgacagagagccgcttcggagcaagcagcaatggacgctaagcagaggcaaagttcgggtggcatgtggggttggctcgctggaagcccgacaccagcagtttagttccgtgattcatatattttacttgtaacattatatatcattgactgacaccctctacaatttttttatttggttacttacgcattcgtgttcattttggaccacacaaagaataaggtgttctagcgatcgttatactcacaattactcaaaatgtattctttaggtttagcaagggggtgttcatgttagtcgatgtgctggttatccttttgacgctgtgctggttgtccatagattgttcgcttcacaaggggatgttcatgttagtcgatgactttttcgtgaaactgcagtttgatatatgaagtgcaagtatcgtgaacatactgacgtcgtcagcttcgaaattagacattgtgtgattgacattgttcgatgatttcatcttattagggccctacgggcaaatgaaaatgcaaagagtacacaactataacggcaacatatttcttctatgggatcttcttcaggaactcatccagaaccccaaacagatcagcatccagtccgtaatctgcagcttggacaattccaatgcccggttggccttaatactggcggacaacacataataatttattaaatgggagaagcaacctgaaatatgggggcatcggcatctttattaacagccacaataacctttgagtctctcgttcctgccaagtgctgtatcgctccagatactccaaaagccatataaagctccggcgccacaattttccctgtctgaccaacc

SEQ ID NO: 47262 - DNA, 1181 bp, Zea Mays
atggagaggcacccctccttctccaaggtcagaccatgctgctgcttgccatgctgaccgctatcttttaatttttggtggggggtctcatgcaacatgtttcaatgacctacatgtccttgatttgcagacgatggaatggtcaagacccaaacaacaaggcccgactccaagtccaagagctggccatgcaggtggaactgtcggcgagaactggtacatagttgggggtggcaataataaaagtggtgtttctgaaacacttgtgcttaacatgtcaactctgacgtggtcggttgttagcactgtggaaggacgagtcccccttgctagtgagggcatgactttagtgcatagcaattatggtggttatgattatctcatctcttttggaggatacaatggacgatacaacaatgaggtttacactcttaaacttagcctcaaatcagattcacagtcaactttaaaagaagaaactctctcagatactacatctagggtcatagaacctgaggctgaaatttatcaagatgggaagatacgggagatttctgtggacaacgctgattcagacctgaataacagaaatgatgaagcaagtgaacagcttttagcagatcttaaagctcagaaagaggaactagaagcaacacttagcagggaacagctgcaaactgtgcaacttaaagaagacattgcccgagcagagactagaaatgcagagctgacaaaggaacttcaagctgtccgtggccaacttgcttctgagcagtcaagatgtttcaaacttgaggttgatgttgcggaacttcgacaaaagcttcagagtatggatgcattggaaaaggaggtcgagctgcttcggcgacagagagccgcttcggagcaagcagcaatggacgctaagcagaggcaaagttcgggtggcatgtggggttggctcgctggaagcccgacaccagcagtttagttccgtgattcatatattttacttgtaacattatatatcattgactgacaccctctacaatttttttatttggttacttacgcattcgtgttcattttggaccacacaaagaataaggtgttctagcgatcgttatactcacaattactcaaaatgtattctttagaaagatgaaatatcactttagaattacaaataagctaaaata

SEQ ID NO: 47263 - DNA, 456 bp, Zea Mays
gtcatttaaaaagcgcatacaattcgccacctttttaataagattcagccagtcatcctttgaaccctttaaacaaaaatgcagtcatacctacactaacagccattgtcagtggcttcacaaaattgacttgtccagctactatttttcctgcaacatgaccatctgagtagatcaaactacccatagaacaggccaagaatgtttcttttttgtttcccctttctttccacttttgacaggaaaacgatcagtcatcgaatagtgaatgaatggtacgttagtgacattccattcatcttaggaacgctagctacacaattcctctcgagacgagctaccgatatacaaacaaggtaggtatcgttagtgagggcggaggatccatccaatccagcatccgctacgagaacgagccggtggtcagaagatcagcgaccacttcgtcgatcaagg

SEQ ID NO: 47264 - DNA, 568 bp, Zea Mays
aaaagccaaaagattccgaccacgggatgactcccgcgtcctattcctgtcctaccagcgagcttctacgaaaatttaaccagaaggcaggcaggcagtccccagcagcacaacccacttcaagaaccaacaagtcgcccacgcccacacagaaaaggcagagagaatgccataaagatccaacctttccgaggcggaacggcggcggcggcggcggcagcagcaggcgcggggactcacggagccggcgccaaacccgaggcaaatcgaggcgcggagcaatccggatcgagccgcattgggccgccgcgccacccacgcccacacagaaaagcagcgaccttttcttttccctcccccaacgagagcacacccggagcaaacgacggcgtggagggagggaggaggagccgttcgggggcagcgcgtcacgttagggttctcgccgcagcgggaaggaggcgggtgtggtggagggaggtggccgcggccgcggaatccattaatgccgcctgcgtgaggtggggtggggagaccggggttgctggattggagcttggagggaggg

SEQ ID NO: 47265 - DNA, 1561 bp, Zea Mays
attgctcggtcgctggtccgatgagtggcactgtcagggagcgtgacaggggcgacaaatctagacctccacttgtttgaagcccctcttgacgaaaaagaaatatcgctacgatatagctctgctcttggataaggtgctacaaatgtatagctctgctcttgttcaaggtgcaccaaatccacgtatgcatcaaaaaattgaaccaactcggatgaacttgatcccatcatctgcccgaatgtcggtcagtagtttgcttattgcactggatgaatggtgcctgactgaccgatttgatcccaacaacgctaagcatttgaccgccaaggctgagattgagcttggcgatggcctgcctgacatccgtaccactcgccagtgtgtccaagctatgaaagatgcgggattcgaggtcgtttttgcaaaggatcttgctcaagcgttttccttgcccatggatcctacacttgctgttgttgcttatagacgtgggcagtgtgacgatgaacttattaacgtcactaacaagaattcgttattcaagctgcaagctaggtatgtggttgagagaatggatggtgatctgtgggataaagttcttcagcccgagaatgaatatagaaggcaactcattgaccaagtggtttcgactgcattacctgagagcaagagccccgagcaagtgcaaaacctgctcatcttgactgccaaagcccagttacgtgaaggtctggtcagtgaagcaattgagtccttcattcgtgtagatgatgctgcacacttccttgatgttatccgtgcagccaaggaagctaatgtgtacaatgatttagtgaagtaccttctgatggtaaggcaaaaggcacgggaacccaaagtcgatggagaactcatttttgcatatgctaagattgacatgcttagtgatattgaggaattcattcttatgccaaatgttgccaaccttcaaaatgttggtgaccgtctgtatgatgaagaactatatgaagctgcaaaaatcatctatgctttcatctcaaactgggctaaactggctgttaccctggttaagctgaagctgtttcaaggtgctgtggaagctgctcgcaaggctaacagtgccaaaacatggaaggaggtctgctttgcttgtgttgacgccgaggagttccgtcttgcacaaatttgtggtctcaatattattattcaggttgatgacttggaagaagtcagtgagtactaccaaaatagaggatgcttcaatgaactcattgctctcatggagagtggtcttggactagaacgtgcacacatgggcatcttcacagaattgggagttctatatgctagataccgctctgagaagcttatggaacacatcaaacttttctccacacgtctcaatattcctaagcttattcgagcttgtgatgaacagcagcactggaaagaacttacctacctgtacatacagtatgatgaatttgacaatgctgccaccactattatgaaccactctccagatgcatgggatcatatgcagttcaaggatagatga

SEQ ID NO: 47266 - DNA, 2022 bp, Zea Mays
caaatcctcaacccctccgcctccgcctcgccacttcaacaccttcgtccagtcctttcctcgcgatcgcccaaatcctttcctccccgcccgcgccggcgccgctccgaatcccgagacgcccccgatgcccgccgccgtcgctgctgctgcggccgctgcgtcggccggtgcggtcctgctctgcctgctcctcaactgccgcccacagccggcgctggacgcccagagggagagtgaaaggggggaggacgaggcgtcgccgctcctgtcgggctcggggccggggagcgaccgcgaggaggaggagccgtggccggacagggcacccgtgacctgctgcgaggcggccgcggtagccgcgcgcacggcgcggcgcacgtgggagctcaccgtcgggcggtggggcctccacgggctcgccttcggtatcaagcgccacatgaagcgccagggtaatttgcagcatgagtacagtggaaatgactgtctccaacttaaaggacatcagacatatactgaagtatcttctctccttgagcacttgaagctttgcatgttcttctcaaagaaatctttttcagcatttctgaagtttggtgggtacaaacaagaagacattcttattcacaaggctagggcgaggctcatgcagccttcttttgcattggtgtgtgacaaaagaaccaagtgcttgctgcttttcattcgaggtgctatcagcactaaagagcgcctgactgcagcaacttctgctgaagttccttttcaccatataattctatctgaaggaaagatcagcaatgtagttttagggtatgcacactgtgggatgcttgctggagctcgttggatcgcaaaacttgttattccccatcttcataacaaaatgcaggaattttctgggtaccacataaaggtcattgggcattcaatgggagctggcattggagcgattctgacttatattctccatgagcattatgagttcttgtcatgcagctgtctggcatttgctcctcctgcatgtatgacatgggagctggcggagtcaggaaaggatttcatcacttctcttgtcaatagaaatgatgtggtaccagcattttcgaaagtttcttcggagagcctgcgatctgaggtgatggtttcatcaaagctggatgatgtgcaggatcactttcaccatggtttattcgccactataagccagcgtgttgccttcatcaggtcccatatgctctccatctctcactcaacagggaagattgcagattacggctctagtatttctgagcctttgcttaaagatacaataccgcccacagcaaatggacacggcgttgactgcagccagcagcaacaggtggttgcctctgaagaaacggtcgttgtactggttaacaataacgaccatttcaccagtttgaaggccgctgattcaggcgtcacatcacaagaaggttcagacagcaacgcggcatcatcggacagtccacaacggccgcccccgccggcagacgaagccccgaaccagaatggcaccggaaaggataagcagaaagaaccggtctcagcgggctgctcgtcgtcgcgccagctcttccctcctgggaggatcatccacatggtcgcgctgccgccgcagcagccggacccaaactccgacgacggcacgagcagcggtgaggtcgttggcatatacgagacgccgaggggtttgtacgggaagatacggctcgcgcccaacatgattaaagaacattacatgcctagctatatacgtacgatggaatcgttgttggaacagctccagaaggacgacgatgatggcagtgtatgtacatgtaccgcaccaagtgacctgtgaattcttgtggagaactcgggcagtgattattccaattctttcttaaccatttcgtattgcattattggaaaggaaaaaaaaagtacaataatgtgggtgtgtgtttggtaaaatatgaacgaaatgaacctcgctcaagtctcgaacgttgg

SEQ ID NO: 47267 - DNA, 1994 bp, Zea Mays
ctccgcctcgccacttcaacaccttcgtccagtcctttcctcgcgatcgcccaaatcctttcctccccgcccgcgccggcgccgctccgaatcccgagacgcccccgatgcccgccgccgtcgctgctgctgcggccgctgcgtcggccggtgcggtcctgctctgcctgctcctcaactgccgcccacagccggcgctggacgcccagagggagagtgaaaggggggaggacgaggcgtcgccgctcctgtcgggctcggggccggggagcgaccgcgaggaggaggagccgtggccggacagggcacccgtgacctgctgcgaggcggccgcggtagccgcgcgcacggcgcggcgcacgtgggagctcaccgtcgggcggtggggcctccacgggctcgccttcggtatcaagcgccacatgaagcgccagcatgagtacagtggaaatgactgtctccaacttaaaggacatcagacatatactgaagtatcttctctccttgagcacttgaagctttgcatgttcttctcaaagaaatctttttcagcatttctgaagtttggtgggtacaaacaagaagacattcttattcacaaggctagggcgagggtgactcatgcagccttcttttgcattggtgtgtgacaaaagaaccaagtgcttgctgcttttcattcgaggtgctatcagcactaaagagcgcctgactgcagcaacttctgctgaagttccttttcaccatataattctatctgaaggaaagatcagcaatgtagttttagggtatgcacactgtgggatgcttgctggagctcgttggatcgcaaaacttgttattccccatcttcataacaaaatgcaggaattttctgggtaccacataaaggtcattgggcattcaatgggagctggcattggagcgattctgacttatattctccatgagcattatgagttcttgtcatgcagctgtctggcatttgctcctcctgcatgtatgacatgggagctggcggagtcaggaaaggatttcatcacttctcttgtcaatagaaatgatgtggtaccagcattttcgaaagtttcttcggagagcctgcgatctgaggtgatggtttcatcaaagctggatgatgtgcaggatcactttcaccatggtttattcgccactataagccagcgtgttgccttcatcaggtcccatatgctctccatctctcactcaacagggaagattgcagattacggctctagtatttctgagcctttgcttaaagatacaataccgcccacagcaaatggacacggcgttgactgcagccagcagcaacaggtggttgcctctgaagaaacggtcgttgtactggttaacaataacgaccatttcaccagtttgaaggccgctgattcaggcgtcacatcacaagaaggttcagacagcaacgcggcatcatcggacagtccacaacggccgcccccgccggcagacgaagccccgaaccagaatggcaccggaaaggataagcagaaagaaccggtctcagcgggctgctcgtcgtcgcgccagctcttccctcctgggaggatcatccacatggtcgcgctgccgccgcagcagccggacccaaactccgacgacggcacgagcagcggtgaggtcgttggcatatacgagacgccgaggggtttgtacgggaagatacggctcgcgcccaacatgattaaagaacattacatgcctagctatatacgtacgatggaatcgttgttggaacagctccagaaggacgacgatgatggcagtgtatgtacatgtaccgcaccaagtgacctgtgaattcttgtggagaactcgggcagtgattattccaattctttcttaaccatttcgtattgcattattggaaaggaaaaaaaaagtacaataatgtgggtgtgtgtttggtaaaatatgaacgaaatgaacctcgctcaagtctcgaacgttgg

SEQ ID NO: 47268 - DNA, 1989 bp, Zea Mays
aacaccttcgtccagtcctttcctcgcgatcgcccaaatcctttcctccccgcccgcgccggcgccgctccgaatcccgagacgcccccgatgcccgccgccgtcgctgctgctgcggccgctgcgtcggccggtgcggtcctgctctgcctgctcctcaactgccgcccacagccggcgctggacgcccagagggagagtgaaaggggggaggacgaggcgtcgccgctcctgtcgggctcggggccggggagcgaccgcgaggaggaggagccgtggccggacagggcacccgtgacctgctgcgaggcggccgcggtagccgcgcgcacggcgcggcgcacgtgggagctcaccgtcgggcggtggggcctccacgggctcgccttcggtatcaagcgccacatgaagcgccagggtaatttgcagcatgagtacagtggaaatgactgtctccaacttaaaggacatcagacatatactgaagtatcttctctccttgagcacttgaagctttgcatgttcttctcaaagaaatctttttcagcatttctgaagtttggtgggtacaaacaagaagacattcttattcacaaggctagggcgagggtgactcatgcagccttcttttgcattggtgtgtgacaaaagaaccaagtgcttgctgcttttcattcgaggtgctatcagcactaaagagcgcctgactgcagcaacttctgctgaagttccttttcaccatataattctatctgaaggaaagatcagcaatgtagttttagggtatgcacactgtgggatgcttgctggagctcgttggatcgcaaaacttgttattccccatcttcataacaaaatgcaggaattttctgggtaccacataaaggtcattgggcattcaatgggagctggcattggagcgattctgacttatattctccatgagcattatgagttcttgtcatgcagctgtctggcatttgctcctcctgcatgtatgacatgggagctggcggagtcaggaaaggatttcatcacttctcttgtcaatagaaatgatgtggtaccagcattttcgaaagtttcttcggagagcctgcgatctgaggtgatggtttcatcaaagctggatgatgtgcaggatcactttcaccatggtttattcgccactataagccagcgtgttgccttcatcaggtcccatatgctctccatctctcactcaacagggaagattgcagattacggctctagtatttctgagcctttgcttaaagatacaataccgcccacagcaaatggacacggcgttgactgcagccagcagcaacaggtggttgcctctgaagaaacggtcgttgtactggttaacaataacgaccatttcaccagtttgaaggccgctgattcaggcgtcacatcacaagaaggttcagacagcaacgcggcatcatcggacagtccacaacggccgcccccgccggcagacgaagccccgaaccagaatggcaccggaaaggataagcagaaagaaccggtctcagcgggctgctcgtcgtcgcgccagctcttccctcctgggaggatcatccacatggtcgcgctgccgccgcagcagccggacccaaactccgacgacggcacgagcagcggtgaggtcgttggcatatacgagacgccgaggggtttgtacgggaagatacggctcgcgcccaacatgattaaagaacattacatgcctagctatatacgtacgatggaatcgttgttggaacagctccagaaggacgacgatgatggcagtgtatgtacatgtaccgcaccaagtgacctgtgaattcttgtggagaactcgggcagtgattattccaattctttcttaaccatttcgtattgcattattggaaaggaaaaaaaaagtacaataatgtgggtgtgtgtttggtaaaatatgaacgaaatgaacctcgctcaagtctcgaacgttgg

SEQ ID NO: 47269 - DNA, 1882 bp, Zea Mays
aacaccttcgtccagtcctttcctcgcgatcgcccaaatcctttcctccccgcccgcgccggcgccgctccgaatcccgagacgcccccgatgcccgccgccgtcgctgctgctgcggccgctgcgtcggccggtgcggtcctgctctgcctgctcctcaactgccgcccacagccggcgctggacgcccagagggagagtgaaaggggggaggacgaggcgtcgccgctcctgtcgggctcggggccggggagcgaccgcgaggaggaggagccgtggccggacagggcacccgtgacctgctgcgaggcggccgcggtagccgcgcgcacggcgcggcgcacgtgggagctcaccgtcgggcggtggggcctccacgggctcgccttcggtatcaagcgccacatgaagcgccagggtaatttgcagcatgagtacagtggaaatgactgtctccaacttaaaggacatcagacatatactgaagtatcttctctccttgagcacttgaagctttgcatgttcttctcaaagaaatctttttcagcatttctgaagtttggtgggtacaaacaagaagacattcttattcacaaggctagggcgaggctcatgcagccttcttttgcattggtgtgtgacaaaagaaccaagtgcttgctgcttttcattcgaggtgctatcagcactaaagagcgcctgactgcagcaacttctgctgaagttccttttcaccatataattctatctgaaggaaagatcagcaatgtagttttagggtatgcacactgtgggatgcttgctggagctcgttggatcgcaaaacttgttattccccatcttcataacaaaatgcaggaattttctgggtaccacataaagctgcatgtatgacatgggagctggcggagtcaggaaaggatttcatcacttctcttgtcaatagaaatgatgtggtaccagcattttcgaaagtttcttcggagagcctgcgatctgaggtgatggtttcatcaaagctggatgatgtgcaggatcactttcaccatggtttattcgccactataagccagcgtgttgccttcatcaggtcccatatgctctccatctctcactcaacagggaagattgcagattacggctctagtatttctgagcctttgcttaaagatacaataccgcccacagcaaatggacacggcgttgactgcagccagcagcaacaggtggttgcctctgaagaaacggtcgttgtactggttaacaataacgaccatttcaccagtttgaaggccgctgattcaggcgtcacatcacaagaaggttcagacagcaacgcggcatcatcggacagtccacaacggccgcccccgccggcagacgaagccccgaaccagaatggcaccggaaaggataagcagaaagaaccggtctcagcgggctgctcgtcgtcgcgccagctcttccctcctgggaggatcatccacatggtcgcgctgccgccgcagcagccggacccaaactccgacgacggcacgagcagcggtgaggtcgttggcatatacgagacgccgaggggtttgtacgggaagatacggctcgcgcccaacatgattaaagaacattacatgcctagctatatacgtacgatggaatcgttgttggaacagctccagaaggacgacgatgatggcagtgtatgtacatgtaccgcaccaagtgacctgtgaattcttgtggagaactcgggcagtgattattccaattctttcttaaccatttcgtattgcattattggaaaggaaaaaaaaagtacaataatgtgggtgtgtgtttggtaaaatatgaacgaaatgaacctcgctcaagtctcgaacgttgg

SEQ ID NO: 47270 - DNA, 2102 bp, Zea Mays
aacaccttcgtccagtcctttcctcgcgatcgcccaaatcctttcctccccgcccgcgccggcgccgctccgaatcccgagacgcccccgatgcccgccgccgtcgctgctgctgcggccgctgcgtcggccggtgcggtcctgctctgcctgctcctcaactgccgcccacagccggcgctggacgcccagagggagagtgaaaggggggaggacgaggcgtcgccgctcctgtcgggctcggggccggggagcgaccgcgaggaggaggagccgtggccggacagggcacccgtgacctgctgcgaggcggccgcggtagccgcgcgcacggcgcggcgcacgtgggagctcaccgtcgggcggtggggcctccacgggctcgccttcggtatcaagcgccacatgaagcgccagagttcagacttcgtacggtcactgtactacgacactgcgcttgcggtgcccctggcgtacccagtacttgagcctgagtcaagatcggctgtatgaatgctcagaagttatggatctggtaatttgcagcatgagtacagtggaaatgactgtctccaacttaaaggacatcagacatatactgaagtatcttctctccttgagcacttgaagctttgcatgttcttctcaaagaaatctttttcagcatttctgaagtttggtgggtacaaacaagaagacattcttattcacaaggctagggcgaggctcatgcagccttcttttgcattggtgtgtgacaaaagaaccaagtgcttgctgcttttcattcgaggtgctatcagcactaaagagcgcctgactgcagcaacttctgctgaagttccttttcaccatataattctatctgaaggaaagatcagcaatgtagttttagggtatgcacactgtgggatgcttgctggagctcgttggatcgcaaaacttgttattccccatcttcataacaaaatgcaggaattttctgggtaccacataaaggtcattgggcattcaatgggagctggcattggagcgattctgacttatattctccatgagcattatgagttcttgtcatgcagctgtctggcatttgctcctcctgcatgtatgacatgggagctggcggagtcaggaaaggatttcatcacttctcttgtcaatagaaatgatgtggtaccagcattttcgaaagtttcttcggagagcctgcgatctgaggtgatggtttcatcaaagctggatgatgtgcaggatcactttcaccatggtttattcgccactataagccagcgtgttgccttcatcaggtcccatatgctctccatctctcactcaacagggaagattgcagattacggctctagtatttctgagcctttgcttaaagatacaataccgcccacagcaaatggacacggcgttgactgcagccagcagcaacaggtggttgcctctgaagaaacggtcgttgtactggttaacaataacgaccatttcaccagtttgaaggccgctgattcaggcgtcacatcacaagaaggttcagacagcaacgcggcatcatcggacagtccacaacggccgcccccgccggcagacgaagccccgaaccagaatggcaccggaaaggataagcagaaagaaccggtctcagcgggctgctcgtcgtcgcgccagctcttccctcctgggaggatcatccacatggtcgcgctgccgccgcagcagccggacccaaactccgacgacggcacgagcagcggtgaggtcgttggcatatacgagacgccgaggggtttgtacgggaagatacggctcgcgcccaacatgattaaagaacattacatgcctagctatatacgtacgatggaatcgttgttggaacagctccagaaggacgacgatgatggcagtgtatgtacatgtaccgcaccaagtgacctgtgaattcttgtggagaactcgggcagtgattattccaattctttcttaaccatttcgtattgcattattggaaaggaaaaaaaaagtacaataatgtgggtgtgtgtttggtaaaatatgaacgaaatgaacctcgctcaagtctcgaacgttgg

SEQ ID NO: 47271 - DNA, 1598 bp, Zea Mays
tgctgttgcctccagcgctgaagctgctagggtaatttgcagcatgagtacagtggaaatgactgtctccaacttaaaggacatcagacatatactgaagtatcttctctccttgagcacttgaagctttgcatgttcttctcaaagaaatctttttcagcatttctgaagtttggtgggtacaaacaagaagacattcttattcacaaggctagggcgaggctcatgcagccttcttttgcattggtgtgtgacaaaagaaccaagtgcttgctgcttttcattcgaggtgctatcagcactaaagagcgcctgactgcagcaacttctgctgaagttccttttcaccatataattctatctgaaggaaagatcagcaatgtagttttagggtatgcacactgtgggatgcttgctggagctcgttggatcgcaaaacttgttattccccatcttcataacaaaatgcaggaattttctgggtaccacataaaggtcattgggcattcaatgggagctggcattggagcgattctgacttatattctccatgagcattatgagttcttgtcatgcagctgtctggcatttgctcctcctgcatgtatgacatgggagctggcggagtcaggaaaggatttcatcacttctcttgtcaatagaaatgatgtggtaccagcattttcgaaagtttcttcggagagcctgcgatctgaggtgatggtttcatcaaagctggatgatgtgcaggatcactttcaccatggtttattcgccactataagccagcgtgttgccttcatcaggtcccatatgctctccatctctcactcaacagggaagattgcagattacggctctagtatttctgagcctttgcttaaagatacaataccgcccacagcaaatggacacggcgttgactgcagccagcagcaacaggtggttgcctctgaagaaacggtcgttgtactggttaacaataacgaccatttcaccagtttgaaggccgctgattcaggcgtcacatcacaagaaggttcagacagcaacgcggcatcatcggacagtccacaacggccgcccccgccggcagacgaagccccgaaccagaatggcaccggaaaggataagcagaaagaaccggtctcagcgggctgctcgtcgtcgcgccagctcttccctcctgggaggatcatccacatggtcgcgctgccgccgcagcagccggacccaaactccgacgacggcacgagcagcggtgaggtcgttggcatatacgagacgccgaggggtttgtacgggaagatacggctcgcgcccaacatgattaaagaacattacatgcctagctatatacgtacgatggaatcgttgttggaacagctccagaaggacgacgatgatggcagtgtatgtacatgtaccgcaccaagtgacctgtgaattcttgtggagaactcgggcagtgattattccaattctttcttaaccatttcgtattgcattattggaaaggaaaaaaaaagtacaataatgtgggtgtgtgtttggtaaaatatgaacgaaatgaacctcgctcaagtctcgaacgttgg

SEQ ID NO: 47272 - DNA, 3514 bp, Zea Mays
atggcggagctcgccgctgacttcctgggaacgcctagaccaggacgacgactcggttcgcggacgaagccagccgtagtcctcccttctcagatctgcgcgctcgtggtgcaggagcgctcctggccccccgccgcgacggtggccagggccccctcgctggcgtcccgatcgcgtcaaccacctcaaccgcgctggcgtccgcctccacgggtagcatgtaaggaggccctaacgagttacaacagccttgataacccagccgcaggtgcaccagtagaacagctaaatgagctcgaggaagttttcaagaaggctgcaaagactgatactccagcagaagtcctacactgcctcactcaatattttatttcgctctgttggttttgtctctctggtctaagtctaaccactcagcctatcttatttgcaggtacttgaccatctctgttgcaaaatcacccatgctgaaattaatcaagttacctattgattttttcttaaaacttggagaactagaagtgtttcctcacaagttttgtacatgtctcgctaataccatgtaatttcacaagatgttgtgatagaccacatatattgtctgctaggtagaaggatgaatgatctcacagaccaaacaaagcacttataggggacagattcaaacatgaactgaataggaaaatccctagagcaacatacctttctaaacaggccctgagaagaatattcatttcatacagctagaccacaaaaataattggaatccatattgtttgatgtgatgatatgatctgtcattattctatgttgttttattcagcaatttagattaacaaggcagaacgaggagaggagcaagaaggtggccaatgacctcgccgcggcgctgttcgtggtcaccgtggaggtgaagcaggtcaaagcgtggctctccgatgcgcaggatgagctggaggccagcaacatcgaggccgacttggtgtgcattagttcctatgcttcatgaaaactgtctttgctgatgatagacgacttacattggcgcaggaatgatctgcccacatattgtcaacatctctgtcctgcttggaggaatcctctcgtggggactccaatgttacatccggagaaggttcttgttgaccggaaaggaaacatcaaggttctgattttggtcttagtgctttaccgtcgtatctcgtggtatatgataaatagttttttagactgtgaaatgatttcagcaagctgaccgctcatcgtattgcatgatatatttactttcagattgatggattgttgtatacaacctgtggtagccccaattacattgccactgaggtgaagaaagcctgaccactcctaggccaaacaattcttggtgtccagttattaatttcttgtgataaatgcttacaggttctgtagacacagaagatacgatgtatcattatcagatatttgatcttgtggtgtgattatttatataatgctcgtatgatatcttttggttgatgaccaaaacattgttgttatctatcataaggtacttaatcagataaaagtgaagtttagttgtagcatttatgtgacatcattttaattatgctactttttccttacatggtctagatttttaagggtgatactcagatccgagagtggctttctcctggtgcatgaaatcttctttggaggatttttgaacccaacccgatgaggctgatctggtcggtgcacgaaagtatattgtggcatcatctgaatgttggtgtgtgtttgttaactatggtcggtgcgacatcttaactttttgtctaggatgtcaattgtgatgcgtgcaatctaaatcgggaattttttgttgtttggtgtttgcatactatgtaatgttgcccatatcatcatcagatttgtcattctgtatcgatgttttataccatttttaactaccgtggcaacgcacgggcatatatctagtaaatgtctaaatgtataacattttggacataataagatccactgggggctttctttttcctactaattgaatgtgcaatataagcattttatttacaaattaactggtgttactttactcagtcaatctggccaaaaaataaatatatttgtgtatggagtgacatagggtgctacaaaactgggtttaataatagaataatagatagcagtaagcaaacatgttgcaaactatattcaggtctgtaagaaatactacagacatcttttgtggttataaaaagctagaaataagtacataactcgaccatggcatggcgttactagtttattttgggaaggaaacttaaagaaggttacacagattgacgtgcaaacagaacctcctaagaaatatcatgggtcctggtacataccacggcatggcgttactagtttattttgggaaggaaacttaaagaaggttacacagattgacgtgcaaacagaacctcctaagaaatatcatgggtcctggtacataccacggcatggcgttactagtttattttgggaaggaaacttaaagaaggttagcacagattgacgtgcaaacagaacctcctaagaaatatcatgggtcctggtacataccacggcatggcattactagtttattttgggaaggaaacttaaagaaggttagcacagattgacgtgcaaacaggacctcctaagaaatatcatgggtcctggtacaatagccattcggaaattatgagatgttcatgtgcttgcttccatttgtagtaatataaaaatagcgttagactcccattcgtgatgcagttgattcgtaagtgcaatggaagttagacttcctactcgtgtagcagccgattcttacgtgaaatggccaggggtggaaccagcggttagtttttgtaggcagccaactaccctagaatttggtctaaaaacaaactacttctcagcgtttagacccaaggaaacaaatctatacgacttgcaacctaatttgatgatttaaatgcattatgagatattttggttattttctgctcatttaattgatagaaattatatatgtgtggtaccaaaatatacatgttattacgtatcaaaaaaaattatccttgactacctagtttcaaatcctaggcccgccactggcaatggcagtagtactgatacgagattttgcactgaacaacacgttttgttagctctacttaacgcagtatatgtttcgttgatgtatcaggattcaaacaagcaaaattgcacatgagctagctatatcacgattcaggtaaatttacagggaaaactttaggtgaaacatgacatctccgcaaagaaggtaaactgcacgaaatctgaaaccaccgatgcctgatggacggccacatcctccagctattcctcactagagaaccacagaggaagcagagggcgggaaggaggagattaaacgtacggattggacacgggatgaatcgagctgccggtcctcgacatgatcagtgag

SEQ ID NO: 47273 - DNA, 2577 bp, Zea Mays
gtggaccgcttatactcgatcagacggtcgatctggctctgcgaagatctcgacagcaccgttccgtttccatccccatcgtcgtcgtcgccgccgccgccgccggagatgggccatgcgccagcgaacggcaagcgctcgccgcctccgcctcctctcggacgttgccacttctggctccccaacaagcgccgccactgcgccaactcccccctcccgtcctctcagtattgcggaaaccacctccccgagtccgcccccggggctggccgccgcgtcccctgccccgtcgacccctcccacacggtgctcgaggagaacctggaggcgcacgtcggcaagtgccccctgaagaagcaggtcgccgcgctcaccgcgcagccgtactactccaagggcatcaactccggtacacctgaggcgggctgcggtgtgacgtcggcggagaagcgtgcggccgtgtacaggcttaccgaggaggagttccgccttctgctcgggaagatccggtcggtgcacgcggcggtcgcagcgccgatacgggagtccaacctgatcaccgctgcttgcgacaagtggatgagcggccaggttgataggaagatgccgtaccaagagaggcatgtcgcgcagcaggcgtccattgttggaaacatggaggcatttggcttgctgcagaaggctagccatgaggtggttgatggggagaatgcggcggtgagtgctcaggcagttgtggagtttggagctggaagagggtacttgactcaggtgctggtggactgttatgggattagaaatgtcttcttggttgagaggcggtcctacaaacttaaggctgatcgaagcttgcgtcaaaatgaagatgttaccttggagcgtttgagaattgatattgaggatttgaaactgcacggaattgaggcattgagggggctccaatatctagcaattggaaagcatttgtgtggacctgccacagatgaccatgatgtgctgtcttcctgaacgatatgaccaaaccgaagaaaacggcaaacgtagtcttcaaggccttgctctagctacctgctgccaccatctttgccagtggaagcattacacgaataaatctttcctctcgggactaggtatcacagaagaagattttcatgccatgacatggtttagcagctgggctgtggatggtgatcatagctacccagatgctcctgtggaggttgaagacacgccctctgaagtcagaggaccagagaagcttgatcaggaggccgtcggaattgagagagtaatccgaagtataccagcaggggagagggccactctgggatccatgtgtaaagatatcattgatacggggaggctactatggcttgggcagaagggtctggttgctgatcttgtaagctatgttccatccagcatttcaccagaaaaccgtctgcttatcgcaaaatgtacatcttgattataggctgaaaagcaagtgcacgcatttcagccctgcaaatttgcaggagcttggattgtataagatactttcaactaataaaatcttgagtttttcagtgtcattccaagatatgttatgtctcaacgattacataaacaaggacatgttttattctgacggctcacaaaatctccgcaaggaagaaacaaattctacaataaaaatgatgaatggaatcgaagcatgttaggctgtaaatatagttgatattgacgatatataagcttacaacagcaaccggatcttgctgcaaatgcaaaggaacttcttcacacggtaattatgttcctttgcgctagagctctcaagttacaaaactgctaggtttatttcatcctaaaatttacatgggtccacgctccagcagctcccatctgaatgtgggcgcggcataaaccctgggaaaggtgtggaggagtatgcccacgcagacacaaaccacagcgactcccatcacagttaacattgctggcctataaaggaaggtccttgccgtagaacttggatgcatccgtgcctgacggctgcagaggaggcaacctggcactgatgcagacattgccctgcatatctcgaggctaacatcgccaggcttaacgccatcggttattacagggcatatactgctcggaacaccgaggacaacgtggccttcgccaagatgcttatcaatcttcttttggaccagattcaggtaagcgccattgcctctctgccgagcatagtcttctggggtaaaacctgtttcgtcccgtgcattgctccaagcactaattccaatctgcacgggacacagaatgtcagatataacaataccattcaactctgttagtcagattttgaatctatgcaatgcatctgacatctggtaactcatgtattcatcacttcacagttcaatgtacgtgtaagtgtgtgatttaatgaaagaataaaacatcaaaagaatgataatttactaagtttcccatgatctactgttgtaaattaatatagctcagcttgaggtggtgggaaaaaagagggacaaaattccaagaactagaaaagagaataccagtcca

SEQ ID NO: 47274 - DNA, 2388 bp, Zea Mays
atagttatccactttgcccctattgcttatgctttttccgctttgtgtcacactgggacacacaagctttgctccaccccttgtttgttgtacttcaaatcgcggagcccctttccccactgccatttgttttggccatctggtgctcatttccctcgccacaggctgctcagctcagccacatccttgcttgcaaagatctgtctctctctctctctccctccctcccttcttcaatggcggcggcttcctgccctgttgccctcgcattcttctcctcctcctgtattctcctcctccttcaaacaatctgctgttcaggagtatttgtggagctatcatacgactcgacacaggtcaaggtacagccgtttgcgtgcagagacaagccatgcggatcggagtccaccgccggctcgttcatcagcgatgttctcggtcccgaccgccggctcaacgtcagcggcatcgtcgtgacggccaccggcacgcggcagctcggcgcgcttctccgcactttgcggtcgcttcaggcttctctcggcgacgctgggttggcggagcgcgtcaaggtctcgccggagctctcgatgtcttctctgcgggtcgtgggcaaggatctcgctcgtgcgaccaagaagcggcggtggggcaaggtcctggagttcgtcaggaggacacgctcgttggtctttgttcgtgtggacacggaggcgggagcgaacggggaggtcgtcgcggtgatcgaagaggccgccgctcaagttgccgctgtgttgggcgctgacgtcggcgtcgtgctccacatcaagagccgtgcggttccaagcgcggcggcaatggaaaagcttaccggccggggggagaagaggtcgttgggtgttctggtggacgtgtcgtttcctcggcgggaccgggagctcggcgaggcgagagcgacggcgcacgacgagttctctccggtcagtaatccggcgacgacgcccgtgagcaaccccgtgaccgtgccggccacgaaccccgtggccaacccgatgtccccgggattcgtcaccgtgccgtcgaccaacccgggcaacgggttcgcgagcaacacgaacctgccgccgctgtaccccgagccgacgacggcgccggtcaccatgcccacgcctgacccgacgacgacgatgccgccgcccgtgaccgtgccgtcccccttcgcgaacccggtcgccgcgccgacgaccaccatgccggggacggtgacgaacccggccacgacgccgtcgcagttcccaccggtcaccaacccggtgaccacgtacccgtacccgcagcagggcggcatgccgggaacgacgccggaggtgtaccagcctcccgcgacgacgacgcccggcacagcgcagcagagcgcgccgtctgtgaccgggcaggggcaggcgtggtgcgtcgccaagtcggggctcatggacgccgccctccaggacgggatcgactacgcgtgcggcgcgggcggcgccgactgctcggccatccagcccatgggcacctgctacaaccccaacacgctgcaggcgcacgcctcgtacgccttcaacagctacttccagcggaacccgtcggcgaccagctgcgacttcggaggcgccggcatgctcgtcaacgtcaacccaagctcgggaacttgcgtgtaccagacatcagcaggtttcggcgccggttacagcccgggtacgacgacgggcggcggtggcgtgcccagcggttacactccggggatgccgggcgccggttacggcgcagcgggaggaggggtgtcgggcaccatgggagggggctccggctcgacggtgctgaacgcaaacaaccccggcggcaactcgatgtacggcggctacgacaacacggcggggctcaccgccggctcggcgccgctaccctgcggcggcggcggctgggccgtcctgtgcctcgtctggatggtcaccttcgcatttgtcaaggagaaagtgtagtgtggaaggagcccgcctcgaggggctggaaggaataggatcacactgccacgtgtttgttactcagttatgtagtgttgtgttgtacagatgagtgagatgtttttttccctttagaggccggagatgagaagactagatgtttgtgtcgttgtgtgtgcgcgcgcgcgctcatggtggcagagctgaatctgaatgatttggccatacatgttgtaggtgaacatacaacatcgagtcccttctccatggaccatgtttggttagtctagcgcaaatatgagtgaaagagtctctagatgagttagttagatgatctgattagcacttattatgtcctaaccctaaatcgtagtgaaaacaaatttaagattggtcttaaaaaagt

SEQ ID NO: 47275 - DNA, 2387 bp, Zea Mays
atagttatccactttgcccctattgcttatgctttttccgctttgtgtcacactgggacacacaagctttgctccaccccttgtttgttgtacttcaaatcgcggagcccctttccccactgccatttgttttggccatctggtgctcatttccctcgccacaggctgctcagctcagccacatccttgcttgcaaagatctgtctctctctctctctccctccctcccttcttcaatggcggcggcttcctgccctgttgccctcgcattcttctcctcctcctgtattctcctcctccttcaaacaatctgctgttcaggagtatttgtggagctatcatacgactcgacacaggtcaaggtacagccgtttgcgtgcagagacaagccatgcggatcggagtccaccgccggctcgttcatcagcgatgttctcggtcccgaccgccggctcaacgtcagcggcatcgtcgtgacggccaccggcacgcggcagctcggcgcgcttctccgcactttgcggtcgcttcaggcttctctcggcgacgctgggttggcggagcgcgtcaaggtctcgccggagctctcgatgtcttctctgcgggtcgtgggcaaggatctcgctcgtgcgaccaagaagcggcggtggggcaaggtcctggagttcgtcaggaggacacgctcgttggtctttgttcgtgtggacacggaggcgggagcgaacggggaggtcgtcgcggtgatcgaagaggccgccgctcaagttgccgctgtgttgggcgctgacgtcggcgtcgtgctccacatcaagagccgtgcggttccaagcgcggcggcaatggaaaagcttaccggccggggggagaagaggtcgttgggtgttctggtggacgtgtcgtttcctcggcgggaccgggagctcggcgaggcgagagcgacggcgcacgacgagttctctccggtcagtaatccggcgacgacgcccgtgagcaaccccgtgaccgtgccggccacgaaccccgtggccaacccgatgtccccgggattcgtcaccgtgccgtcgaccaacccgggcaacgggttcgcgagcaacacgaacctgccgccgctgtaccccgagccgacgacggcgccggtcaccatgcccacgcctgacccgacgacgacgatgccgccgcccgtgaccgtgccgtcccccttcgcgaacccggtcgccgcgccgacgaccaccatgccggggacggtgacgaacccggccacgacgccgtcgcagttcccaccggtcaccaacccggtgaccacgtacccgtacccgcagcagggcggcatgccgggaacgacgccggaggtgtaccagcctcccgcgacgacgacgcccggcacagcgcagcagagcgcgccgtctgtgaccgggcaggggcaggcgtggtgcgtcgccaagtcggggctcatggacgccgccctccaggacgggatcgactacgcgtgcggcgcgggcggcgccgactgctcggccatccagcccatgggcacctgctacaaccccaacacgctgcaggcgcacgcctcgtacgccttcaacagctacttccagcggaacccgtcggcgaccagctgcgacttcggaggcgccggcatgctcgtcaacgtcaacccaagctcgggaacttgcgtgtaccagacatcagcaggttcggcgccggttacagcccgggtacgacgacgggcggcggtggcgtgcccagcggttacactccggggatgccgggcgccggttacggcgcagcgggaggaggggtgtcgggcaccatgggagggggctccggctcgacggtgctgaacgcaaacaaccccggcggcaactcgatgtacggcggctacgacaacacggcggggctcaccgccggctcggcgccgctaccctgcggcggcggcggctgggccgtcctgtgcctcgtctggatggtcaccttcgcatttgtcaaggagaaagtgtagtgtggaaggagcccgcctcgaggggctggaaggaataggatcacactgccacgtgtttgttactcagttatgtagtgttgtgttgtacagatgagtgagatgtttttttccctttagaggccggagatgagaagactagatgtttgtgtcgttgtgtgtgcgcgcgcgcgctcatggtggcagagctgaatctgaatgatttggccatacatgttgtaggtgaacatacaacatcgagtcccttctccatggaccatgtttggttagtctagcgcaaatatgagtgaaagagtctctagatgagttagttagatgatctgattagcacttattatgtcctaaccctaaatcgtagtgaaaacaaatttaagattggtcttaaaaaagt

SEQ ID NO: 47276 - DNA, 1710 bp, Zea Mays
aaaaatctttacattaaacacaaccgtacatatgggctgctgcgaatagtgaaaccgaacggcacaggccgacgcaaatcacgcagcgaagcccaaacccgctgattttatccgctcccattccacacgacaccagatatttggaatacaccccgtttgcggttcctgtcccgaggcgggaaactacacagcggagctttcgcggggaggcggcggcggatccgcgctcggttcgccttgccttgccgacgccgccgacgtgccatgggaatcaagggcttgacgaagctgctggcgcagcacgcaccgacagccgcggtgcagcggcgggtggaggactaccgcggccgcgtcatcgccgtagacgccagcgtcagcatctaccagttcctcgccgtggttggaaggaaaggatcagagcttctgaccaatgaggctggtgaaatcacaagtcatctgcagggtatgttgaaccggacgataagaatgctagaagcagggataaagcccgtgtttgtgtttgatggcgagccacctgaaatgaagaaaaaggagcttgcaaaaaggtccttgaagagggatgatgctattaaagatcttaatagagctatggagattggggatgagaatgcaattgaaaaatttagtaaaaggactgtcaaggttacaggaaggcataatgatgactgcaagaggctgttaaggttgatgggtgtccctgtagttgaggcaccaggtgaggctgaagcacagtgtgcagcactttgtgaaaatcaccaggtttatgctgtagcttcagaggacatggacacactgacttttggtgcccgaaggtttcttcgtcacttaactgaccttggttataagaaatctcctgtgacagaatttgatgtgtcaaaggtatcggaggacaaagagccttgaaactcattcgtcagcatggttgcatagaagaagttctgcaaaatctgaaccagacgagattcagtgttccagaagactggccttaccaggaagttcggacattgtttaaggaacctaatgtttgtgcaggaattccagatttcacgtggacctcaccagatccagagggccttatggatttcttgtcaacagaaaacagtttcagtcctgatagagtaacaaaggcagtagaaaagataaaggttgctagggataggtattccccaggcagaatgaagcatttaacaccagttgctagcttacgaggatctcatactgagaaggaaccccagtgcatactaggttctccaggacaaactctgaaggtcatgtcatctccacaactgctctggtttatgagaaggttgaccgaagctgtagctgcggctacatttttagatgatggaaaccgatatccggctttcacctcactgggaggatatggccaagtagctgtagctgcagctacatgaaaggatgctcacttataatatgttaatctcgtgctactattgtaatctttccatttctattgtaacgtagttaatcagctactgcagttcatcgttgacatctaatgctggttgctgctacaccggttgaccttaccttttgtcaatatattctgagttttcgggatggtgtttttaaacctatgctgagagggtaaactggcagaaatgtcctcgactttcatgtgatggcattgtatgcatcgtgtgcttaccacattatataatttttttt

SEQ ID NO: 47277 - DNA, 854 bp, Zea Mays
cgcaaatcacgcagcgaagcccaaacccgctgattttatccgctcccattccacacgacaccagatatttggaatacaccccgtttgcggttcctgtcccgaggcgggaaactacacagcggagctttcgcggggaggcggcggcggatccgcgctcggttcgccttgccttgccgacgccgccgacgtgccatgggaatcaaggccgtggttggaaggaaaggatcagagcttctgaccaatgaggctggtgaaatcacaagtcatctgcagggtatgttgaaccggacgataagaatgctagaagcagggataaagcccgtgtttgtgtttgatggcgagccacctgaaatgaagaaaaaggagcttgcaaaaaggtccttgaagagggatgatgctattaaagatcttaatagagctatggagattggggatgagaatgcaattgaaaaatttagtaaaaggactgtcaaggttacaggaaggcataatgatgactgcaagaggctgttaagatcagattctgccttttattgatgtcttcttccagttccatgaggggtcagcagaatattgataatcttttgaacttaaagaatagtttggcactagtagaacttgcatattgcatgcttaggatgttttaagtgtttggtcaagtcctatttgtatggtttctcagacaagtctaagtcattctgtctatgtatattagcattcctgagatttttagcacaggttaagtaggaagggaaaatgttgatgctcctcgcttgagccttgagaggtaatttaatgagagctgttttgagcctgtggcagaggtggtatattaggaatgcttttatttgtat

SEQ ID NO: 47278 - DNA, 952 bp, Zea Mays
cccaaacccgctgattttatccgctcccattccacacgacaccagatatttggaatacaccccgtttgcggttcctgtcccgaggcgggaaactacacagcggagctttcgcggggaggcggcggcggatccgcgctcggttcgccttgccttgccgacgccgccgacgtgccatgggaatcaagggcttgacgaagctgctggcgcagcacgcaccgacagccgcggtgcagcggcgggtggaggactaccgcggccgcgtcatcgccgtagacgccagcgtcagcatctaccagttcctcgccgtggttggaaggaaaggatcagagcttctgaccaatgaggctggtgaaatcacaagtcatctgcagggtatgttgaaccggacgataagaatgctagaagcagggataaagcccgtgtttgtgtttgatggcgagccacctgaaatgaagaaaaaggagcttgcaaaaaggtccttgaagagggatgatgctattaaagatcttaatagagctatggagattggggatgagaatgcaattgaaaaatttagtaaaaggactgtcaaggttacaggaaggcataatgatgactgcaagaggctgttaagatcagattctgccttttattgatgtcttcttccagttccatgaggggtcagcagaatattgataatcttttgaacttaaagaatagtttggcactagtagaacttgcatattgcatgcttaggatgttttaagtgtttggtcaagtcctatttgtatggtttctcagacaagtctaagtcattctgtctatgtatattagcattcctgagatttttagcacaggttaagtaggaagggaaaatgttgatgctcctcgcttgagccttgagaggtaatttaatgagagctgttttgagcctgtggcagaggtggtatattaggaatgcttttatttgtat

SEQ ID NO: 47279 - DNA, 823 bp, Zea Mays
agatatttggaatacaccccgtttgcggttcctgtcccgaggcgggaaactacacagcggagctttcgcggggaggcggcggcggatccgcgctcggttcgccttgccttgccgacgccgccgacgtgccatgggaatcaagggcttgacgaagctgctggcgcagcacgcaccgacagccgcggtgcagcggcgggtggaggactaccgcggccgcgtcatcgccgtagacgccagcgtcagcatctaccagttcctcgccgtggttggaaggaaaggatcagagcttctgaccaatgaggctggtgaaatcacaagtcatctgcagggtatgttgaaccggacgataagaatgctagaagcagggataaagcccgtgtttgtgtttgatggcgagccacctgaaatgaagaaaaaggagcttgcaaaaaggtccttgaagagggatgatgctattaaagatcttaatagagctatggagattggggatgagaatgcaattgaaaaatttagtaaaaggactgtcaaggttacaggaaggcataatgatgactgcaagaggctgttaaggttgatgggtgtccctgtagttgaggcaccaggtgaggctgaagcacagtgtgcagcactttgtgaaaatcaccaggtttatgctgtagcttcagaggacatggacacactgacttttggtgcccgaaggtttcttcgtcacttaactgaccttggttataagaaatctcctgtgacagaatttgatgtgtcaaagatgataatctttccattagtggagatgactatatatagagcctcatgggccatatgg

SEQ ID NO: 47280 - DNA, 1513 bp, Zea Mays
agatatttggaatacaccccgtttgcggttcctgtcccgaggcgggaaactacacagcggagctttcgcggggaggcggcggcggatccgcgctcggttcgccttgccttgccgacgccgccgacgtgccatgggaatcaagggcttgacgaagctgctggcgcagcacgcaccgacagccgcggtgcagcggcgggtggaggactaccgcggccgcgtcatcgccgtagacgccagcgtcagcatctaccagttcctcgccgtggttggaaggaaaggatcagagcttctgaccaatgaggctggtgaaatcacaagtcatctgcagggtatgttgaaccggacgataagaatgctagaagcagggataaagcccgtgtttgtgtttgatggcgagccacctgaaatgaagaaaaaggagcttgcaaaaaggtccttgaagagggatgatgctattaaagatcttaatagagctatggagattggggatgagaatgcaattgaaaaatttagtaaaaggactgtcaaggttacaggaaggcataatgatgactgcaagaggctgttaaggttgatgggtgtccctgtagttgaggcaccaggtgaggctgaagcacagtgtgcagcactttgtgaaaatcaccaggtttatgctgtagcttcagaggacatggacacactgacttttggtgcccgaaggtttcttcgtcacttaactgaccttggttataagaaatctcctgtgacagaatttgatgtgtcaaaggttttggaagaacttggactcacgatggatcagttcattgacttgtgtatccttagtggatgtgattactgtgagaatattagaggtatcggaggacaaagagccttgaaactcattcgtcagcatggttgcatagaagaagttctgcaaaatctgaaccagacgaggaaccccagtgcatactaggttctccaggacaaactctgaaggtcatgtcatctccacaagtatgcaagagtccaagctctggtttcagatatggtagctcaaagccatttatgctgggcagacagtcaggatttcatggaatgccttatgctctctcttttatctaaaatctgtagctgctctggtttatgagaaggttgaccgaagctgtagctgcggctacatttttagatgatggaaaccgatatccggctttcacctcactgggaggatatggccaagtagctgtagctgcagctacatgaaaggatgctcacttataatatgttaatctcgtgctactattgtaatctttccatttctattgtaacgtagttaatcagctactgcagttcatcgttgacatctaatgctggttgctgctacaccggttgaccttaccttttgtcaatatattctgagttttcgggatggtgtttttaaacctatgctgagagggtaaactggcagaaatgtcctcgactttcatgtgatggcattgtatgcatcgtgtgcttaccacattatataatttttttt

SEQ ID NO: 47281 - DNA, 1622 bp, Zea Mays
agatatttggaatacaccccgtttgcggttcctgtcccgaggcgggaaactacacagcggagctttcgcggggaggcggcggcggatccgcgctcggttcgccttgccttgccgacgccgccgacgtgccatgggaatcaagggcttgacgaagctgctggcgcagcacgcaccgacagccgcggtgcagcggcgggtggaggactaccgcggccgcgtcatcgccgtagacgccagcgtcagcatctaccagttcctcgccgtggttggaaggaaaggatcagagcttctgaccaatgaggctggtgaaatcacaagtcatctgcagggtatgttgaaccggacgataagaatgctagaagcagggataaagcccgtgtttgtgtttgatggcgagccacctgaaatgaagaaaaaggagcttgcaaaaaggtccttgaagagggatgatgctattaaagatcttaatagagctatggagattggggatgagaatgcaattgaaaaatttagtaaaaggactgtcaaggttacaggaaggcataatgatgactgcaagaggctgttaaggttgatgggtgtccctgtagttgaggcaccaggtgaggctgaagcacagtgtgcagcactttgtgaaaatcaccaggtttatgctgtagcttcagaggacatggacacactgacttttggtgcccgaaggtttcttcgtcacttaactgaccttggttataagaaatctcctgtgacagaatttgatgtgtcaaaggtatcggaggacaaagagccttgaaactcattcgtcagcatggttgcatagaagaagttctgcaaaatctgaaccagacgaggaattccagatttcacgtggacctcaccagatccagagggccttatggatttcttgtcaacagaaaacagtttcagtcctgatagagtaacaaaggcagtagaaaagataaaggttgctagggataggtattccccaggcagaatgaagcatttaacaccagttgctagcttacgaggatctcatactgagaaggaaccccagtgcatactaggttctccaggacaaactctgaaggtcatgtcatctccacaagtatgcaagagtccaagctctggtttcagatatggtagctcaaagccatttatgctgggcagacagtcaggatttcatggaatgccttatgctctctcttttatctaaaatctgtagctgctctggtttatgagaaggttgaccgaagctgtagctgcggctacatttttagatgatggaaaccgatatccggctttcacctcactgggaggatatggccaagtagctgtagctgcagctacatgaaaggatgctcacttataatatgttaatctcgtgctactattgtaatctttccatttctattgtaacgtagttaatcagctactgcagttcatcgttgacatctaatgctggttgctgctacaccggttgaccttaccttttgtcaatatattctgagttttcgggatggtgtttttaaacctatgctgagagggtaaactggcagaaatgtcctcgactttcatgtgatggcattgtatgcatcgtgtgcttaccacattatataatttttttt

SEQ ID NO: 47282 - DNA, 1223 bp, Zea Mays
aaagactctcgcgaaggagcaagccaccagaactttttaggcaccaggtgaggctgaagcacagtgtgcagcactttgtgaaaatcaccaggtttatgctgtagcttcagaggacatggacacactgacttttggtgcccgaaggtttcttcgtcacttaactgaccttggttataagaaatctcctgtgacagaatttgatgtgtcaaaggttttggaagaacttggactcacgatggatcagttcattgacttgtgtatccttagtggatgtgattactgtgagaatattagaggtatcggaggacaaagagccttgaaactcattcgtcagcatggttgcatagaagaagttctgcaaaatctgaaccagacgagattcagtgttccagaagactggccttaccaggaagttcggacattgtttaaggaacctaatgtttgtgcaggaattccagatttcacgtggacctcaccagatccagagggccttatggatttcttgtcaacagaaaacagtttcagtcctgatagagtaacaaaggcagtagaaaagataaaggttgctagggataggtattccccaggcagaatgaagcatttaacaccagttgctagcttacgaggatctcatactgagaaggaaccccagtgcatactaggttctccaggacaaactctgaaggtcatgtcatctccacaagtatgcaagagtccaagctctggtttcagatatggtagctcaaagccatttatgctgggcagacagtcaggatttcatggaatgccttatgctctctcttttatctaaaatctgtagctgctctggtttatgagaaggttgaccgaagctgtagctgcggctacatttttagatgatggaaaccgatatccggctttcacctcactgggaggatatggccaagtagctgtagctgcagctacatgaaaggatgctcacttataatatgttaatctcgtgctactattgtaatctttccatttctattgtaacgtagttaatcagctactgcagttcatcgttgacatctaatgctggttgctgctacaccggttgaccttaccttttgtcaatatattctgagttttcgggatggtgtttttaaacctatgctgagagggtaaactggcagaaatgtcctcgactttcatgtgatggcattgtatgcatcgtgtgcttaccacattatataatttttttt

SEQ ID NO: 47283 - DNA, 1005 bp, Zea Mays
attttgatgaatgaagccgatgctgctctcaagtctatactttagtgaagaaattggccaactgcagctcagaaggcacgtagtgaagagcaaatgttttctgatgacaacgaggcagagtaaagaaggcatctacaccaatatgtttagtatcggaggacaaagagccttgaaactcattcgtcagcatggttgcatagaagaagttctgcaaaatctgaaccagacgaggaattccagatttcacgtggacctcaccagatccagagggccttatggatttcttgtcaacagaaaacagtttcagtcctgatagagtaacaaaggcagtagaaaagataaaggttgctagggataggtattccccaggcagaatgaagcatttaacaccagttgctagcttacgaggatctcatactgagaaggaaccccagtgcatactaggttctccaggacaaactctgaaggtcatgtcatctccacaagtatgcaagagtccaagctctggtttcagatatggtagctcaaagccatttatgctgggcagacagtcaggatttcatggaatgccttatgctctctcttttatctaaaatctgtagctgctctggtttatgagaaggttgaccgaagctgtagctgcggctacatttttagatgatggaaaccgatatccggctttcacctcactgggaggatatggccaagtagctgtagctgcagctacatgaaaggatgctcacttataatatgttaatctcgtgctactattgtaatctttccatttctattgtaacgtagttaatcagctactgcagttcatcgttgacatctaatgctggttgctgctacaccggttgaccttaccttttgtcaatatattctgagttttcgggatggtgtttttaaacctatgctgagagggtaaactggcagaaatgtcctcgactttcatgtgatggcattgtatgcatcgtgtgcttaccacattatataatttttttt

SEQ ID NO: 47284 - DNA, 1049 bp, Zea Mays
ctcaagtctatactttagtgaagaaattggccaactgcagctcagaaggcacgtagtgaagagcaaatgttttctgatgacaacgaggcagagtaaagaaggcatctacaccaatatgtttagtatcggaggacaaagagccttgaaactcattcgtcagcatggttgcatagaagaagttctgcaaaatctgaaccagacgagattcagtgttccagaagactggccttaccaggaagttcggacattgtttaaggaacctaatgtttgtgcaggaattccagatttcacgtggacctcaccagatccagagggccttatggatttcttgtcaacagaaaacagtttcagtcctgatagagtaacaaaggcagtagaaaagataaaggttgctagggataggtattccccaggcagaatgaagcatttaacaccagttgctagcttacgaggatctcatactgagaaggaaccccagtgcatactaggttctccaggacaaactctgaaggtcatgtcatctccacaagtatgcaagagtccaagctctggtttcagatatggtagctcaaagccatttatgctgggcagacagtcaggatttcatggaatgccttatgctctctcttttatctaaaatctgtagctgctctggtttatgagaaggttgaccgaagctgtagctgcggctacatttttagatgatggaaaccgatatccggctttcacctcactgggaggatatggccaagtagctgtagctgcagctacatgaaaggatgctcacttataatatgttaatctcgtgctactattgtaatctttccatttctattgtaacgtagttaatcagctactgcagttcatcgttgacatctaatgctggttgctgctacaccggttgaccttaccttttgtcaatatattctgagttttcgggatggtgtttttaaacctatgctgagagggtaaactggcagaaatgtcctcgactttcatgtgatggcattgtatgcatcgtgtgcttaccacattatataatttttttt

SEQ ID NO: 47285 - DNA, 1071 bp, Zea Mays
aacatgtgaaggtaatgggacaagctcccaagtgcattgacgatcaagagcaacaagctcctcggacaaggtatcggaggacaaagagccttgaaactcattcgtcagcatggttgcatagaagaagttctgcaaaatctgaaccagacgagattcagtgttccagaagactggccttaccaggaagttcggacattgtttaaggaacctaatgtttgtgcaggaattccagatttcacgtggacctcaccagatccagaggttttcattgatagaccataatacatgactcctattgtttcacaagctaagcatgctttgctttctgtgtttagggccttatggatttcttgtcaacagaaaacagtttcagtcctgatagagtaacaaaggcagtagaaaagataaaggttgctagggataggtattccccaggcagaatgaagcatttaacaccagttgctagcttacgaggatctcatactgagaaggaaccccagtgcatactaggttctccaggacaaactctgaaggtcatgtcatctccacaagtatgcaagagtccaagctctggtttcagatatggtagctcaaagccatttatgctgggcagacagtcaggatttcatggaatgccttatgctctctcttttatctaaaatctgtagctgctctggtttatgagaaggttgaccgaagctgtagctgcggctacatttttagatgatggaaaccgatatccggctttcacctcactgggaggatatggccaagtagctgtagctgcagctacatgaaaggatgctcacttataatatgttaatctcgtgctactattgtaatctttccatttctattgtaacgtagttaatcagctactgcagttcatcgttgacatctaatgctggttgctgctacaccggttgaccttaccttttgtcaatatattctgagttttcgggatggtgtttttaaacctatgctgagagggtaaactggcagaaatgtcctcgactttcatgtgatggcattgtatgcatcgtgtgcttaccacattatataatttttttt

SEQ ID NO: 47286 - DNA, 1191 bp, Zea Mays
tcagttgttcatctgcccatttgatggggctttaagataaatgctgctgcctttattttcaattttgttctgaacttctgatcttctatagtgcttgggtgtttgtgtgcgtgagtattgttggagttatcttcctctgtatttcagacctttctaaacataatgaaataatacacagctctcttgtgtgttcgagaaaaaacatacacgccttcccaaatgtagcagcaacgaactgtggaagccaaatgtacctggcttcaggtatcggaggacaaagagccttgaaactcattcgtcagcatggttgcatagaagaagttctgcaaaatctgaaccagacgagattcagtgttccagaagactggccttaccaggaagttcggacattgtttaaggaacctaatgtttgtgcaggaattccagatttcacgtggacctcaccagatccagagggccttatggatttcttgtcaacagaaaacagtttcagtcctgatagagtaacaaaggcagtagaaaagataaaggttgctagggataggtattccccaggcagaatgaagcatttaacaccagttgctagcttacgaggatctcatactgagaaggaaccccagtgcatactaggttctccaggacaaactctgaaggtcatgtcatctccacaagtatgcaagagtccaagctctggtttcagatatggtagctcaaagccatttatgctgggcagacagtcaggatttcatggaatgccttatgctctctcttttatctaaaatctgtagctgctctggtttatgagaaggttgaccgaagctgtagctgcggctacatttttagatgatggaaaccgatatccggctttcacctcactgggaggatatggccaagtagctgtagctgcagctacatgaaaggatgctcacttataatatgttaatctcgtgctactattgtaatctttccatttctattgtaacgtagttaatcagctactgcagttcatcgttgacatctaatgctggttgctgctacaccggttgaccttaccttttgtcaatatattctgagttttcgggatggtgtttttaaacctatgctgagagggtaaactggcagaaatgtcctcgactttcatgtgatggcattgtatgcatcgtgtgcttaccacattatataatttttttt

SEQ ID NO: 47287 - DNA, 1947 bp, Zea Mays
tggaaattcaatgcttctggggactactcttctagttcagcctacaaagttcttctccttggagcggttgattttggcccggctgagcggatttggaagtcttgggctccgggtttatgcaaagggtgggaaaaccattgttttcactcgcacaaagaaagatgcagatgaggtatcattggcactgacaaccagtattgcttctgaggcacttcatggtgatatttcacagcatcagcgtgaaaggacactaaatggatttcgtcaagggaaatttactgttctagtagctacagatgttgcggcccgcggtcttgatataccaaatgttgatttgattatccattacgaattgccaaacgatccagaaacttttgtccatcgttctggacgcactggacgtgctgggaaagcaggaactgcaatcttgatgtttaccagcagccagaaaaggacagttatgtcacttgagcgtgatgttggttgcaagtttgagtttataagccctccgtccatagaagaagtgctggagtcatctgctgagcatgtcattgctacattgcgaggggtgcacccagagtcaactcaatactttcttggagcagctgagaaattaacagaagaactaggacctcatgcccttgcttctgcactggcacatctgagtggattttctcagccaccttcttcacgttctctgatcagttatgagcagggatgggtgacattgcaactaactagagaaccgggatatggcagaggcttcttttctcctagatctgttactggttttctatctgatgtttgttcagctgctgcagatgaagttggcaaaatatacataacagcagatgagaatgtccaaggagcagtcttcgatttacctgaggaaattgcaaaggacctgcttactatggaggtccccccgggaaacacattaaccaaaatttcgaagctgcctgcgttgcaagatgatagtcctgctactgatagctatggtcgcttttcaaacgaccgaggttccaggaacaggcgttccaggggtggaggtgcttcaagaggccggggtggttgggacaccgacagtgaggaccgataccggcgtggtggcaggagcttgaggtctgacaacgatagttggtcagatgatgactggtcaggcggtgggagaaaatcaaaccgttcctcctcatcctttggtggccgctcatcatcctacggcagccgtggctcaccatcaccatccttcggtgtccgctcatcatccttgggcggtagggagagaagcttcagtggcgcttgtttcaactgcggcgaatccggtcaccgtgcatcggactgcccaaacaagtagatggcgcattcttccctgcccaagcaagtagacagctcgagcatcaggacgcacgcagagcgaaaacccaagcgcgcccctgatcgaccagtatactacgcctgacagccagctacagtttttgtgtggctgtctcgtcaggactgaagattttggcatgctgattccagttatttagatccagaggagtccttactctacagggatatgttgagtctcagtagaattgtgtaaccagtaaccacacacacgaacaatggcggaggactaaaatataaaatcatagctggcatattgaacacgtaacatatattgcagttggcatggctcttttcttttccttccaatttgactccagtggtcgcactgtgtcgatcgtttttacatgcactactacacatgcagcctcctttgcttgctggcagctatgcatagttgcgtgtgcgacacagcatctccaagctctggcaatcgcttgtcaaatgtctgctcctcagagttgtcctccgtatcaatcctctttctgtacttttctagtcttctctagagattttatcttatatatcttatttctcttcaacattttctaaatc

SEQ ID NO: 47288 - DNA, 1950 bp, Zea Mays
tggaaattcaatgcttctggggactactcttctagttcagcctacaaagttcttctccttggagcggttgattttggcccggctgagcggatttggaagtcttgggctccgggtttatgcaaagggtgggaaaaccattgttttcactcgcacaaagaaagatgcagatgaggtatcattggcactgacaaccagtattgcttctgaggcacttcatggtgatatttcacagcatcagcgtgaaaggacactaaatggatttcgtcaagggaaatttactgttctagtagctacagatgttgcggcccgcggtcttgatataccaaatgttgatttgattatccattacgaattgccaaacgatccagaaacttttgtccatcgttctggacgcactggacgtgctgggaaagcaggaactgcaatcttgatgtttaccagcagccagaaaaggacagttatgtcacttgagcgtgatgttggttgcaagtttgagtttataagccctccgtccatagaagaagtgctggagtcatctgctgagcatgtcattgctacattgcgaggggtgcacccagagtcaactcaatactttcttggagcagctgagaaattaacagaagaactaggacctcatgcccttgcttctgcactggcacatctgagtggattttctcagccaccttcttcacgttctctgatcagttatgagcagggatgggtgacattgcaactaactagagaaccgggatatggcagaggcttcttttctcctagatctgttactggttttctatctgatgtttgttcagctgctgcagatgaagttggcaaaatatacataacagcagatgagaatgtccaaggagcagtcttcgatttacctgaggaaattgcaaaggacctgcttactatggaggtccccccgggaaacacattaaccaaaatttcgaagctgcctgcgttgcaagatgatagtcctgctactgatagctatggtcgcttttcaaacgaccgaggttccaggaacaggcgttccaggggtggaggtgcttcaagaggccggggtggttgggacaccgacagtgaggaccgataccggcgtggtggcaggagcttgaggtctgacaacgatagttggtcagatgatgactggtcaggcggtgggagaaaatcaaaccgttcctcctcatcctttggtggccgctcatcatcctacggcagccgtggctcaccatcaccatccttcggtgtccgctcatcatccttgggcggtagggagagcagaagcttcagtggcgcttgtttcaactgcggcgaatccggtcaccgtgcatcggactgcccaaacaagtagatggcgcattcttccctgcccaagcaagtagacagctcgagcatcaggacgcacgcagagcgaaaacccaagcgcgcccctgatcgaccagtatactacgcctgacagccagctacagtttttgtgtggctgtctcgtcaggactgaagattttggcatgctgattccagttatttagatccagaggagtccttactctacagggatatgttgagtctcagtagaattgtgtaaccagtaaccacacacacgaacaatggcggaggactaaaatataaaatcatagctggcatattgaacacgtaacatatattgcagttggcatggctcttttcttttccttccaatttgactccagtggtcgcactgtgtcgatcgtttttacatgcactactacacatgcagcctcctttgcttgctggcagctatgcatagttgcgtgtgcgacacagcatctccaagctctggcaatcgcttgtcaaatgtctgctcctcagagttgtcctccgtatcaatcctctttctgtacttttctagtcttctctagagattttatcttatatatcttatttctcttcaacattttctaaatc

SEQ ID NO: 47289 - DNA, 3672 bp, Zea Mays
cgagcctcatgagaggacgagtcgcaccactcacccacccgagccaaccctgcagaagccatatttgaatcttgaccaagggcagatccagactaaaaacatatcacatacacaaactttgttagtccaaatccaatgcagtttcatgaacaaatatatgtgttcacaaattcacaataaacttagttctacaacaatgaacatacagagcttatttgtttaatacaactaaaagttcatgattaatctatataatgttgaagttactacagttacgaaatattctaacatgtggatatattttaactccttggcctagcatccctactgtaggtctgttacatctgttagaatccatcagttctgcagtcccaaaatccataaacagtagttatgaaacaattgtaatggatcaattggcatatttggagaagctttgtacaattttataatgggccaataaacaattgaagatcaaattttacattcattttttctagaacgcgcaggagagctgcacatctttatattagagagagagaaaacatgacttacatccatagctaaaacagaaaaaagaaacaaaagaaaagcaaaaaggttatagaggagtaaaaggattagatccgatattactcatggaactagggagaccaagctgacccaaactcctggcgcgcaccaagagccaacaggagaactcgtcactgaaatgttgctgcaccctctgaatggatgattcccataaaaaacgttctatttctatgcagccagaggcaccaagcccccaaaataatgacacagttgatcccttttctcttatccttgtactgttgctggccttcctccaccagtcctcaaacgaccgctcatcagccctaagagcgaggtgactcatcccgagtgtcaaagataagaaaccagaattgccgggcaaaaacacaggtagtgatgatgtgttgtatcgtttccctttcttggtcacacaaagggcagctgcttgggtgctgcaacccctcttctccagattatcagcagtccaacacttgtttctaattgcaagccaaagaaagaatttgcatttctgaggagcccaagactaagcattgatatgaactcagggaagtaccactagtattaacattgcttgaactaaaaaactatgagcacaaaaatattcttctcgacgtgttgagttgattaaaatctgtgattaaatcattaatcaatttctgataatctacaatgcacatcaagtcggggtcgggcaagtcacagataacagagaagtaaactcccggtcgaactaaacttatatgcctatataggtacttcgcgcttccagccttgctgccgtctgctgctgctcactgactgcctgactacttggctgctcagtgcctgcgcggctaagccttgggcgtggtgccctgtggccctgccagcttccgagatgcctactgctgtgccggagtgctgacgtatcggatgactggatccctcctacagcgtcatgctttgctaggccccgcccgccaccgcacctggcacccagctcctagggtacactggtccagcactagcctctagataggtctgggagatgaaagtggagagattttcgcaatactggcatcacaatcatcacatgggggtggttgtgtggctagtgcatgcaccatcatcatgcctcaacatcttttgggaaccaacctttagtaacatttttccttgctctccttttcctgctttccaaaaaataaaaaaataactgaattagaaaacaattacattgattctactactagttctattaagtacataccgtttttttgttccattcaaaggacatttgtagctggctttcctgtgtcccaattcaccacagtttggacacttgaacttcccacgaatcatcttcttagttttgacattttcattttcgtttggcttcttaccacttcctccctctaggcaccctttaatcatgtttttcctttgacggccaactccacgcttcccaatagaagcacacacctcttttgcaaatggcactgtaggccagaaagatttgtcaccaattggctccactaccctcgagtaagccttcatgaacttatcaactgagtagtagtcatccacaaaatcttccatccgaacatctctaaattgttgtgttgttattaagcgaagggcatggtgacatggcttccccgtatgctgccactcgttgcatgaacattgtctcaattgagcattcacaatgtgcttagagtgcacattattattatccctcacctccgcaatgtaattgtcagctttcttaactgttaagtgacctaaacctctagtccttacatggaggatatggaccacggagggtagtattcgaccttgcaacctctgtcctatttccctcctcctatgaaacaactccatgatttccttccttatcttgtcagccaagtcacagacaggcagatctttccaatccttaatccaattgttgaacacttctgctatgttgttggtaacatagtcgcacttgatggctggattaaacccactacgataccacaaactatcatgatgctcatataaccaactagacaccttgggaatttcttggacattggaaaagtaatggtcgaacacctccctcctatatgctctagctgcaggatacatgtactcggatccaacaaattgcttcacgtagttctgcattaggtgtctgaaacactcccttttttcagcttgagggaaaacagtgttcatggcattttttagacctttgcaagcatctgaacacaatgctagtagaggaagatctcccacagccttgcgcaactgctgaaagaaccatgtccagttttctgttgtttctgcctcaaagaatccataagcaacagggtacatccaattctgtccatcaacccctatggcacaacacaggtgaccattccatcttccattaagagcagttgagtcaacactaagataaggtctacatccctctttgaaaccagtaatgcaaggaccaagtgcacaaaaaaatctgctaaaaaatggccggccctcatccattttaacatccaactcgataatactatccggtgacttctgtataactgcttctctccaagaccatagaagttggaaactctcttcccaactcccaaacaattgcttcagagctttctctttcccatgccaaattgtatcatatgtaatagtgcatccaaatgtatcttgcaacatactttgtaactccttagcacccatatgtggttttttcataagtagtggaagagcccttgccgcaacccaagcacctgttggtgtcgttgtcttgcgtctcccgctcgatgtacatgtgtgctcatcgtttaagacaattacttgaatagtgggtgatcctttcatctcagacctcgcatgaatgctccaaggacaatcaggccctttacagtaccctctgaatctagtcttgttggtagcctcaatgcccaactcaaattctttatttatggcgtactgtctaattgcaagtctaaactgctccattgatgcgtacaagctaccaggctccattacaggattgttcatatcatagatagtccttgtcccatctaatacaaaatcagaacaaggcatggcagttgaagcttc

SEQ ID NO: 47290 - DNA, 1721 bp, Zea Mays
cccagccgtcccagcggccggacggcgacaccaaccacgccccgttccgttgaacagcgtcgagtcgtcgccccatatcaaacgcccacgcagcgccggggatggagcgcggccggcaccagatgagagctgcctcccacacatggcatcgtggccagcagcgtcaaggaggcggtccagcggcggcatgaaaagcgccgagctttcgggctccggtgcttcttacggctatggccggacgtcctcctcccctgatgcctgcggctacggccggcagttctcggcctacagcgcccgctcctcccaggtcagcaggagtggctccttcagtgcggcggcgcagcgggtcgccggcgccttcaccggctgcttcgtgccgcgccggcaggtcaaagccggggaagaggaggaggaggaggagaagaagagcaagcgctccatggattcaggatcctatcatggatggaatgaagcaaacttgagtgcagcagcaggatcatggcaggaaggcagggctctcaccatcgctgacgtgtcgaaggcaacatcaaacttcagcgaaaagaacgtgataaggcagggacgctcaagcaccatgtacagaggaaagctcagggatggttctcagatcgccgtcaaatgtgtcacgaagagtccgacggctgaactctggagggagcttgagaagatccagcacaggaatctggcgaggctctttggattcttcgaacgcgcagctgatagtctcgtcgtagtcgagtatgtcggcaatggttccttgagggaacatttggatgaatcatgtggaaatggtttagagctcgcgcaacggctcaacatcgcgatcgacgttgctcaggccatcacctacctgcacgagtacaaagagcgtccgatcatccatggcggcatccggtcgtcaggcgtgctactgaccgacgcgctggcggcgaaggtggccggctttgggctggccgggactgcggcctcggggtcgggctcaggctccgacgcaacgccggcgaggagcgccgccgggtacgtggacccggagtacctgatcacgtaccagctgaccgacaagagcgacgtgtacgccttcggcgtcctcctcgtggagctagccaccggccggccgcccgtcgagcgcagccgcggcggcgaggcccggctcaccaccaaatgggcgttgcagaagtgcagagcaggggaagccgtggtggccatggaccccaggatgcggcggagcccggcgtcggtggccgcagtggagaggacgctggcgctggcagcgcagagcgtcgcggcggccagggatgagcggccgtccatgcggcggtgcagcgagctgctgtggaccatccggagagactaccaccgccaggaggagccgcgctgcggcgccgtcgctgcggaacgtagcgacgagtgggtcatcaggtagcttagcttgccagttgaatggatatgattctgctttggattgatcggcatggaactgtaactagcctgtaagtggatgcgaagttctaggaagctgcagatttttttagtacgtacaacttctgtgattactatcaaatgatgtagtcattgcagccaatacctgcgaatttctagaaaacagtagacgttgtaacaatcagacgactttgctgaagtagccacttgatccctcaatcaaatataaataaccatcgaaggatgaggatgttgatgta

SEQ ID NO: 47291 - DNA, 2397 bp, Zea Mays
cccagccgtcccagcggccggacggcgacaccaaccacgccccgttccgttgaacagcgtcgagtcgtcgccccatatcaaacgcccacgcagcgccggggatggagcgcggccggcaccagatgagagctgcctcccacacatggcatcgtggccagcagcgtcaaggaggcggtccagcggcggcatgaaaagcgccgagctttcgggctccggtgcttcttacggctatggccggacgtcctcctcccctgatgcctgcggctacggccggcagttctcggcctacagcgcccgctcctcccaggtcagcaggagtggctccttcagtgcggcggcgcagcgggtcgccggcgccttcaccggctgcttcgtgccgcgccggcaggtcaaagccggggaagaggaggaggaggaggagaagaagagcaagcgctccatggattcaggatcctatcatggatggaatgaagcaaacttgagtgcagcagcaggatcatggcaggaaggcagggctctcaccatcgctgacgtgtcgaaggcaacatcaaacttcagcgaaaagaacgtgataaggcagggacgctcaagcaccatgtacagaggaaagctcagggatggttctcagatcgccgtcaaatgtgtcacgaagctgaacgaccagagtccgacggctgaactctggagggagcttgagaagatccagcacaggaatctggcgaggctctttggattcttcgaacgcgcagctgatagtctcgtcgtagtcgagtatgtcggcaatggttccttgagggaacatttggatgaatcatgtggaaatggtttagagctcgcgcaacggctcaacatcgcgatcgacgttgctcaggccatcacctacctgcacgagtacaaagagcgtccgatcatccatggcggcatccggtcgtcaggcgtgctactgaccgacgcgctggcggcgaaggtggccggctttgggctggccgggactgcggcctcggggtcgggctcaggctccgacgcaacgccggcgaggagcgccgccgggtacgtggacccggagtacctgatcacgtaccagctgaccgacaagagcgacgtgtacgccttcggcgtcctcctcgtggagctagccaccggccggccgcccgtcgagcgcagccgcggcggcgaggcccggctcaccaccaaatgggcgttgcagaagtgcagagcaggggaagccgtggtggccatggaccccaggatgcggcggagcccggcgtcggtggccgcagtggagaggacgctggcgctggcagcgcagagcgtcgcggcggccagggatgagcggccgtccatgcggcggtgcagcgagctgctgtggaccatccggagagactaccaccgccaggaggagccgcgctgcggcgccgtcgctgcggaacgtagcgacgagtgggtcatcaggcaagaaataatgcttttgtgctgatttcagcaagctttcattagagctatattatgggcctcgaggcccatcgccctcggaataaggcgcggacttacagttccgccgtcggcaaggaaggaaaaagagagcagagaaccctagctagagtttggcgagtggtgcggaggcgcggctgctcctgctcgtcgcgacgtcgaatttcagcgccgcccgcgcgatccttggtctcttcgcccgtgaggagaggcgcgacaatggctgggaaaggcgggccgaccaacctggagaaggagcagatgtttgggatggcggagaaggagatggagtacagggttgatcttttcaacaggcttacaaagacctgttttgagaagtgcgttgaaaaaaggtataaagaagctgagctcaatatgggtgagaacagttgcattgatcgatgtgtttcaaagtattggcaggtgactaatttagtaggtcagatgcttgggaaccagcctcagatgtgaaccgagatgcactagttccattttgtagcagaatcctattgctctgtttattctttttggttggtattagaatcccgccacctgctattaagtacaccaatacagcaccagacttgttaatgcgtggatcgctctgaagaaaaatcacggtgtcttgctctttccagtgatgtgcattatctttgaatcatgaacagggaacatgcctgtaataaatttatagagctcgagagtgatcctgtttcgaaagcttgttctctttggtacgttggttcgttaaattctggatgtgtgctcctccgagatgattagagtataatatttttttttctttgcgaatcaagagtagtctatgtatatcatccacagtaaggtccctaggatcgttttttgcctgcgaacattggatgatttcagttattatatagtgtcaat

SEQ ID NO: 47292 - DNA, 1545 bp, Zea Mays
gcaagaaataatgcttttgtgctgatttcagcaagctttcattagagctatattatgggcctcgaggcccatcgccctcggaataaggcgcggacttacaggtgggccctttgtcagtaagcttgccctcgggccatgtatgatgtatcccgttcgggtgcggcccatgtgagaaggcgcgcgcctggacctcatcggtgtttgcttccgcagttccgccgtcggcaaggaaggaaaaagagagcagagaaccctagctagagtttggcgagtggtgcggaggcgcggctgctcctgctcgtcgcgacgtcgaatttcagcgccgcccgcgcgatccttggtctcttcgcccgtgaggtcctgcttcccgtgttgcttctcagctccactcctgacgtgctttctctgagtttctattctgttggttcggtctgtcctctgcaggagaggcgcgacaatggctgggaaaggcgggccgaccaacctggagaaggagcagatgtttgggatggcggagaaggagatggagtacagggttgatcttttcaacaggcttacaaagacctgttttgagaagtgcgttgaaaaaaggtacatatatgatcagcttattttttgaaaaatctactataattattcctctggcattacgacctttaccacaacggtgccgtccatggatcaatttatttcgtggattggatttcacttgcatgtctacggttcccttgcgtgtgctcgggataggtgttttgtataaatgtttcgccgtattatttgtagtcctgttggcacatccttatttctatgtaacacaaaacattatatgttgttttatatggataatcaccaagtaatttaactgagctgcaatacattacacctcaagcttgtagcttctcatggcatgttaattgatagacaagaaggatctaccatctgtgagattgaactatgattttttttcttcctgtggattcattttatttcaggtataaagaagctgagctcaatatgggtgagaacagttgcattgatcgatgtgtttcaaagtattggcaggtgactaatttagtaggtcagatgcttgggaaccagcctcagatgtgaaccgagatgcactagttccattttgtagcagaatcctattgctctgtttattctttttggttggtattagaatcccgccacctgctattaagtacaccaatacagcaccagacttgttaatgcgtggatcgctctgaagaaaaatcacggtgtcttgctctttccagtgatgtgcattatctttgaatcatgaacagggaacatgcctgtaataaatttatagagctcgagagtgatcctgtttcgaaagcttgttctctttggtacgttggttcgttaaattctggatgtgtgctcctccgagatgattagagtataatatttttttttctttgcgaatcaagagtagtctatgtatatcatccacagtaaggtccctaggatcgttttttgcctgcgaacattggatgatttcagttattatatagtgtcaat

SEQ ID NO: 47293 - DNA, 896 bp, Zea Mays
gcaagaaataatgcttttgtgctgatttcagcaagctttcattagagctatattatgggcctcgaggcccatcgccctcggaataaggcgcggacttacagttccgccgtcggcaaggaaggaaaaagagagcagagaaccctagctagagtttggcgagtggtgcggaggcgcggctgctcctgctcgtcgcgacgtcgaatttcagcgccgcccgcgcgatccttggtctcttcgcccgagaggcgcgacaatggctgggaaaggcgggccgaccaacctggagaaggagcagatgtttgggatggcggagaaggagatggagtacagggttgatcttttcaacaggcttacaaagacctgttttgagaagtgcgttgaaaaaaggtataaagaagctgagctcaatatgggtgactaatttagtaggtcagatgcttgggaaccagcctcagatgtgaaccgagatgcactagttccattttgtagcagaatcctattgctctgtttattctttttggttggtattagaatcccgccacctgctattaagtacaccaatacagcaccagacttgttaatgcgtggatcgctctgaagaaaaatcacggtgtcttgctctttccagtgatgtgcattatctttgaatcatgaacagggaacatgcctgtaataaatttatagagctcgagagtgatcctgtttcgaaagcttgttctctttggtacgttggttcgttaaattctggatgtgtgctcctccgagatgattagagtataatatttttttttctttgcgaatcaagagtagtctatgtatatcatccacagtaaggtccctaggatcgttttttgcctgcgaacattggatgatttcagttattatatagtgtcaat

SEQ ID NO: 47294 - DNA, 947 bp, Zea Mays
gcaagaaataatgcttttgtgctgatttcagcaagctttcattagagctatattatgggcctcgaggcccatcgccctcggaataaggcgcggacttacagagttccgccgtcggcaaggaaggaaaaagagagcagagaaccctagctagagtttggcgagtggtgcggaggcgcggctgctcctgctcgtcgcgacgtcgaatttcagcgccgcccgcgcgatccttggtctcttcgcccgtgaggagaggcgcgacaatggctgggaaaggcgggccgaccaacctggagaaggagcagatgtttgggatggcggagaaggagatggagtacagggttgatcttttcaacaggcttacaaagacctgttttgagaagtgcgttgaaaaaaggtataaagaagctgagctcaatatgggtgagaacagttgcattgatcgatgtgtttcaaagtattggcaggtgactaatttagtaggtcagatgcttgggaaccagcctcagatgtgaaccgagatgcactagttccattttgtagcagaatcctattgctctgtttattctttttggttggtattagaatcccgccacctgctattaagtacaccaatacagcaccagacttgttaatgcgtggatcgctctgaagaaaaatcacggtgtcttgctctttccagtgatgtgcattatctttgaatcatgaacagggaacatgcctgtaataaatttatagagctcgagagtgatcctgtttcgaaagcttgttctctttggtacgttggttcgttaaattctggatgtgtgctcctccgagatgattagagtataatatttttttttctttgcgaatcaagagtagtctatgtatatcatccacagtaaggtccctaggatcgttttttgcctgcgaacattggatgatttcagttattatatagtgtcaat

SEQ ID NO: 47295 - DNA, 639 bp, Zea Mays
atcagagtctagggtgccacaagtttctccattgtcatcggacagttgatcagatatagaggtgctgctaaaaagtctgaatggaactggtgtagttttccaagcaagacaagatctcgctgctggaatcgctggatgaaaaggattgcctttacaattccatgtgcgcgctgctgtggtggtgtggttcgaccacaaaacatgtggctgggttcatagagccacagaaatacacgcgcggcgcatccgcacccctctcacgacttcttgggtttaaaacagctgtatggctgtataatcttgtggattgaggagtcattgtctcttgacgcccatgattggacatttggatcagttccacgcctgatccttcgttaaattattctcgctttgacgccacagccttttgcactggcatgtgcttaccctctgagggaacgtgccatgtctacccttcctgcagtgacatctttattatctctacacccctttcctgttatgagtgtatttactgttcctctacttggcctggtctcgatctgatcgaactcttggctgttgttacggctgcgaaaaaagagttgcctgcaggctgcagtccgccaattcatcgacgcctgcaagttgtccaggttcaat

SEQ ID NO: 47296 - DNA, 2810 bp, Zea Mays
aatgtatttccatggaaccgaacgcgtgctgcgcctcctgtacggcgcggaggtaggtcaagccgcggttgggacgcggtgtggcgtgggcgagccgaaccaagcggcgatcgatcgaaacgaggcgtcgcgtggcagccggagatgtcgcagaagaggcagccggaggagggcgacgtcccgcggcgcgccgccgatgccggcggcggcggcggaggagacgagcccggtgggagctcgtcgcgctcctctctgccccagcgccacggcgagccgaagcggcagaggatcgcccttcgcgatgtgatcacggaggtgatgcggaacaccagcatcgagaagtttctaatcgcgctcgagcccctcatcaggagagtggtgagaccgccttttttatcttttactatctgccccatttctcacttcagtccttcttgaatggaaattcataggattggatagtgatctgatgtgagccctctaggttgtttgcctttcctcttgttggatacataacgatacatagtgctgttgtaatcccatctgcatgtgtggctgattggcactctgatattggttttggcaagagcaagttcttctttccctcccaaactactatctgagaagctaaggcatttatctgtatcgtattaatagctctataggctttgctgtcatgattgtatccataatgattccagccttacaaaataaggcttggcttcactgtttccgatgtgttcagccattccaattcagtgataattttacagtgggctacatcatatgttctccttgaaccatttgcttattttagccatctactgctaccagtggggtttgatagtctattcatttctaggtaaaagaagaaattgagtcggcttttgcaaaccatgcctctatgatggcaaggagtgtcacagacagtgttccatctgtgtcaaagaatttgcagctgcagttcatgaccagactttctcttccaatatttactggatccaagattgaaggagagggctccttaagtataactattgctctagtcgacgctttgacaagacaaattgtagcaccaggcaaagagttccagataaaggtcgagattgtagttctggagggggattttgaaagtggagaagatgatgactggacagctcaggagtttaacaataacattgttaaagaaagagaaggcaaaaggcccttgatttctggggatgcattcattgccctcgtcgatggcattggaacagtaggggaactttcattcacagataactccagctggacacggagccgaaagttcaggctaggagcaagaacagaggatggttctttcaatggtgtaagagtacgggaagcaaaaactgaatcatttgtggttaaggaccatcgaggagaattgtacaagaagcaccacccaccatttcttgaagatgaagtctggcgcctagagaaaattggcaaggaaggtgcttttcacaagcgtttgaatagggagaacatttgcactgtcaaagattttctcaccttgttaaatcttgatgcttctaggcttcgaaagatattaggtggtggcatgtcaacaaagatgtgggaggccactgtggaacatgcaaaaacatgtgttctaactgacaaagtgcatcactactatcctgatggtctaaacaaagctggtgttgtattcaatgtagttggagaagtaagagggttaatatctgataaatatgtttttgttgatgactttactgaaaaggagaaggccgaagcacgtgcagcagtgaagcaagcatatgaacactggaaggatgtccatacttgtgacaatgaaacgcttgtggaaaacccttcacatccattcaatttgggatctccatctttgcatgaaaatcagtataaccagttgcccacacaagtttctactgatggttttagtttgagcaattcggccatactatcacccaacattttctcaatggagccatcgagtgctttagacccttgtagtatattggagactgaagaaagcagtgctaatcaatttcagtcggtgttgcccccagttggtggccatgaagtgccccgagaacctcagacgctggataagttctccaactcgttggtatatgatgactgcagcgcccatccctcattcagtgaaagctattacagcactgtagatccaagcatgtccttcgacacacaagatcttggagctgcactgaaaggcttcattgcaaccatatcgaagcctaaggcggcatatagaggatggagaacattgtcttatgtgctaggatggattttctataccaagagaattgttgcaaggagaaagaaacatgggaaataagtgaacacaagtctttgtgtagttaaatgcgaatataagcttagagaatgagagattatgtacattagtttgtttcttgtcacagctggtaagctctgctggtttcttcagctgtacatgggctgtcagctatggttcgctatgcggctgtaaataatcaaatgaagtttgtacagggtgagggatgcgcatagcatttctgatgttttggatggatgccggagcttgctttttgatgcggcccgtgtattatctatgtagtagtatgcagtatgctgcttaattctgcagtattttcgacatttggaatctatatgtcgcatggtaacaagtttaattctgcttattttcgtacacagataatactgcagaattaccatgccgcaaactgatttttatgtagacagtaatgtgtttatggatatggttgacacttaaataaaaagctggg

SEQ ID NO: 47297 - DNA, 2315 bp, Zea Mays
aatgtatttccatggaaccgaacgcgtgctgcgcctcctgtacggcgcggaggtaggtcaagccgcggttgggacgcggtgtggcgtgggcgagccgaaccaagcggcgatcgatcgaaacgaggcgtcgcgtggcagccggagatgtcgcagaagaggcagccggaggagggcgacgtcccgcggcgcgccgccgatgccggcggcggcggcggaggagacgagcccggtgggagctcgtcgcgctcctctctgccccagcgccacggcgagccgaagcggcagaggatcgcccttcgcgatgtgatcacggaggtgatgcggaacaccagcatcgagaagtttctaatcgcgctcgagcccctcatcaggagagtggtaaaagaagaaattgagtcggcttttgcaaaccatgcctctatgatggcaagacagtgttccatctgtgtcaaagaatttgcagctgcagttcatgaccagactttctcttccaatatttactggatccaagattgaaggagagggctccttaagtataactattgctctagtcgacgctttgacaagacaaattgtagcaccaggcaaagagttccagataaaggtcgagattgtagttctggagggggattttgaaagtggagaagatgatgactggacagctcaggagtttaacaataacattgttaaagaaagagaaggcaaaaggcccttgatttctggggatgcattcattgccctcgtcgatggcattggaacagtaggggaactttcattcacagataactccagctggacacggagccgaaagttcaggctaggagcaagaacagaggatggttctttcaatggtgtaagagtacgggaagcaaaaactgaatcatttgtggttaaggaccatcgaggagaattgtacaagaagcaccacccaccatttcttgaagatgaagtctggcgcctagagaaaattggcaaggaaggtgcttttcacaagcgtttgaatagggagaacatttgcactgtcaaagattttctcaccttgttaaatcttgatgcttctaggcttcgaaagatattaggtggtggcatgtcaacaaagatgtgggaggccactgtggaacatgcaaaaacatgtgttctaactgacaaagtgcatcactactatcctgatggtctaaacaaagctggtgttgtattcaatgtagttggagaagtaagagggttaatatctgataaatatgtttttgttgatgactttactgaaaaggagaaggccgaagcacgtgcagcagtgaagcaagcatatgaacactggaaggatgtccatacttgtgacaatgaaacgcttgtggaaaacccttcacatccattcaatttgggatctccatctttgcatgaaaatcagtataaccagttgcccacacaagtttctactgatggttttagtttgagcaattcggccatactatcacccaacattttctcaatggagccatcgagtgctttagacccttgtagtatattggagactgaagaaagcagtgctaatcaatttcagtcggtgttgcccccagttggtggccatgaagtgccccgagaacctcagacgctggataagttctccaactcgttggtatatgatgactgcagcgcccatccctcattcagtgaaagctattacagcactgtagatccaagcatgtccttcgacacacaagatcttggagctgcactgaaaggcttcattgcaaccatatcgaagcctaaggcggcatatagaggatggagaacattgtcttatgtgctaggatggattttctataccaagagaattgttgcaaggagaaagaaacatgggaaataagtgaacacaagtctttgtgtagttaaatgcgaatataagcttagagaatgagagattatgtacattagtttgtttcttgtcacagctggtaagctctgctggtttcttcagctgtacatgggctgtcagctatggttcgctatgcggctgtaaataatcaaatgaagtttgtacagggtgagggatgcgcatagcatttctgatgttttggatggatgccggagcttgctttttgatgcggcccgtgtattatctatgtagtagtatgcagtatgctgcttaattctgcagtattttcgacatttggaatctatatgtcgcatggtaacaagtttaattctgcttattttcgtacacagataatactgcagaattaccatgccgcaaactgatttttatgtagacagtaatgtgtttatggatatggttgacacttaaataaaaagctggg

SEQ ID NO: 47298 - DNA, 1632 bp, Zea Mays
attggatttttaaaattttaatgcccaagctatccttttactttgttgcctttttgctctgctagactcattctaggttcaagaacgatttggcgtagtggtacttaattcaacaatttcatgaaaaataaatgaattctttcttgtcctctactgtctagacttagttctagttgaggaagactagttgaggtggaaagtatgatcatgcacccaatcttcaccgagtgtacaagaagcaccacccaccatttcttgaagatgaagtctggcgcctagagaaaattggcaaggaaggtgcttttcacaagcgtttgaatagggagaacatttgcactgtcaaagattttctcaccttgttaaatcttgatgcttctaggcttcgaaagatattaggtggtggcatgtcaacaaagatgtgggaggccactgtggaacatgcaaaaacatgtgttctaactgacaaagtgcatcactactatcctgatggtctaaacaaagctggtgttgtattcaatgtagttggagaagtaagagggttaatatctgataaatatgtttttgttgatgactttactgaaaaggagaaggccgaagcacgtgcagcagtgaagcaagcatatgaacactggaaggatgtccatacttgtgacaatgaaacgcttgtggaaaacccttcacatccattcaatttgggatctccatctttgcatgaaaatcagtataaccagttgcccacacaagtttctactgatggttttagtttgagcaattcggccatactatcacccaacattttctcaatggagccatcgagtgctttagacccttgtagtatattggagactgaagaaagcagtgctaatcaatttcagtcggtgttgcccccagttggtggccatgaagtgccccgagaacctcagacgctggataagttctccaactcgttggtatatgatgactgcagcgcccatccctcattcagtgaaagctattacagcactgtagatccaagcatgtccttcgacacacaagatcttggagctgcactgaaaggcttcattgcaaccatatcgaagcctaaggcggcatatagaggatggagaacattgtcttatgtgctaggatggattttctataccaagagaattgttgcaaggagaaagaaacatgggaaataagtgaacacaagtctttgtgtagttaaatgcgaatataagcttagagaatgagagattatgtacattagtttgtttcttgtcacagctggtaagctctgctggtttcttcagctgtacatgggctgtcagctatggttcgctatgcggctgtaaataatcaaatgaagtttgtacagggtgagggatgcgcatagcatttctgatgttttggatggatgccggagcttgctttttgatgcggcccgtgtattatctatgtagtagtatgcagtatgctgcttaattctgcagtattttcgacatttggaatctatatgtcgcatggtaacaagtttaattctgcttattttcgtacacagataatactgcagaattaccatgccgcaaactgatttttatgtagacagtaatgtgtttatggatatggttgacacttaaataaaaagctggg

SEQ ID NO: 47299 - DNA, 1345 bp, Zea Mays
ctcgcagaatggcaccacgccaccaccactcggcgtctcggcacttgctcgtttatcagtggggccaccacgcggcaggcctttgtccggacgggaacgggacgggcaatccacctttgcccttgtccgaacgggaacaggaacggggaccgtttctataaaagaaggcttctattagccgcgtacagatagataagcaactccagtccaagcaggagcaagaacaacaggaagagtcgaagagaggagatcagggacaagaacagccagaaagaggagaggaggctcatcaatcgcaactaattctcgcagtcgcagagacaagcaatcatcagacatgagaacccaggcgctgttcttcctcgcactcgcacttatcggcgccgtcctcgcgcagtccagcaacaggcaccaccaccactaccaccacgcccatgtccaaggcaaagggcagggagccggaggaggaggaggggagctggcgagccgggcgaaggcggcggcgcgcgcgtggccgtgctgtgacagctgcggcgggtgcaccagatcggagccgccgcggtgccagtgcctggacgcggcgccccgcgggtgccacccggcctgcagggactgcgtcaagtccagcctcagcgccgacccgccggtgtaccagtgcatggaccgcgtccccaacttctgccagcgccgctgcaccgccgccgccgccgccgcggcgcactgaccgaccgcgcggggcagccgagccagccgacgactggtttctgcttgcagcttggtattattgacccagcaacctttttgcccacccacccacccgctcgcccgcccgccggcgaatcatggcgtctggagcctttgaagccagccgtggattaggatttttgtttgtttgtgtttgtgtagactgtaactgtaaagagagatgaggaatctgtaatctggtgaacgagcaaccaatccgagcttacgttgtccgtctgtggtgtggtgtccttcttcttcttcttgtgttctgttttctttcattcagttacacactttggtaggtagttggcactgctttgctctgtatggctgactcttgttgtctgtgtgagagagatgagcatgatggatcactgagatttaagaaaagagtcaaagagacgtttgcttttcttgccgtctatacgaagctttcgacagggaaggaaacacgccgtcagggtcagattgtcgtggatctttcgtctgggtattttgggagcagtcgagcagaggcagagctcgtgcctgtacaagtggaggatgatgcacctggacgctaatccggcggcaggccgaggaggaggctgagcgccag

SEQ ID NO: 47300 - DNA, 2333 bp, Zea Mays
atatataaattttaaaactgattcaataaagttcaaaatgagagatttaacgacttttcgccatcagttattagagcgcacgtgcagatccacccgggcgtggcttacccagcaatggcgaccatcggccttgtcccctcgacagtcgtcgcatccaccgccattcgcgccccggcccccgcagcgctgacccgtgccagcaaccgccagcccccgcacgcccgccgcctgctggacctcggccgccgcgcgccggcgatggacgccctccgcgtgtcgggtgccgccgagcccctcctccgccccgccgccgccggggggcaccccaggctccgcgtgcggacccgtgcgcagcagggcgatggcggcgccgcggcggagggggacgccgcgttctcgtgggcgcccgtcgtcctcccgtttttattccctgcattgggtggtctccttttcggctatgatattggcgcaacctctggagcaaccatctctgtgcaatctcctgatctcagtggcactgattggttcagcttgtcatctttgcaactagggcttgtggccagtggttcactttatggtgctcttggcggctctcttcttgcataccgcattgcagattttctaggaaggaggatagaattggtcacagcagctgcattatatatccttggtgctttagtcactggatttgcccctaattttgtagcactaatcataggtcgtgtcctgtatgggattggtattggtttggcaatgcatggtgcccctctttatattgcggagacttctccttcacaaatacgtggaacattgatatctttgaaggagctgtttattgtgttagggatactgttaggataccttgtaggaagtcttgaaattgacaatgtaggaggatggcggtacatgtttggttttagtgctccgcttgcagctattatggctattggtatgtggactttaccatcttcaccaagatggctacttctcagggcagttcaaggaaaggcttctttggaggataataaaaagaaggcaattcaagcccttagaacattgaggggccgcacagcaagtgaaaaggttttggcagatgatgttgacgatacaattgtctctattaaggctgcctacgcaggacaggaagctgaaggaaacgtttgggatgtatttgaaggagctagcttgaaggccttcactattggcggaggtctggttctgtttcagcagataacaggtcaaccgagtgttctatattatgctgcttcaatacttcagactgctggattctcagctgcatcagatgctgccaaagtagcaatcttgattgggttgttcaagttgctaatgacaggtgttgcggtatttaaagttgacgatgttggaaggcgcccattattgataggaggtgttggtggaattgctttgtcactcttcctactggcagcttactacaagatcctgaacaacttcccctttgttgctgtcggcgcgttacttctatatgtcggtgcttaccaggtctcatttggtccaattagttggctaatggtatctgagatctttccactccggacaagagggcgtgggatcagcctcgcagtactaacaaatttcggctcgaacgctctggtgacatttgcgttttcacccttgaaggagctcctcgggccagccaatatatttttcctgttcggcgtcatagcagtgctctccctcgtgtttgtgatcctcgtcgttccagaaaccaaaggactgagcctggaggagatcgagtcgaagatcctgaagtaattaaaaaccgttcgtgcgatcataagccccatttggagatattgtaagtagcgatgccattttcaaaacgggcgctcgctcactcgtaggatcggagccaaagctttcagacatgggagtacatatgcaaagggcacgtctcggtgtaaagcttggacatctttctcttttattagcgtagtgaatatttccgaacatacttggtaaattacatttcagttgagtcataatcacgcttctgtagactgtagtccactgtgacctactgtagtagtatgcatgtcactagtaaaagctggtaagctgtgtgatggactgatggtgtagacttgtgcagttgtgctcgcataaggctggccatcagatcgtgtatatagcgacataaaacactattttgcactatagataatactgttataatttacagaatggagttggaaacatgagataaagataagaggtgggacatgagagcttcggtagactatttttaatattatgcagtatgagataaaggtctttgagtgagtggttgtcca

SEQ ID NO: 47301 - DNA, 2384 bp, Zea Mays
gttcaaaatgagagatttaacgacttttcgccatcagttattagagcgcacgtgcagatccacccgggcgtggcttacccagcaatggcgaccatcggccttgtcccctcgacagtcgtcgcatccaccgccattcgcgccccggcccccgcagcgctgacccgtgccagcaaccgccagcccccgcacgcccgccgcctgctggacctcggccgccgcgcgccggcgatggacgccctccgcgtgtcgggtgccgccgagcccctcctccgccccgccgccgccggggggcaccccaggctccgcgtgcggacccgtgcgcagcagggcgatggcggcgccgcggcggagggggacgccgcgttctcgtgggcgcccgtcgtcctcccgtttttattccctgcattgggtggtctccttttcggctatgatattggcgcaacctctggagcaaccatctctgtgcaatctcctgatctcagtggcactgattggttcagcttgtcatctttgcaactagggcttgtggccagtggttcactttatggtgctcttggcggctctcttcttgcataccgcattgcagattttctaggaaggaggatagaattggtcacagcagctgcattatatatccttggtgctttagtcactggatttgcccctaattttgtagcactaatcataggtcgtgtcctgtatgggattggtattggtttgggaatgatatgtctcgatgaaacgtggacctcacatgtgtcactgacagtgtcaaataaggaattgcgcaaaactgcaatggcaatgcatggtgcccctctttatattgcggagacttctccttcacaaatacgtggaacattgatatctttgaaggagctgtttattgtgttagggatactgttaggataccttgtaggaagtcttgaaattgacaatgtaggaggatggcggtacatgtttggttttagtgctccgcttgcagctattatggctattggtatgtggactttaccatcttcaccaagatggctacttctcagggcagttcaaggaaaggcttctttggaggataataaaaagaaggcaattcaagcccttagaacattgaggggccgcacagcaagtgaaaaggttttggcagatgatgttgacgatacaattgtctctattaaggctgcctacgcaggacaggaagctgaaggaaacgtttgggatgtatttgaaggagctagcttgaaggccttcactattggcggaggtctggttctgtttcagcagataacaggtcaaccgagtgttctatattatgctgcttcaatacttcagactgctggattctcagctgcatcagatgctgccaaagtagcaatcttgattgggttgttcaagttgctaatgacaggtgttgcggtatttaaagttgacgatgttggaaggcgcccattattgataggaggtgttggtggaattgctttgtcactcttcctactggcagcttactacaagatcctgaacaacttcccctttgttgctgtcggcgcgttacttctatatgtcggtgcttaccaggtctcatttggtccaattagttggctaatggtatctgagatctttccactccggacaagagggcgtgggatcagcctcgcagtactaacaaatttcggctcgaacgctctggtgacatttgcgttttcacccttgaaggagctcctcgggccagccaatatatttttcctgttcggcgtcatagcagtgctctccctcgtgtttgtgatcctcgtcgttccagaaaccaaaggactgagcctggaggagatcgagtcgaagatcctgaagtaattaaaaaccgttcgtgcgatcataagccccatttggagatattgtaagtagcgatgccattttcaaaacgggcgctcgctcactcgtaggatcggagccaaagctttcagacatgggagtacatatgcaaagggcacgtctcggtgtaaagcttggacatctttctcttttattagcgtagtgaatatttccgaacatacttggtaaattacatttcagttgagtcataatcacgcttctgtagactgtagtccactgtgacctactgtagtagtatgcatgtcactagtaaaagctggtaagctgtgtgatggactgatggtgtagacttgtgcagttgtgctcgcataaggctggccatcagatcgtgtatatagcgacataaaacactattttgcactatagataatactgttataatttacagaatggagttggaaacatgagataaagataagaggtgggacatgagagcttcggtagactatttttaatattatgcagtatgagataaaggtctttgagtgagtggttgtcca

SEQ ID NO: 47302 - DNA, 2029 bp, Zea Mays
cgcacgtgcagatccacccgggcgtggcttacccagcaatggcgaccatcggccttgtcccctcgacagtcgtcgcatccaccgccattcgcgccccggcccccgcagcgctgacccgtgccagcaaccgccagcccccgcacgcccgccgcctgctggacctcggccgccgcgcgccggcgatggacgccctccgcgtgtcgggtgccgccgagcccctcctccgccccgccgccgccggggggcaccccaggctccgcgtgcggacccgtgcgcagcagggcgatggcggcgccgcggcggagggggacgccgcgttctcgtgggcgcccgtcgtcctcccgtttttattccctgcattgggtggtctccttttcggctatgatattggcgcaacctctggagcaaccatctctgtgcaatctcctgatctcagtggcactgattggttcagcttgtcatctttgcaactagggcttgtggccagtggttcactttatggtgctcttggcggctctcttcttgcataccgcattgcagattttctaggaaggaggatagaattggtcacagcagctgcattatatatccttggtgctttagtcactggatttgcccctaattttgtagcactaatcataggtcgtgtcctgtatgggattggtattggtttggtgagtatctgcagggcagttcaaggaaaggcttctttggaggataataaaaagaaggcaattcaagcccttagaacattgaggggccgcacagcaagtgaaaaggttttggcagatgatgttgacgatacaattgtctctattaaggctgcctacgcaggacaggaagctgaaggaaacgtttgggatgtatttgaaggagctagcttgaaggccttcactattggcggaggtctggttctgtttcagcagataacaggtcaaccgagtgttctatattatgctgcttcaatacttcagactgctggattctcagctgcatcagatgctgccaaagtagcaatcttgattgggttgttcaagttgctaatgacaggtgttgcggtatttaaagttgacgatgttggaaggcgcccattattgataggaggtgttggtggaattgctttgtcactcttcctactggcagcttactacaagatcctgaacaacttcccctttgttgctgtcggcgcgttacttctatatgtcggtgcttaccaggtctcatttggtccaattagttggctaatggtatctgagatctttccactccggacaagagggcgtgggatcagcctcgcagtactaacaaatttcggctcgaacgctctggtgacatttgcgttttcacccttgaaggagctcctcgggccagccaatatatttttcctgttcggcgtcatagcagtgctctccctcgtgtttgtgatcctcgtcgttccagaaaccaaaggactgagcctggaggagatcgagtcgaagatcctgaagtaattaaaaaccgttcgtgcgatcataagccccatttggagatattgtaagtagcgatgccattttcaaaacgggcgctcgctcactcgtaggatcggagccaaagctttcagacatgggagtacatatgcaaagggcacgtctcggtgtaaagcttggacatctttctcttttattagcgtagtgaatatttccgaacatacttggtaaattacatttcagttgagtcataatcacgcttctgtagactgtagtccactgtgacctactgtagtagtatgcatgtcactagtaaaagctggtaagctgtgtgatggactgatggtgtagacttgtgcagttgtgctcgcataaggctggccatcagatcgtgtatatagcgacataaaacactattttgcactatagataatactgttataatttacagaatggagttggaaacatgagataaagataagaggtgggacatgagagcttcggtagactatttttaatattatgcagtatgagataaaggtctttgagtgagtggttgtcca

SEQ ID NO: 47303 - DNA, 2186 bp, Zea Mays
cgcacgtgcagatccacccgggcgtggcttacccagcaatggcgaccatcggccttgtcccctcgacagtcgtcgcatccaccgccattcgcgccccggcccccgcagcgctgacccgtgccagcaaccgccagcccccgcacgcccgccgcctgctggacctcggccgccgcgcgccggcgatggacgccctccgcgtgtcgggtgccgccgagcccctcctccgccccgccgccgccggggggcaccccaggctccgcgtgcggacccgtgcgcagcagggcgatggcggcgccgcggcggagggggacgccgcgttctcgtgggcgcccgtcgtcctcccgtttttattccctgcattgggtggtctccttttcggctatgatattggcgcaacctctggagcaaccatctctgtgcaatctcctgatctcagtggcactgattggttcagcttgtcatctttgcaactagggcttgtggccagtggttcactttatggtgctcttggcggctctcttcttgcataccgcattgcagattttctaggaaggaggatagaattggtcacagcagctgcattatatatccttggtgctttagtcactggatttgcccctaattttgtagcactaatcataggtcgtgtcctgtatgggattggtattggtttggcaatgcatggtgcccctctttatattgcggagacttctccttcacaaatacgtggaacattgatatctttgaaggagctgtttattgtgttagggatactgttaggataccttgtaggaagtcttgaaattgacaatgtaggaggatggcgggcagttcaaggaaaggcttctttggaggataataaaaagaaggcaattcaagcccttagaacattgaggggccgcacagcaagtgaaaaggttttggcagatgatgttgacgatacaattgtctctattaaggctgcctacgcaggacaggaagctgaaggaaacgtttgggatgtatttgaaggagctagcttgaaggccttcactattggcggaggtctggttctgtttcagcagctaaactcttatttggcagataacaggtcaaccgagtgttctatattatgctgcttcaatacttcagactgctggattctcagctgcatcagatgctgccaaagtagcaatcttgattgggttgttcaagttgctaatgacaggtgttgcggtatttaaagttgacgatgttggaaggcgcccattattgataggaggtgttggtggaattgctttgtcactcttcctactggcagcttactacaagatcctgaacaacttcccctttgttgctgtcggcgcgttacttctatatgtcggtgcttaccaggtctcatttggtccaattagttggctaatggtatctgagatctttccactccggacaagagggcgtgggatcagcctcgcagtactaacaaatttcggctcgaacgctctggtgacatttgcgttttcacccttgaaggagctcctcgggccagccaatatatttttcctgttcggcgtcatagcagtgctctccctcgtgtttgtgatcctcgtcgttccagaaaccaaaggactgagcctggaggagatcgagtcgaagatcctgaagtaattaaaaaccgttcgtgcgatcataagccccatttggagatattgtaagtagcgatgccattttcaaaacgggcgctcgctcactcgtaggatcggagccaaagctttcagacatgggagtacatatgcaaagggcacgtctcggtgtaaagcttggacatctttctcttttattagcgtagtgaatatttccgaacatacttggtaaattacatttcagttgagtcataatcacgcttctgtagactgtagtccactgtgacctactgtagtagtatgcatgtcactagtaaaagctggtaagctgtgtgatggactgatggtgtagacttgtgcagttgtgctcgcataaggctggccatcagatcgtgtatatagcgacataaaacactattttgcactatagataatactgttataatttacagaatggagttggaaacatgagataaagataagaggtgggacatgagagcttcggtagactatttttaatattatgcagtatgagataaaggtctttgagtgagtggttgtcca

SEQ ID NO: 47304 - DNA, 2765 bp, Zea Mays
cgcacgtgcagatccacccgggcgtggcttacccagcaatggcgaccatcggccttgtcccctcgacagtcgtcgcatccaccgccattcgcgccccggcccccgcagcgctgacccgtgccagcaaccgccagcccccgcacgcccgccgcctgctggacctcggccgccgcgcgccggcgatggacgccctccgcgtgtcgggtgccgccgagcccctcctccgccccgccgccgccggggggcaccccaggctccgcgtgcggacccgtgcgcagcagggcgatggcggcgccgcggcggagggggacgccgcgttctcgtgggcgcccgtcgtcctcccgtttttattccctgcattgggtggtctccttttcggctatgatattggcgcaacctctggagcaaccatctctgtgcaatctcctgatctcagtggcactgattggttcagcttgtcatctttgcaactagggcttgtggccagtggttcactttatggtgctcttggcggctctcttcttgcataccgcattgcagattttctaggaaggaggatagaattggtcacagcagctgcattatatatccttggtgctttagtcactggatttgcccctaattttgtagcactaatcataggtcgtgtcctgtatgggattggtattggtttggtgagtatctgcaggtacagatgtttttttatttccttttttctaaaatgatcccaggtaattgttatcaaacgaatctaattgagaactgcatatagaaaacgattttctggggacatttagctatacattcactcaagctaaggaacataacattcactgatataaacttataatgccatgatgtccgattgcagttttctgatatttatatgttagtcatttgctgaagtgtgtaacatcaaaagctagttggctgatgtagtttgatgggcatgttctgttataactaattatagtataagtagatataaaacatgcttgcacttgatatttcttatattttgatgatgcgttgaataaacatattgctgttggtttgaaatatattgtttcctaagttatttaatataactttctgctttaatttctgaggtagttggcacaaggttgttttgtatgttgcactttacggtggcatgcttttgctaacttaatatccactggcatccaaaatgtccaatggtctatgcttcgttaaaaagggaatgatatgtctcgatgaaacgtggacctcacatgtgtcactgacagtgtcaaataaggaattgcgcaaaactgcaatggcaatgcatggtgcccctctttatattgcggagacttctccttcacaaatacgtggaacattgatatctttgaaggagctgtttattgtgttagggatactgttaggataccttgtaggaagtcttgaaattgacaatgtaggaggatggcggtacatgtttggttttagtgctccgcttgcagctattatggctattggtatgtggactttaccatcttcaccaagatggctacttctcagggcagttcaaggaaaggcttctttggaggataataaaaagaaggaaacgtttgggatgtatttgaaggagctagcttgaaggccttcactattggcggaggtctggttctgtttcagcagataacaggtcaaccgagtgttctatattatgctgcttcaatacttcagactgctggattctcagctgcatcagatgctgccaaagtagcaatcttgattgggttgttcaagttgctaatgacaggtgttgcggtatttaaagttgacgatgttggaaggcgcccattattgataggaggtgttggtggaattgctttgtcactcttcctactggcagcttactacaagatcctgaacaacttcccctttgttgctgtcggcgcgttacttctatatgtcggtgcttaccaggtctcatttggtccaattagttggctaatggtatctgagatctttccactccggacaagagggcgtgggatcagcctcgcagtactaacaaatttcggctcgaacgctctggtgacatttgcgttttcacccttgaaggagctcctcgggccagccaatatatttttcctgttcggcgtcatagcagtgctctccctcgtgtttgtgatcctcgtcgttccagaaaccaaaggactgagcctggaggagatcgagtcgaagatcctgaagtaattaaaaaccgttcgtgcgatcataagccccatttggagatattgtaagtagcgatgccattttcaaaacgggcgctcgctcactcgtaggatcggagccaaagctttcagacatgggagtacatatgcaaagggcacgtctcggtgtaaagcttggacatctttctcttttattagcgtagtgaatatttccgaacatacttggtaaattacatttcagttgagtcataatcacgcttctgtagactgtagtccactgtgacctactgtagtagtatgcatgtcactagtaaaagctggtaagctgtgtgatggactgatggtgtagacttgtgcagttgtgctcgcataaggctggccatcagatcgtgtatatagcgacataaaacactattttgcactatagataatactgttataatttacagaatggagttggaaacatgagataaagataagaggtgggacatgagagcttcggtagactatttttaatattatgcagtatgagataaaggtctttgagtgagtggttgtcca

SEQ ID NO: 47305 - DNA, 2194 bp, Zea Mays
cgcacgtgcagatccacccgggcgtggcttacccagcaatggcgaccatcggccttgtcccctcgacagtcgtcgcatccaccgccattcgcgccccggcccccgcagcgctgacccgtgccagcaaccgccagcccccgcacgcccgccgcctgctggacctcggccgccgcgcgccggcgatggacgccctccgcgtgtcgggtgccgccgagcccctcctccgccccgccgccgccggggggcaccccaggctccgcgtgcggacccgtgcgcagcagggcgatggcggcgccgcggcggagggggacgccgcgttctcgtgggcgcccgtcgtcctcccgtttttattccctgcattgggtggtctccttttcggctatgatattggcgcaacctctggagcaaccatctctgtgcaatctcctgatctcagtggcactgattggttcagcttgtcatctttgcaactagggcttgtggccagtggttcactttatggtgctcttggcggctctcttcttgcataccgcattgcagattttctaggaaggaggatagaattggtcacagcagctgcattatatatccttggtgctttagtcactggatttgcccctaattttgtagcactaatcataggtcgtgtcctgtatgggattggtattggtttggcaatgcatggtgcccctctttatattgcggagacttctccttcacaaatacgtggaacattgatatctttgaaggagctgtttattgtgttagggatactgttaggataccttgtaggaagtcttgaaattgacaatgtaggaggatggcggtacatgtttggttttagtgctccgcttgcagctattatggctattggtatgtggactttaccatcttcaccaagatggctacttctcagggcagttcaaggaaaggcttctttggaggataataaaaagaaggcaattcaagcccttagaacattgaggggccgcacagcaagtgaaaaggttttggcagatgatgttgacgatacaattgtctctattaaggctgcctacgcaggacaggaagctgaaggaaacgtttgggatgtatttgaaggagctagcttgaaggccttcactattggcggaggtctggttctgtttcagcagataacaggtcaaccgagtgttctatattatgctgcttcaatacttcagttgctaatgacaggtgttgcggtatttaaagttgacgatgttggaaggcgcccattattgataggaggtgttggtggaattgctttgtcactcttcctactggcagcttactacaagatcctgaacaacttcccctttgttgctgtcggcgcgttacttctatatgtcggtgcttaccaggtctcatttggtccaattagttggctaatggtatctgagatctttccactccggacaagagggcgtgggatcagcctcgcagtactaacaaatttcggctcgaacgctctggtgacatttgcgttttcacccttgaaggagctcctcgggccagccaatatatttttcctgttcggcgtcatagcagtgctctccctcgtgtttgtgatcctcgtcgttccagaaaccaaaggactgagcctggaggagatcgagtcgaagatcctgaagtaattaaaaaccgttcgtgcgatcataagccccatttggagatattgtaagtagcgatgccattttcaaaacgggcgctcgctcactcgtaggatcggagccaaagctttcagacatgggagtacatatgcaaagggcacgtctcggtgtaaagcttggacatctttctcttttattagcgtagtgaatatttccgaacatacttggtaaattacatttcagttgagtcataatcacgcttctgtagactgtagtccactgtgacctactgtagtagtatgcatgtcactagtaaaagctggtaagctgtgtgatggactgatggtgtagacttgtgcagttgtgctcgcataaggctggccatcagatcgtgtatatagcgacataaaacactattttgcactatagataatactgttataatttacagaatggagttggaaacatgagataaagataagaggtgggacatgagagcttcggtagactatttttaatattatgcagtatgagataaaggtctttgagtgagtggttgtcca

SEQ ID NO: 47306 - DNA, 2271 bp, Zea Mays
cgcacgtgcagatccacccgggcgtggcttacccagcaatggcgaccatcggccttgtcccctcgacagtcgtcgcatccaccgccattcgcgccccggcccccgcagcgctgacccgtgccagcaaccgccagcccccgcacgcccgccgcctgctggacctcggccgccgcgcgccggcgatggacgccctccgcgtgtcgggtgccgccgagcccctcctccgccccgccgccgccggggggcaccccaggctccgcgtgcggacccgtgcgcagcagggcgatggcggcgccgcggcggagggggacgccgcgttctcgtgggcgcccgtcgtcctcccgtttttattccctgcattgggtggtctccttttcggctatgatattggcgcaacctctggagcaaccatctctgtgcaatctcctgatctcagtggcactgattggttcagcttgtcatctttgcaactagggcttgtggccagtggttcactttatggtgctcttggcggctctcttcttgcataccgcattgcagattttctaggaaggaggatagaattggtcacagcagctgcattatatatccttggtgctttagtcactggatttgcccctaattttgtagcactaatcataggtcgtgtcctgtatgggattggtattggtttggtgagtatctgcaggcaatgcatggtgcccctctttatattgcggagacttctccttcacaaatacgtggaacattgatatctttgaaggagctgtttattgtgttagggatactgttaggataccttgtaggaagtcttgaaattgacaatgtaggaggatggcggtacatgtttggttttagtgctccgcttgcagctattatggctattggtatgtggactttaccatcttcaccaagatggctacttctcagggcagttcaaggaaaggcttctttggaggataataaaaagaaggcaattcaagcccttagaacattgaggggccgcacagcaagtgaaaaggttttggcagatgatgttgacgatacaattgtctctattaaggctgcctacgcaggacaggaagctgaaggaaacgtttgggatgtatttgaaggagctagcttgaaggccttcactattggcggaggtctggttctgtttcagcagataacaggtcaaccgagtgttctatattatgctgcttcaatacttcagactgctggattctcagctgcatcagatgctgccaaagtagcaatcttgattgggttgttcaagttgctaatgacaggtgttgcggtatttaaagttgacgatgttggaaggcgcccattattgataggaggtgttggtggaattgctttgtcactcttcctactggcagcttactacaagatcctgaacaacttcccctttgttgctgtcggcgcgttacttctatatgtcggtgcttaccaggtctcatttggtccaattagttggctaatggtatctgagatctttccactccggacaagagggcgtgggatcagcctcgcagtactaacaaatttcggctcgaacgctctggtgacatttgcgttttcacccttgaaggagctcctcgggccagccaatatatttttcctgttcggcgtcatagcagtgctctccctcgtgtttgtgatcctcgtcgttccagaaaccaaaggactgagcctggaggagatcgagtcgaagatcctgaagtaattaaaaaccgttcgtgcgatcataagccccatttggagatattgtaagtagcgatgccattttcaaaacgggcgctcgctcactcgtaggatcggagccaaagctttcagacatgggagtacatatgcaaagggcacgtctcggtgtaaagcttggacatctttctcttttattagcgtagtgaatatttccgaacatacttggtaaattacatttcagttgagtcataatcacgcttctgtagactgtagtccactgtgacctactgtagtagtatgcatgtcactagtaaaagctggtaagctgtgtgatggactgatggtgtagacttgtgcagttgtgctcgcataaggctggccatcagatcgtgtatatagcgacataaaacactattttgcactatagataatactgttataatttacagaatggagttggaaacatgagataaagataagaggtgggacatgagagcttcggtagactatttttaatattatgcagtatgagataaaggtctttgagtgagtggttgtcca

SEQ ID NO: 47307 - DNA, 2082 bp, Zea Mays
tagctatacattcactcaagctaaggaacataacattcactgatataaacttataatgccatgatgtccgattgcagttttctgatatttatatgttagtcatttgctgaagtgtgtaacatcaaaagctagttggctgatgtagtttgatgggcatgttctgttataactaattatagtataagtagatataaaacatgcttgcacttgatatttcttatattttgatgatgcgttgaataaacatattgctgttggtttgaaatatattgtttcctaagttatttaatataactttctgctttaatttctgaggtagttggcacaaggttgttttgtatgttgcactttacggtggcatgcttttgctaacttaatatccactggcatccaaaatgtccaatggtctatgcttcgttaaaaagggaatgatatgtctcgatgaaacgtggacctcacatgtgtcactgacagtgtcaaataaggaattgcgcaaaactgcaatggcaatgcatggtgcccctctttatattgcggagacttctccttcacaaatacgtggaacattgatatctttgaaggagctgtttattgtgttagggatactgttaggataccttgtaggaagtcttgaaattgacaatgtaggaggatggcggtacatgtttggttttagtgctccgcttgcagctattatggctattggtatgtggactttaccatcttcaccaagatggctacttctcagggcagttcaaggaaaggcttctttggaggataataaaaagaaggcaattcaagcccttagaacattgaggggccgcacagcaagtgaaaaggttttggcagatgatgttgacgatacaattgtctctattaaggctgcctacgcaggacaggaagctgaaggaaacgtttgggatgtatttgaaggagctagcttgaaggccttcactattggcggaggtctggttctgtttcagcaggtcaaccgagtgttctatattatgctgcttcaatacttcagactgctggattctcagctgcatcagatgctgccaaagtagcaatcttgattgggttgttcaagttgctaatgacaggtgttgcggtatttaaagttgacgatgttggaaggcgcccattattgataggaggtgttggtggaattgctttgtcactcttcctactggcagcttactacaagatcctgaacaacttcccctttgttgctgtcggcgcgttacttctatatgtcggtgcttaccaggtctcatttggtccaattagttggctaatggtatctgagatctttccactccggacaagagggcgtgggatcagcctcgcagtactaacaaatttcggctcgaacgctctggtgacatttgcgttttcacccttgaaggagctcctcgggccagccaatatatttttcctgttcggcgtcatagcagtgctctccctcgtgtttgtgatcctcgtcgttccagaaaccaaaggactgagcctggaggagatcgagtcgaagatcctgaagtaattaaaaaccgttcgtgcgatcataagccccatttggagatattgtaagtagcgatgccattttcaaaacgggcgctcgctcactcgtaggatcggagccaaagctttcagacatgggagtacatatgcaaagggcacgtctcggtgtaaagcttggacatctttctcttttattagcgtagtgaatatttccgaacatacttggtaaattacatttcagttgagtcataatcacgcttctgtagactgtagtccactgtgacctactgtagtagtatgcatgtcactagtaaaagctggtaagctgtgtgatggactgatggtgtagacttgtgcagttgtgctcgcataaggctggccatcagatcgtgtatatagcgacataaaacactattttgcactatagataatactgttataatttacagaatggagttggaaacatgagataaagataagaggtgggacatgagagcttcggtagactatttttaatattatgcagtatgagataaaggtctttgagtgagtggttgtcca

SEQ ID NO: 47308 - DNA, 2073 bp, Zea Mays
tagctatacattcactcaagctaaggaacataacattcactgatataaacttataatgccatgatgtccgattgcagttttctgatatttatatgttagtcatttgctgaagtgtgtaacatcaaaagctagttggctgatgtagtttgatgggcatgttctgttataactaattatagtataagtagatataaaacatgcttgcacttgatatttcttatattttgatgatgcgttgaataaacatattgctgttggtttgaaatatattgtttcctaagttatttaatataactttctgctttaatttctgaggtagttggcacaaggttgttttgtatgttgcactttacggtggcatgcttttgctaacttaatatccactggcatccaaaatgtccaatggtctatgcttcgttaaaaagggaatgatatgtctcgatgaaacgtggacctcacatgtgtcactgacagtgtcaaataaggaattgcgcaaaactgcaatggcaatgcatggtgcccctctttatattgcggagacttctccttcacaaatacgtggaacattgatatctttgaaggagctgtttattgtgttagggatactgttaggataccttgtaggaagtcttgaaattgacaatgtaggaggatggcggtacatgtttggttttagtgctccgcttgcagctattatggctattggtatgtggactttaccatcttcaccaagatggctacttctcagggcagttcaaggaaaggcttctttggaggataataaaaagaaggcaattcaagcccttagaacattgaggggccgcacagcaagtgaaaaggttttggcagatgatgttgacgatacaattgtctctattaaggctgcctacgcaggacaggaagctgaaggaaacgtttgggatgtatttgaaggagctagcttgaaggccttcactattggcggaggtctggttctgtttcagcagataacaggtcaaccgagtgttctatattatgctgcttcaatacttcagctgcatcagatgctgccaaagtagcaatcttgattgggttgttcaagttgctaatgacaggtgttgcggtatttaaagttgacgatgttggaaggcgcccattattgataggaggtgttggtggaattgctttgtcactcttcctactggcagcttactacaagatcctgaacaacttcccctttgttgctgtcggcgcgttacttctatatgtcggtgcttaccaggtctcatttggtccaattagttggctaatggtatctgagatctttccactccggacaagagggcgtgggatcagcctcgcagtactaacaaatttcggctcgaacgctctggtgacatttgcgttttcacccttgaaggagctcctcgggccagccaatatatttttcctgttcggcgtcatagcagtgctctccctcgtgtttgtgatcctcgtcgttccagaaaccaaaggactgagcctggaggagatcgagtcgaagatcctgaagtaattaaaaaccgttcgtgcgatcataagccccatttggagatattgtaagtagcgatgccattttcaaaacgggcgctcgctcactcgtaggatcggagccaaagctttcagacatgggagtacatatgcaaagggcacgtctcggtgtaaagcttggacatctttctcttttattagcgtagtgaatatttccgaacatacttggtaaattacatttcagttgagtcataatcacgcttctgtagactgtagtccactgtgacctactgtagtagtatgcatgtcactagtaaaagctggtaagctgtgtgatggactgatggtgtagacttgtgcagttgtgctcgcataaggctggccatcagatcgtgtatatagcgacataaaacactattttgcactatagataatactgttataatttacagaatggagttggaaacatgagataaagataagaggtgggacatgagagcttcggtagactatttttaatattatgcagtatgagataaaggtctttgagtgagtggttgtcca

SEQ ID NO: 47309 - DNA, 2204 bp, Zea Mays
tagctatacattcactcaagctaaggaacataacattcactgatataaacttataatgccatgatgtccgattgcagttttctgatatttatatgttagtcatttgctgaagtgtgtaacatcaaaagctagttggctgatgtagtttgatgggcatgttctgttataactaattatagtataagtagatataaaacatgcttgcacttgatatttcttatattttgatgatgcgttgaataaacatattgctgttggtttgaaatatattgtttcctaagttatttaatataactttctgctttaatttctgaggtagttggcacaaggttgttttgtatgttgcactttacggtggcatgcttttgctaacttaatatccactggcatccaaaatgtccaatggtctatgcttcgttaaaaagggaatgatatgtctcgatgaaacgtggacctcacatgtgtcactgacagtgtcaaataaggaattgcgcaaaactgcaatggtaggaaaaggatttatcctaattacaattaaagaggaatacaattgcaaaggagcatgtgcatattcagctaggggtttgggagagttggtgttatggcactgaaccattatggtgctctgtgccaggcaatgcatggtgcccctctttatattgcggagacttctccttcacaaatacgtggaacattgatatctttgaaggagctgtttattgtgttagggatactgttaggataccttgtaggaagtcttgaaattgacaatgtaggaggatggcggtacatgtttggttttagtgctccgcttgcagctattatggctattggtatgtggactttaccatcttcaccaagatggctacttctcagggcagttcaaggaaaggcttctttggaggataataaaaagaaggcaattcaagcccttagaacattgaggggccgcacagcaagtgaaaaggttttggcagatgatgttgacgatacaattgtctctattaaggctgcctacgcaggacaggaagctgaaggaaacgtttgggatgtatttgaaggagctagcttgaaggccttcactattggcggaggtctggttctgtttcagcagataacaggtcaaccgagtgttctatattatgctgcttcaatacttcagactgctggattctcagctgcatcagatgctgccaaagtagcaatcttgattgggttgttcaaggtgttgcggtatttaaagttgacgatgttggaaggcgcccattattgataggaggtgttggtggaattgctttgtcactcttcctactggcagcttactacaagatcctgaacaacttcccctttgttgctgtcggcgcgttacttctatatgtcggtgcttaccaggtctcatttggtccaattagttggctaatggtatctgagatctttccactccggacaagagggcgtgggatcagcctcgcagtactaacaaatttcggctcgaacgctctggtgacatttgcgttttcacccttgaaggagctcctcgggccagccaatatatttttcctgttcggcgtcatagcagtgctctccctcgtgtttgtgatcctcgtcgttccagaaaccaaaggactgagcctggaggagatcgagtcgaagatcctgaagtaattaaaaaccgttcgtgcgatcataagccccatttggagatattgtaagtagcgatgccattttcaaaacgggcgctcgctcactcgtaggatcggagccaaagctttcagacatgggagtacatatgcaaagggcacgtctcggtgtaaagcttggacatctttctcttttattagcgtagtgaatatttccgaacatacttggtaaattacatttcagttgagtcataatcacgcttctgtagactgtagtccactgtgacctactgtagtagtatgcatgtcactagtaaaagctggtaagctgtgtgatggactgatggtgtagacttgtgcagttgtgctcgcataaggctggccatcagatcgtgtatatagcgacataaaacactattttgcactatagataatactgttataatttacagaatggagttggaaacatgagataaagataagaggtgggacatgagagcttcggtagactatttttaatattatgcagtatgagataaaggtctttgagtgagtggttgtcca

SEQ ID NO: 47310 - DNA, 374 bp, Zea Mays
aagcatttggttgcgaacttgacgctgcgcagcgcaatcgataattaagttaggttgagatcttcactaatgaaaaggtgggagcaaggcttgcaggtgcatacacatatcgtcttgccgtgcagctgttcgtcgccgccgccgtcgtcctgatgttgagtgcctggactcgagcaaccacctcatccccgacgtacaccggcgccgcaaacttgagcgtctggctcgcgtacacagcgccaggctgaaccaacaaaacccaactatcaggccaagccacactgcgaggctccacgctcacgcgctgttggacgaaatgccggaaagaaaaagtacgaagctgccagcgatgatggaagggaagagggacgcca

SEQ ID NO: 47311 - DNA, 1135 bp, Zea Mays
tttttttggaatcaaagtatatctggtaacaccgcaaactcgagtacaaatacaagaaatatctgggtcctttttccagcagagggctacttaagatagaacactgaaagaaaacaccaagctgggctccacgcaagtctgccaaccatcgctctctaccaaaatttcaaaaactacacgccatatctacctgagaggaggatttctttgcagaagtatgaactgtgattacaacccaccggagttacaggccaaaaggagtcgtcacctacataacacctaaagtatcgtacgatccatgaggtttctctctctcttttttgcagcagcagcagcatgtctttgtctgcacacctaggaagagcagcaccctcccttcatgttggcagacgaatccgcaacgttgatggtggttccttgacctggaggtccactacctgctgcctcttgggctgcaagcgccttcttgcttatgatctgatggatgtcggagaggacggtctgaaacgccttctcgacgttaagggcttcgagggcggatgtctcgaggaaggataggccttccttctccgctaacgcctgcccatcttcctctggaaccgacctcaggtggttcaggtcggacttgttgccgaccatcatgatcacgatgttggagtccgcgtggtcacggagctcgcggagccacctctgtatgttttcaaatgtctgcttcttcgtgatgtcatagactagaagtgcacccacggctcctctgtagtaagcacttgtgattgcacggtacctctcttgccccgcagtatcccatatttgagctttgatggttttcccttcgatctggtgcgggtggcgaactcgacgccgatggtggacttggactcgaggcagaactcgttgcgggtgaaccgggaaaggatgttggacttgccgacgccggagtcgccgatgagcacgatcttgaagaggtagtcgtactcgttgtccactcggtgcgccatcgccggccgaccactgcccaccgccgcagatcctgcagcacgccggaggctcgtggagagatcggaggccgatggaggtgtcgacgatgccgagaaacggaaggagatgtgggcgtaaacagcgcggcaggggatgg

SEQ ID NO: 47312 - DNA, 682 bp, Zea Mays
ccacgcgctgctctgctgctgtggcctgtggggaaaaagggtgccgtgccgcaagtccggcggcgtgcggttcaccatcaacggcttccggtacttcaacctggtgctgatcacgaacgtggccggcgcgggggacgtggtgcgcgcgagcgtgaaggcgtcgggcacgggggagtggatgcccatgtcgcggaactggggccagaactggcagtccagcgccatcctcgtcggccaggcgctctccttccgcgtcaccggcagcgaccgccgcacctccacctcctggaacgccgccccgcgggactggcgcttcggacagaccttcgagggcaagaacttcagggtctgagctcaggccgcgagtggcggcgagaagaagccagcgctcaaggccttcttccgccgtactattatatataccgtgattactgctactagtagtcggtataaagcgcgtgttagggtggtgggaatgtacgtgaatgcccgtttagggtcacgccgtctcgccctggttcaagtactctctgaaaaaaaaggagcctttttcttctgaacatatgcgggcaaaagggagataagtatggtgattggatgcttgcttggttgtctcgacgtgatgctgcccgaattttttgtattttagcccctaaaccgaagtaaatttacgtttagacct

SEQ ID NO: 47313 - DNA, 1162 bp, Zea Mays
ccacatccatctggcggcacggaccagcacggttacggcgattcatggcgagcgagcgagcccgttccggcagctcacgtgggacggaagccggacggactccggccggctggtagcaattttttgtagtgatatactgatatcagattcaaaggtgcctgtacccgtagtgtgcatagtgaaagcgacggaaggctgctttcttgacattctatttgagaaagggaaagccccggagaagcctccaaaaacacaccttggtggcagcagcaagcagtagatgtaggaacagtagacgacacacacggttggtgctggtagggctagggctttgactttttttttctttcacaccagcacagggctttgactttttttttctttcactttgggcgctccgccattaacacatcacagacacagttggtagtactagtagtaccgcgtgaagtgaaggcagccaagccagccagccgcgcggtggtccagccttttcactgcacctcctgcctgggcgtgggtgccgtgccgcaagtccggcggcgtgcggttcaccatcaacggcttccggtacttcaacctggtgctgatcacgaacgtggccggcgcgggggacgtggtgcgcgcgagcgtgaaggcgtcgggcacgggggagtggatgcccatgtcgcggaactggggccagaactggcagtccagcgccatcctcgtcggccaggcgctctccttccgcgtcaccggcagcgaccgccgcacctccacctcctggaacgccgccccgcgggactggcgcttcggacagaccttcgagggcaagaacttcagggtctgagctcaggccgcgagtggcggcgagaagaagccagcgctcaaggccttcttccgccgtactattatatataccgtgattactgctactagtagtcggtataaagcgcgtgttagggtggtgggaatgtacgtgaatgcccgtttagggtcacgccgtctcgccctggttcaagtactctctgaaaaaaaaggagcctttttcttctgaacatatgcgggcaaaagggagataagtatggtgattggatgcttgcttggttgtctcgacgtgatgctgcccgaattttttgtattttagcccctaaaccgaagtaaatttacgtttagacct

SEQ ID NO: 47314 - DNA, 574 bp, Zea Mays
gggaccgcgatgttggccgccgcctgtcctctctccgccgtcgccgttccagtgtgggttttagatgatcacccgagcagctgcaaggaagcttttcacaaatatcagattgaagaggtggtgttttggtgctgagcttgtatacctgtgcaagcgcctcaggatccctatagtagaggtatctgttaactggaccgagtcaccgagatacctggtttcaaagtgcacatgacaattgacaagcatcatgcccacggacacatggtattcgagctcctgctgatcaaagtaggttatggactgggggatatggaaaatctactcgtagatcctgacatcctatgctgactagtttctgcaacttagtttatcatcactcctatacaaaacttagttcatcggcggcagatgcatttgtagaactgtgcatttctctgagggttttcaaagcaagagaaccaattgacatgtaacctagtgtgttgatcatagagatgttgacagatataggccaaatttgttgtcccaggctcccagctgatgaactcagactgtgtgtgaccttgattatcac

SEQ ID NO: 47315 - DNA, 2344 bp, Zea Mays
tatttaatgagtagagggatatgtagggtaatatttaaggggaacggttgcgggatgagtaaatataggggagagaatcctgctgacgtgactgcatagtaagatttagggggaaaaatttaggggaaacggctccggatagccttatgaaaaatggcgcagggcgaatgatcaaaagttcaaaaccacaatgcctcgcgcctggcggccatgagctcggccacatgccgccgcggcttcaatggcaagttccgtcgcatcgcatccgcgccgtcgccgcttctccaccgcaccggcctgtcgccacccgccgactgtggcgcgcgggctgcggagcagcactgcctccaccttctagagcgctcctccgcgccggccgccgtcctgcagtccctcgccttcctcctcaagtccggcctccacgccaacccgctcgtcctcaccaggctcttcgcgtcctccgctgctgcggcgcccgcgctgcttgagccccttgtcgctgcgctcctcgtgccctccgtccccatcgacgcgttcctcgccaacactctcatccgcgcgcacgccgcctccccgctcccttcggcccgcctccgcgccgcctccttcttcccgctcatgctccgcagcgccacgttgccgaacaagttcaccttcccgttcctcctcaaggcctgcgccgcgttcccgggcgttggtgtccaggcgcacgccgccgctctcaagttcgggttcaccaccgaccagtatgtttccaatactctcatacacatgtactcgtgcttcggcggtgagtttcttggggacgcgcggaatgtgttcgacagaatggccaaatcgagcgcggttacttggagcgcgatgatcggcgggtatgtgcgtagcgggctgtcgagtgatgcagttgggttgttcagggagatgcaggccagcggggtgaggccagatgaggtcacaatgattggtgttctggcagcagctgcagatttgggagcgctcgagcttgctcggtgggttggccggtttgtggagaaggaggggattgggaaatctgtgacgctgtgcaatgcgctgattgacgctctcgccaagtgcggtgatttggatggggctatggcagtgttccaggggatgaaggagcggactattgtttcttggacgtcagtgattgacgcacttgcaatggagggtcgtgggaaggaggctgtggcggtgttcgaggagatgaagactgctggcgtgcggcctgatgatgttgcgttcattggggtgctcactgcgtgtagccatgctggaatggttgatgaaggttatggctactttgagtcaatgaggatggcatatggcattgatcctaagatcgagcattatggctgcatggtagacatgttcggtcgtgctggcatggtcgagcgggcaatggagtttgttcataagatgcccatgaaaccaaacccaataatatggcggacgcttgttgctgcctgccgtgcccatggcaggcttgagctcggagaaaccatcaccaggaaccttctaaatgagtacccggcacatgaggccaactacgtcatgctctccaatgtctatgcgctgacacggaggtggaaggagaaatcagagattaggagagagatgagcaagagagggatcaagaaggtgccaggttgcagccttgttgagctcgatggggaggtccatgagttcatagctggtgacgagtcgcatccacagtggaaagagatatacatgatggtcgaggagatggcgagggagctcaggcgtgctgggcacatctcagctacatcagaggttctccttgaccttgatgaggaggataaggaggttgcgcttcagtggcacagcgagaagctggcgattgcatttgtgctactgaggactcctcctggtacacaggttccatcgcttcaagaatggctcctgctcgtgcaatgatttctggtgatgcaattgtttttcaccaatttatcctgtttctggctgcccatcaaagagggcaattgcagaagatgatggtaatggtaatttatttcgagggggcttctgcaaatctttcaaggttcgtctgttcatttgaaatatggaagattttggtagccagtagttacgatgcttgtttaaggatattagaagctgtgttgaagtgtatactttttatattagtccctggactaaaggaactaaataaaccctaattttagtagcaaactattagctccagcgtattcaaacactccctaagtctcgtggatacacattaataaagatcacttgtattgtatgcacaaccacaagtttttcaatttgatttattatttttgtc

SEQ ID NO: 47316 - DNA, 970 bp, Zea Mays
ctccaacgaagcggaacagtgtcggttccagtaaaaactagtactatctataatacattttgcaaatcaatcatgacacagtgaaaagagggcagtctctttcttggaactggagtgagacagataaccatgaagccaagcaacccaatttttttgacatgatcttgcccaaatggaacgatgcgctgctggaggtgttcagaatagattacgtcgggtcatccccgtacatcacgtgcaatccttcgctctatcaccacaggctcagcacgagggacaggttcctgatactatcgtcagacgggctctaccagtatttcaccaacgaggaggcggtcgctcaggttgagatgttcatcgcaacaacccctgagggcgaccctgcccagcatctggtggaggaagttcttttcagagctgcaaacaaagcaggaatggacttccacgaattgatcgagataccacatggcgaccgccggcggtaccacgacgacgtatctgtcattgtgatatctttggagggcaggatctggagatcatgcgtgtaaataggtcagccatactagtagtagattagagaaagaaacgtatatagagagagagaggttcttgaaggcctacttcactcgtcccagctgctactgtacaatatcaatgaagcactgggtggtgggcttgggatctcaagttgaaccacgatgagattcacctggagcgtgccgatgccgacgcagtgccgtatgagatgtccatgcaaaagaggatttgttcaattactaataactcaatcaaatagcgaccaattggtcaactttctttgaccttttgttttgcatcttctgtgttcataccataacatgtgcacgggagactgattcaaagttggacttctgagattctggactttgtgcaaaaaaatgcagatgggttacttggtcagaaatggtttgcggtgttgaccagacctctt

SEQ ID NO: 47317 - DNA, 1915 bp, Zea Mays
ctaggaacaccacacgttgcattgcattgttaacttgtcgctctaacaatgcaagtctacgcgggctcacttgccagtggctagaggcacctggtttgtttcttgccgaagcccgtggtacatgtgaacagcagggcctgtcttctgcttttgcttcttagcaatggcgaatgcaagcaaacacttgcaaccttcaagcaaatcaggcaatgacagaaagtaccagggcacactggttgcttctccagcaaaggacatttcaccgaagtgtgcgaatcgcattgttccatcgaaacaactgatcttgggtggggattcaataggccatctggcatcgattctgattaaggtcgttgctctcgaggcagtcagaagagtttctaaagcaagataccctttcatatggaattctgttcaagcattgcaaatccttgtgtatcctccatttagttggatccaaagatgggcaccactcaaatttcttgtgcagggaattcagaaactatccatgccactgttgtttttgtcagtcacaacaacagtaagtgagctgtcctccaagcgtgatgatgaaccagataacaatacagaacattctgaaacaaatgaattggcatcaacttctggcacaagtgatgctgctgatggcacaaaggaaatcgtacaagagaactggcttgtgttacttttcagggagcttgagaagcaaggcatcactttacccgagaggtttactgaagatgaattacgcagattttatgttgctgcaaatggtgacttttcaagtttactctcttcggttaagaagacaattcgttggagggaaacgtttcacatacttacactgcaagaacttgataaatggtctcacttagtcttttggcatggatttgacacgatgcttcggccttgtttagtaattcgtcttggacttgcatgctccagcataccaccttgtgatagaccccgttttgggcaagcagtagtttctcaaattgaccatggtgttgtaaatttgaccaacaaagaagattcaagaattaccgttttgctggattgccatgggatttctccattcagatttccaatgcaaatgatgaggtcatttgtcactgtagctcaagaaaactacccaaatcgtcttggagtattgtttgttgtccgccttcctccagttgtcagagttattgcacagacatttcttcaagttttgaaaccatctacaaagcagaagttacgttttgagggagattcatacaagaagacgttggcggagttcttgcaggccgtgccagcgtttctgggcggtaaatgcagctgcccacgatgtgagaagcctcgtaatagttcagtggtgcaggcaggggaagggagcaagaaccaggctcgcttggtcagcgttgatggcggatcacctgtcgtggacttcgacttcgatgaagaagagatcccatcaccttatagctgcgagaacgccatcagggctgcgataatctgcctgctgatggtgtgcatcttcatcgcgtttctggctgggatgaacgaccctgcatccgttccgcccagtgcctgagagctatggaatcgcctagtctcccatagtagagcttagattgtcagttgagtatatacacatctgtgttgctatttaggatgctactagggtgttgtattccctggcagcttctttctcggttgtcgtcagatcgccttctctcctaatgtgagcggagcagatgaataaatatcctgtgtgtggcaaatgttggttagcagttcaattagcccttcgatagtgtctttctttgcgtgcttgctgcagtagggcagtgtgatttctcgttagtgtacgtaaactcaaagttttcaaccacaaggcaacaacacactgactctagtggtttcagctctttaa

SEQ ID NO: 47318 - DNA, 1916 bp, Zea Mays
ccaaaagttgttgccgtgacctcttctggcgagtgaacattcttgagcgacctgtttttacgacctgaactagtagcgtggctagaggcacctggtttgtttcttgccgaagcccgtggtacatgtgaacagcagggcctgtcttctgcttttgcttcttagcaatggcgaatgcaagcaaacacttgcaaccttcaagcaaatcaggcaatgacagaaagtaccagggcacactggttgcttctccagcaaaggacatttcaccgaagtgtgcgaatcgcattgttccatcgaaacaactgatcttgggtggggattcaataggccatctggcatcgattctgattaaggtcgttgctctcgaggcagtcagaagagtttctaaagcaagataccctttcatatggaattctgttcaagcattgcaaatccttgtgtatcctccatttagttggatccaaagatgggcaccactcaaatttcttgtgcagggaattcagaaactatccatgccactgttgtttttgtcagtcacaacaacagtaagtgagctgtcctccaagcgtgatgatgaaccagataacaatacagaacattctgaaacaaatgaattggcatcaacttctggcacaagtgatgctgctgatggcacaaaggaaatcgtacaagagaactggcttgtgttacttttcagggagcttgagaagcaaggcatcactttacccgagaggtttactgaagatgaattacgcagattttatgttgctgcaaatggtgacttttcaagtttactctcttcggttaagaagacaattcgttggagggaaacgtttcacatacttacactgcaagaacttgataaatggtctcacttagtcttttggcatggatttgacacgatgcttcggccttgtttagtaattcgtcttggacttgcatgctccagcataccaccttgtgatagaccccgttttgggcaagcagtagtttctcaaattgaccatggtgttgtaaatttgaccaacaaagaagattcaagaattaccgttttgctggattgccatgggatttctccattcagatttccaatgcaaatgatgaggtcatttgtcactgtagctcaagaaaactacccaaatcgtcttggagtattgtttgttgtccgccttcctccagttgtcagagttattgcacagacatttcttcaagttttgaaaccatctacaaagcagaagttacgttttgagggagattcatacaagaagacgttggcggagttcttgcaggccgtgccagcgtttctgggcggtaaatgcagctgcccacgatgtgagaagcctcgtaatagttcagtggtgcaggcaggggaagggagcaagaaccaggctcgcttggtcagcgttgatggcggatcacctgtcgtggacttcgacttcgatgaagaagagatcccatcaccttatagctgcgagaacgccatcagggctgcgataatctgcctgctgatggtgtgcatcttcatcgcgtttctggctgggatgaacgaccctgcatccgttccgcccagtgcctgagagctatggaatcgcctagtctcccatagtagagcttagattgtcagttgagtatatacacatctgtgttgctatttaggatgctactagggtgttgtattccctggcagcttctttctcggttgtcgtcagatcgccttctctcctaatgtgagcggagcagatgaataaatatcctgtgtgtggcaaatgttggttagcagttcaattagcccttcgatagtgtctttctttgcgtgcttgctgcagtagggcagtgtgatttctcgttagtgtacgtaaactcaaagttttcaaccacaaggcaacaacacactgactctagtggtttcagctctttaa

SEQ ID NO: 47319 - DNA, 2319 bp, Zea Mays
cctgaactagtagcggtatgtttggcagagcggcaagttagagcgacgtattttgccaaattcctccttctaccccgagcgcaacaatttcctcccagccgcgacctgtctctgtctgttcttctgccccgatcggccgatcccacccacgcatctctctccgcgcccgcggtagtgttcgtgttcctcactcctcccgcttccttccccgacactgcctcagctcagatccgcggcggtttcccggtccctggatctaaagcggccggtgagcaggcctccttccgccgacgcggaccacctggagggaatttatcctggagccgtcttcctcctcgcctcctctcgcggcgcggcgcggaggccggaatcacttggaggtctagctgtgtgtggattgatttcttcgtttgtggtggctagaggcacctggtttgtttcttgccgaagcccgtggtacatgtgaacagcagggcctgtcttctgcttttgcttcttagcaatggcgaatgcaagcaaacacttgcaaccttcaagcaaatcaggcaatgacagaaagtaccagggcacactggttgcttctccagcaaaggacatttcaccgaagtgtgcgaatcgcattgttccatcgaaacaactgatcttgggtggggattcaataggccatctggcatcgattctgattaaggtcgttgctctcgaggcagtcagaagagtttctaaagcaagataccctttcatatggaattctgttcaagcattgcaaatccttgtgtatcctccatttagttggatccaaagatgggcaccactcaaatttcttgtgcagggaattcaggttattcaatttctcatctctccacaacgcatgctatttcgttccttgacataggggaaagacagaaactatccatgccactgttgtttttgtcagtcacaacaacagtaagtgagctgtcctccaagcgtgatgatgaaccagataacaatacagaacattctgaaacaaatgaattggcatcaacttctggcacaagtgatgctgctgatggcacaaaggaaatcgtacaagagaactggcttgtgttacttttcagggagcttgagaagcaaggcatcactttacccgagaggtttactgaagatgaattacgcagattttatgttgctgcaaatggtgacttttcaagtttactctcttcggttaagaagacaattcgttggagggaaacgtttcacatacttacactgcaagaacttgataaatggtctcacttagtcttttggcatggatttgacacgatgcttcggccttgtttagtaattcgtcttggacttgcatgctccagcataccaccttgtgatagaccccgttttgggcaagcagtagtttctcaaattgaccatggtgttgtaaatttgaccaacaaagaagattcaagaattaccgttttgctggattgccatgggatttctccattcagatttccaatgcaaatgatgaggtcatttgtcactgtagctcaagaaaactacccaaatcgtcttggagtattgtttgttgtccgccttcctccagttgtcagagttattgcacagacatttcttcaagttttgaaaccatctacaaagcagaagttacgttttgagggagattcatacaagaagacgttggcggagttcttgcaggccgtgccagcgtttctgggcggtaaatgcagctgcccacgatgtgagaagcctcgtaatagttcagtggtgcaggcaggggaagggagcaagaaccaggctcgcttggtcagcgttgatggcggatcacctgtcgtggacttcgacttcgatgaagaagagatcccatcaccttatagctgcgagaacgccatcagggctgcgataatctgcctgctgatggtgtgcatcttcatcgcgtttctggctgggatgaacgaccctgcatccgttccgcccagtgcctgagagctatggaatcgcctagtctcccatagtagagcttagattgtcagttgagtatatacacatctgtgttgctatttaggatgctactagggtgttgtattccctggcagcttctttctcggttgtcgtcagatcgccttctctcctaatgtgagcggagcagatgaataaatatcctgtgtgtggcaaatgttggttagcagttcaattagcccttcgatagtgtctttctttgcgtgcttgctgcagtagggcagtgtgatttctcgttagtgtacgtaaactcaaagttttcaaccacaaggcaacaacacactgactctagtggtttcagctctttaa

SEQ ID NO: 47320 - DNA, 2283 bp, Zea Mays
cctgaactagtagcggtatgtttggcagagcggcaagttagagcgacgtattttgccaaattcctccttctaccccgagcgcaacaatttcctcccagccgcgacctgtctctgtctgttcttctgccccgatcggccgatcccacccacgcatctctctccgcgcccgcggtagtgttcgtgttcctcactcctcccgcttccttccccgacactgcctcagctcagatccgcggcggtttcccggtccctggatctaaagcggccggtgagcaggcctccttccgccgacgcggaccacctggagggaatttatcctggagccgtcttcctcctcgcctcctctcgcggcgcggcgcggaggccggaatcacttggagtggctagaggcacctggtttgtttcttgccgaagcccgtggtacatgtgaacagcagggcctgtcttctgcttttgcttcttagcaatggcgaatgcaagcaaacacttgcaaccttcaagcaaatcaggcaatgacagaaagtaccagggcacactggttgcttctccagcaaaggacatttcaccgaagtgtgcgaatcgcattgttccatcgaaacaactgatcttgggtggggattcaataggccatctggcatcgattctgattaaggtcgttgctctcgaggcagtcagaagagtttctaaagcaagataccctttcatatggaattctgttcaagcattgcaaatccttgtgtatcctccatttagttggatccaaagatgggcaccactcaaatttcttgtgcagggaattcaggttattcaatttctcatctctccacaacgcatgctatttcgttccttgacataggggaaagacagaaactatccatgccactgttgtttttgtcagtcacaacaacagtaagtgagctgtcctccaagcgtgatgatgaaccagataacaatacagaacattctgaaacaaatgaattggcatcaacttctggcacaagtgatgctgctgatggcacaaaggaaatcgtacaagagaactggcttgtgttacttttcagggagcttgagaagcaaggcatcactttacccgagaggtttactgaagatgaattacgcagattttatgttgctgcaaatggtgacttttcaagtttactctcttcggttaagaagacaattcgttggagggaaacgtttcacatacttacactgcaagaacttgataaatggtctcacttagtcttttggcatggatttgacacgatgcttcggccttgtttagtaattcgtcttggacttgcatgctccagcataccaccttgtgatagaccccgttttgggcaagcagtagtttctcaaattgaccatggtgttgtaaatttgaccaacaaagaagattcaagaattaccgttttgctggattgccatgggatttctccattcagatttccaatgcaaatgatgaggtcatttgtcactgtagctcaagaaaactacccaaatcgtcttggagtattgtttgttgtccgccttcctccagttgtcagagttattgcacagacatttcttcaagttttgaaaccatctacaaagcagaagttacgttttgagggagattcatacaagaagacgttggcggagttcttgcaggccgtgccagcgtttctgggcggtaaatgcagctgcccacgatgtgagaagcctcgtaatagttcagtggtgcaggcaggggaagggagcaagaaccaggctcgcttggtcagcgttgatggcggatcacctgtcgtggacttcgacttcgatgaagaagagatcccatcaccttatagctgcgagaacgccatcagggctgcgataatctgcctgctgatggtgtgcatcttcatcgcgtttctggctgggatgaacgaccctgcatccgttccgcccagtgcctgagagctatggaatcgcctagtctcccatagtagagcttagattgtcagttgagtatatacacatctgtgttgctatttaggatgctactagggtgttgtattccctggcagcttctttctcggttgtcgtcagatcgccttctctcctaatgtgagcggagcagatgaataaatatcctgtgtgtggcaaatgttggttagcagttcaattagcccttcgatagtgtctttctttgcgtgcttgctgcagtagggcagtgtgatttctcgttagtgtacgtaaactcaaagttttcaaccacaaggcaacaacacactgactctagtggtttcagctctttaa

SEQ ID NO: 47321 - DNA, 1526 bp, Zea Mays
aaacgaagagtttgttttggggcattggatatttagcacaatgggctccttgaagcactatctgggattctagacagattaagaaatcaaaaccattttcctaaaatgtgaaactatccatgccactgttgtttttgtcagtcacaacaacagtaagtgagctgtcctccaagcgtgatgatgaaccagataacaatacagaacattctgaaacaaatgaattggcatcaacttctggcacaagtgatgctgctgatggcacaaaggaaatcgtacaagagaactggcttgtgttacttttcagggagcttgagaagcaaggcatcactttacccgagaggtttactgaagatgaattacgcagattttatgttgctgcaaatggtgacttttcaagtttactctcttcggttaagaagacaattcgttggagggaaacgtttcacatacttacactgcaagaacttgataaatggtctcacttagtcttttggcatggatttgacacgatgcttcggccttgtttagtaattcgtcttggacttgcatgctccagcataccaccttgtgatagaccccgttttgggcaagcagtagtttctcaaattgaccatggtgttgtaaatttgaccaacaaagaagattcaagaattaccgttttgctggattgccatgggatttctccattcagatttccaatgcaaatgatgaggtcatttgtcactgtagctcaagaaaactacccaaatcgtcttggagtattgtttgttgtccgccttcctccagttgtcagagttattgcacagacatttcttcaagttttgaaaccatctacaaagcagaagttacgttttgagggagattcatacaagaagacgttggcggagttcttgcaggccgtgccagcgtttctgggcggtaaatgcagctgcccacgatgtgagaagcctcgtaatagttcagtggtgcaggcaggggaagggagcaagaaccaggctcgcttggtcagcgttgatggcggatcacctgtcgtggacttcgacttcgatgaagaagagatcccatcaccttatagctgcgagaacgccatcagggctgcgataatctgcctgctgatggtgtgcatcttcatcgcgtttctggctgggatgaacgaccctgcatccgttccgcccagtgcctgagagctatggaatcgcctagtctcccatagtagagcttagattgtcagttgagtatatacacatctgtgttgctatttaggatgctactagggtgttgtattccctggcagcttctttctcggttgtcgtcagatcgccttctctcctaatgtgagcggagcagatgaataaatatcctgtgtgtggcaaatgttggttagcagttcaattagcccttcgatagtgtctttctttgcgtgcttgctgcagtagggcagtgtgatttctcgttagtgtacgtaaactcaaagttttcaaccacaaggcaacaacacactgactctagtggtttcagctctttaa

SEQ ID NO: 47322 - DNA, 1623 bp, Zea Mays
gttttggggcattggatatttagcacaatgggctccttgaagcactatctgggattctagacagattaagaaatcaaaaccattttcctaaaatgtgaaactatccatgccactgttgtttttgtcagtcacaacaacagtaagtgagctgtcctccaagcgtgatgatgaaccagataacaatacagaacattctgaaacaaatgaattggcatcaacttctggcacaagtgatgctgctgatggcacaaaggaaatcgtacaagagaactggcttgtgttacttttcagggagcttgagaagcaaggcatcactttacccgagaggtttactgaagatgaattacgcagattttatgttgctgcaaatggtgacttttcaagtttactctcttcggttaagaagacaattcgttggagggaaacgtttcacatacttacactgcaagaacttgataaatggtctcacttagtcttttggcatggatttgacacgatgcttcggccttgtttagtaattcgtcttggacttgcatgctccagcataccaccttgtgatagaccccgttttgggcaagcagtaggtaactgtcaacactcaaatcaattccctgtaactcagttcacataaaatcggcgatagcaatatgactttgttgtgccccccttccctagtttgcttactgctgagaagtttctcaaattgaccatggtgttgtaaatttgaccaacaaagaagattcaagaattaccgttttgctggattgccatgggatttctccattcagatttccaatgcaaatgatgaggtcatttgtcactgtagctcaagaaaactacccaaatcgtcttggagtattgtttgttgtccgccttcctccagttgtcagagttattgcacagacatttcttcaagttttgaaaccatctacaaagcagaagttacgttttgagggagattcatacaagaagacgttggcggagttcttgcaggccgtgccagcgtttctgggcggtaaatgcagctgcccacgatgtgagaagcctcgtaatagttcagtggtgcaggcaggggaagggagcaagaaccaggctcgcttggtcagcgttgatggcggatcacctgtcgtggacttcgacttcgatgaagaagagatcccatcaccttatagctgcgagaacgccatcagggctgcgataatctgcctgctgatggtgtgcatcttcatcgcgtttctggctgggatgaacgaccctgcatccgttccgcccagtgcctgagagctatggaatcgcctagtctcccatagtagagcttagattgtcagttgagtatatacacatctgtgttgctatttaggatgctactagggtgttgtattccctggcagcttctttctcggttgtcgtcagatcgccttctctcctaatgtgagcggagcagatgaataaatatcctgtgtgtggcaaatgttggttagcagttcaattagcccttcgatagtgtctttctttgcgtgcttgctgcagtagggcagtgtgatttctcgttagtgtacgtaaactcaaagttttcaaccacaaggcaacaacacactgactctagtggtttcagctctttaa

SEQ ID NO: 47323 - DNA, 1496 bp, Zea Mays
ggatatttagcacaatgggctccttgaagcactatctgggattctagacagattaagaaatcaaaaccattttcctaaaatgtgaaactatccatgccactgttgtttttgtcagtcacaacaacagtaagtgagctgtcctccaagcgtgatgatgaaccagataacaatacagaacattctgaaacaaatgaattggcatcaacttctggcacaagtgatgctgctgatggcacaaaggaaatcgtacaagagaactggcttgtgttacttttcagggagcttgagaagcaaggcatcactttacccgagaggtttactgaagatgaattacgcagattttatgttgctgcaaatggtgacttttcaagtttactctcttcggttaagaagacaattcgttggagggaaacgtttcacatacttacactgcaagaacttgataaatggtctcacttagtcttttggcatggatttgacacgatgcttcggccttgtttagtaattcgtcttggacttgcatgctccagcataccaccttgtgatagaccccgttttgggcaagcatttctcaaattgaccatggtgttgtaaatttgaccaacaaagaagattcaagaattaccgttttgctggattgccatgggatttctccattcagatttccaatgcaaatgatgaggtcatttgtcactgtagctcaagaaaactacccaaatcgtcttggagtattgtttgttgtccgccttcctccagttgtcagagttattgcacagacatttcttcaagttttgaaaccatctacaaagcagaagttacgttttgagggagattcatacaagaagacgttggcggagttcttgcaggccgtgccagcgtttctgggcggtaaatgcagctgcccacgatgtgagaagcctcgtaatagttcagtggtgcaggcaggggaagggagcaagaaccaggctcgcttggtcagcgttgatggcggatcacctgtcgtggacttcgacttcgatgaagaagagatcccatcaccttatagctgcgagaacgccatcagggctgcgataatctgcctgctgatggtgtgcatcttcatcgcgtttctggctgggatgaacgaccctgcatccgttccgcccagtgcctgagagctatggaatcgcctagtctcccatagtagagcttagattgtcagttgagtatatacacatctgtgttgctatttaggatgctactagggtgttgtattccctggcagcttctttctcggttgtcgtcagatcgccttctctcctaatgtgagcggagcagatgaataaatatcctgtgtgtggcaaatgttggttagcagttcaattagcccttcgatagtgtctttctttgcgtgcttgctgcagtagggcagtgtgatttctcgttagtgtacgtaaactcaaagttttcaaccacaaggcaacaacacactgactctagtggtttcagctctttaa

SEQ ID NO: 47324 - DNA, 1494 bp, Zea Mays
ataacatgtacttactgtggaacattcctggcaaattcatgtgatgagtgcggggcagacgtcaataaaacctcatttaaactatccatgccactgttgtttttgtcagtcacaacaacagtaagtgagctgtcctccaagcgtgatgatgaaccagataacaatacagaacattctgaaacaaatgaattggcatcaacttctggcacaagtgatgctgctgatggcacaaaggaaatcgtacaagagaactggcttgtgttacttttcagggagcttgagaagcaaggcatcactttacccgagaggtttactgaagatgaattacgcagattttatgttgctgcaaatggtgacttttcaagtttactctcttcggttaagaagacaattcgttggagggaaacgtttcacatacttacactgcaagaacttgataaatggtctcacttagtcttttggcatggatttgacacgatgcttcggccttgtttagtaattcgtcttggacttgcatgctccagcataccaccttgtgatagaccccgttttgggcaagcagtagtttctcaaattgaccatggtgttgtaaatttgaccaacaaagaagattcaagaattaccgttttgctggattgccatgggatttctccattcagatttccaatgcaaatgatgaggtcatttgtcactgtagctcaagaaaactacccaaatcgtcttggagtattgtttgttgtccgccttcctccagttgtcagagttattgcacagacatttcttcaagttttgaaaccatctacaaagcagaagttacgttttgagggagattcatacaagaagacgttggcggagttcttgcaggccgtgccagcgtttctgggcggtaaatgcagctgcccacgatgtgagaagcctcgtaatagttcagtggtgcaggcaggggaagggagcaagaaccaggctcgcttggtcagcgttgatggcggatcacctgtcgtggacttcgacttcgatgaagaagagatcccatcaccttatagctgcgagaacgccatcagggctgcgataatctgcctgctgatggtgtgcatcttcatcgcgtttctggctgggatgaacgaccctgcatccgttccgcccagtgcctgagagctatggaatcgcctagtctcccatagtagagcttagattgtcagttgagtatatacacatctgtgttgctatttaggatgctactagggtgttgtattccctggcagcttctttctcggttgtcgtcagatcgccttctctcctaatgtgagcggagcagatgaataaatatcctgtgtgtggcaaatgttggttagcagttcaattagcccttcgatagtgtctttctttgcgtgcttgctgcagtagggcagtgtgatttctcgttagtgtacgtaaactcaaagttttcaaccacaaggcaacaacacactgactctagtggtttcagctctttaa

SEQ ID NO: 47325 - DNA, 1295 bp, Zea Mays
caccctttgtcctcccttcctgctgtgtgaaaccgatcacccaaagccccaaaccctaacttactatttgtattcgaatattcgaatctgatataattgcaagttatatatactctgagcctggctgccgaaacttccttttggtgtccctgttacattcggtttcgtttttgatgacttcatcaagaagcaagagcaggagccacagtcgcagcaggagcaggagccgcagtcctcagcgaagagataggttgcgcagcgaacgtgcaccccgccacagtcgcagtcgcagcaggagccgcagcccataccgtcgcagagaacggcgtggatacaaggatctcgtatgcaagaactgccggagacctgggcactttgctaaggagtgcccatctgcgcctacgtgcaataactgtaaccttccaggccacttcgcagcagaatgcacctcaaaaactgtttgctggaactgcaaagagcctgggcacattgcgagtgagtgcaagaacgaggccctgtgccacacctgcaacaaaacaggtcacttggcgcgtgattgccctacttcaggggctaacgtcaagctatgcaacaaatgttttaaatcaggccacatcgccgttgactgcaccaacgaacgggcatgcaacaactgccgtcagccagggcacatagctcgagagtgcaagaacgatcctgtttgcaacctgtgcaatgtctctggccatgtcgcgcgcgtctgtccaaagacgactctggcttcagagatacacatacagggtggcccgttccgtgatatcctgtgccgcatctgtggtcagccagggcacatcagccgcaactgcatggccaccgtcatctgtgacacatgtggcgggagggggcacatgtcttacgagtgcccgtcggcaaggatttttgatcgcgggttccgcaggttctgagagcctttcaccgctttgtttctgatggtttgagtttcgccaggatgtttaatttgtttgtgacaatattggaacaattttccctatggttgttgaggaatgattctgtgaggatgtgttgcgggtgaaactcttttttttttacttttaggttttgtttgattactctagtatttatctcattacacatggattgaggtgtattggggtagcttacatgtgtattgaagtaaatactagagcatccaaacaaggtcttaatcaggatatatggccctttgtggactctaacagtgctgtcacggctcatgtgaaaattgccaggtcatgtttaactcttgtgctcatgct

SEQ ID NO: 47326 - DNA, 1153 bp, Zea Mays
tactgccactgtgtacaagggatctcgtatgcaagaactgccggagacctgggcactttgctaaggagtgcccatctgcgcctacgtgcaataactgtaaccttccagggtaaaataaaccagcaacaatcttaatatagttgcactcattccatttttgttggaatcagatgcacttatgacttattgttgtacagagtattaatttaatcattgctgcatatttcattcttccgatgttttgtttgtagtggaccataaccccatcccctttattttctacagccacttcgcagcagaatgcacctcaaaaactgtttgctggaactgcaaagagcctgggcacattgcgagtgagtgcaagaacgaggccctgtgccacacctgcaacaaaacaggtcacttggcgcgtgattgccctacttcaggggctaacgtcaagctatgcaacaaatgttttaaatcaggccacatcgccgttgactgcaccaacgaacgggcatgcaacaactgccgtcagccagggcacatagctcgagagtgcaagaacgatcctgtttgcaacctgtgcaatgtctctggccatgtcgcgcgcgtctgtccaaagacgactctggcttcagagatacacatacagggtggcccgttccgtgatatcctgtgccgcatctgtggtcagccagggcacatcagccgcaactgcatggccaccgtcatctgtgacacatgtggcgggagggggcacatgtcttacgagtgcccgtcggcaaggatttttgatcgcgggttccgcaggttctgagagcctttcaccgctttgtttctgatggtttgagtttcgccaggatgtttaatttgtttgtgacaatattggaacaattttccctatggttgttgaggaatgattctgtgaggatgtgttgcgggtgaaactcttttttttttacttttaggttttgtttgattactctagtatttatctcattacacatggattgaggtgtattggggtagcttacatgtgtattgaagtaaatactagagcatccaaacaaggtcttaatcaggatatatggccctttgtggactctaacagtgctgtcacggctcatgtgaaaattgccaggtcatgtttaactcttgtgctcatgct

SEQ ID NO: 47327 - DNA, 446 bp, Zea Mays
aatgaactctactaattatatgtaatgaccttttgttggttcggtgttaatgtgtatagttttttcaaacagaatctgcagtctgagaatctgtgtatccaaacacctatattctaacgaacaacttttttgcacagctggcgaaccaaacacctaaattctaaccaccagtttttcccaacagccagcttttctccacagccagcttttcagaaaagctatttagaaaaaagccgaaccaaacacgcccaaagtgtgctatgtgcgctaccagcatgtagcaaccacatttcgctgtcacacgacagtttccttcgtctaacggcaaccgcgtcgccgaaggaatactggccacggaagattcggtctgtcgatggacacctgagatcatatgcacattgatgtcggtccatgatatgatggaagcgtccatagctcggccgaca

SEQ ID NO: 47328 - DNA, 624 bp, Zea Mays
ctcctggagaacaataaataaatatgtgaatcttcccaaaatacttttgttatgacttcccgccaaggtagtagagacataactcccagaaaagggaaaaatcatatacaacagtatttttccatacactaatatgaatgtatgagcgtacaaaatcacaatgtcttgctatctgcaactgtgatgtcatgataattaactatgttttggacataaatgtatcaaagtaccttgacgcaacattttcgtttaattccctacttatcttggtgtcttggcggttgtggaaacaaaggaatgcttgcgtgtttgatggggtacctccgagtatccgcaacattttgcaagagattcatgaggatgttaagctttggggaatggcaggagcaaaagatattagacagttgtggcattaatttagatggggtggtgggggttgtcccccctccccctttttccctcttgtttctagtttcttttatttttgttcttctcttttttctttttgtccccctcttctcgtctgctgccttctcgggcactttgttttcttggtccacttgggaccttttttcctcttaatataatgacgcgcagttctcctgcgtgttcgagagaaaaaag

SEQ ID NO: 47329 - DNA, 2434 bp, Zea Mays
gccaccaccacgaagcaaagcagccaaggcgagtcaccctgcccggctctccatcctccaggtccagggctccagcctccactctccaggccacgggggcgggcgcggggcgagtcgagtccactgtggcaggggtacacgggcctgaaaaggcggctgcggcggcgccaccaaaccgctgccgcgcgagcgccgccaccgaacgcgccccgccggccgggcctcccctctcgcccgcccgccccaggcgtcgcgatcgcccccgcgggcgctcgctcctcaaataggccgcgagggatcacggcccgagcggcgtcgggggaggttcgtcgggttgacttgggcttggatgggcgggaccagcgcgagcggccggcggaggtgggcgcggcggtcctgccggacgggaggacaagccggtggggttgtcaggcggacgatcgcggcgccaactgctccgagggtaaccgaagggtttgctcatgtggacaagcaacggcgtgttcatggagcattatcagatttcagatgcaacagtggatcaacagttcatctttctttggatatcgaggaattcaagcataagggctcccacaaatcttctgttagatgtcttcctagttcacagagaaatgtaacagaaattagtcacatgcaacctgttgcgaggggacttcaagtagataagagcttcagtgataaagggttgtgtcatgcgagcagaactgtttcaggaatgcccattcgacctaagtattatctcagcagtcccaacaacaatttgaagagtcctcccactgtaaagagttgtagtcagatgagtgatttcagttatcgactggtcagaagtgctaaaaggtcagcttctccaggaatgggtttaaccagcacaaactactccctttatgagaaaatgtctttgctacgtcaacgaaggcatggtgataatcatcagaaccaaaaccgtatcaatgccttgaatcgacgacacaaaatcatgaatcctaggggagcagctgatctgctaagtaaagataaggttcatgaacaccttaattcctcattggaaagacattcacaggctttgttaaataatgcattgattagagaaaagcaactgtgctgttcagatatactcaatcaaaaagcacctgaacagatatggagctccgtttccagtgaatctgagaagatattatgcttttcctctggtgacagcattgatgatctgcaaggatcgtattcaagtgaaactagtgatagctccaacttatcatctctgggtgcagtagctggtgatgaatggaatacagccttcaagaagactgcatgcatggactctacatctgtcatgtacactaaagaagtaggtcaggctagcccaatatctgttcttaagcctctatctgaagattgctctgattctgaaaacatcaggcgagagcctgcagatccatatgatctccagctgagactggagcttggcacatttgcaccaacagaaactgctgcggaggcaagtagcattggcagaactagtgactgtttatcctctgaagtgcagccgagcgacgacaaacccatacagcttgttgaagacattctcgaagaactggaagacgatgaggaaagggagttctcttacttgctggacatactgattgcttctggaatccatggaactgtggaggatcaaatgtacaaggtgtgccagtctaccgagtaccctgctagcgacgatgtgttcgagaaggtggaaaagaagtacaccaaagttgtccagtggtcaagatcagacaggaagcttttattcgacatggtgaacacgatactgtcacagatcctcgccccatgcttgaacatgcgaccttgggtcaacactaccaggaacttggctccgctttggggcgcagagggtctcctagagaaagtcttgcaggtgctaactcagagacgggaacaactcgcgcccagtgagactaagccggagaagaaagggttagatccgaagtggccagatttagcagactggatcgacagggcaggaagggacattgagagaatgattaaagatgatatgttggaagagctggcccttgagctactgttcagttaggttagggttccacggccgtagtaggttttattacagcagtacagatcccttgttttcttatctgggttttttagtcagttatacttgttagtagtagggttccatggccgtagtaggttttatgggatgtctgtaggaaaattcttttctgcctcggaaaggagtggggtttgtaagaatagaagtctttcctgtcgagttttgtcggctgtgagagttaaagtctgtaaatgagggcaaattgtagtccccggggcatttgtatttggattggactgttcttgaaaggaagaataagcggcatgttctttttgtctg

SEQ ID NO: 47330 - DNA, 2441 bp, Zea Mays
gccaccaccacgaagcaaagcagccaaggcgagtcaccctgcccggctctccatcctccaggtccagggctccagcctccactctccaggccacgggggcgggcgcggggcgagtcgagtccactgtggcaggggtacacgggcctgaaaaggcggctgcggcggcgccaccaaaccgctgccgcgcgagcgccgccaccgaacgcgccccgccggccgggcctcccctctcgcccgcccgccccaggcgtcgcgatcgcccccgcgggcgctcgctcctcaaataggccgcgagggatcacggcccgagcggcgtcgggggaggttcgtcgggttgacttgggcttggatgggcgggaccagcgcgagcggccggcggaggtgggcgcggcggtcctgccggacgggaggacaagccggtggggttgtcaggcggacgatcgcggcgccaactgctccgagggtaaccgaagggtttgctcatgtggacaagcaacggcgtgttcatggagcattatcagatttcagatgcaacagtggatcaacagttcatctttctttggatatcgaggaattcaagcataagggctcccacaaatcttctgttagatgtcttcctagttcacagagaaatgtaacagaaattagtcacatgcaacctgttgcgaggggacttcaagtagataagagcttcagtgataaagggttgtgtcatgcgagcagaactgtttcaggaatgcccattcgacctaagtattatctcagcagtcccaacaacaatttgaagagtcctcccactgtaaagagttgtagtcagatgagtgatttcagttatcgactggtcagaagtgctaaaaggtcagcttctccaggaatgggtttaaccagcacaaactactccctttatgagaaaatgtctttgctacgtcaacgaaggcatggtgataatcatcagaaccaaaaccgtatcaatgccttgaatcgacgacacaaaatcatgaatcctaggggagcagctgatctgctaagtaaagataaggttcatgaacaccttaattcctcattggaaagacattcacaggctttgttaaataatgcattgattagagaaaagcaactgtgctgttcagatatactcaatcaaaaagcacctgaacagatatggagctccgtttccagtgaatctgagaagatattatgcttttcctctggtgacagcattgatgatctgcaaggatcgtattcaagtgaaactagtgatagctccaacttatcatctctgggtgcagtagctggtgatgaatggaatacagccttcaagaaggtatactaccctcagactgcatgcatggactctacatctgtcatgtacactaaagaagtaggtcaggctagcccaatatctgttcttaagcctctatctgaagattgctctgattctgaaaacatcaggcgagagcctgcagatccatatgctgagactggagcttggcacatttgcaccaacagaaactgctgcggaggcaagtagcattggcagaactagtgactgtttatcctctgaagtgcagccgagcgacgacaaacccatacagcttgttgaagacattctcgaagaactggaagacgatgaggaaagggagttctcttacttgctggacatactgattgcttctggaatccatggaactgtggaggatcaaatgtacaaggtgtgccagtctaccgagtaccctgctagcgacgatgtgttcgagaaggtggaaaagaagtacaccaaagttgtccagtggtcaagatcagacaggaagcttttattcgacatggtgaacacgatactgtcacagatcctcgccccatgcttgaacatgcgaccttgggtcaacactaccaggaacttggctccgctttggggcgcagagggtctcctagagaaagtcttgcaggtgctaactcagagacgggaacaactcgcgcccagtgagactaagccggagaagaaagggttagatccgaagtggccagatttagcagactggatcgacagggcaggaagggacattgagagaatgattaaagatgatatgttggaagagctggcccttgagctactgttcagttaggttagggttccacggccgtagtaggttttattacagcagtacagatcccttgttttcttatctgggttttttagtcagttatacttgttagtagtagggttccatggccgtagtaggttttatgggatgtctgtaggaaaattcttttctgcctcggaaaggagtggggtttgtaagaatagaagtctttcctgtcgagttttgtcggctgtgagagttaaagtctgtaaatgagggcaaattgtagtccccggggcatttgtatttggattggactgttcttgaaaggaagaataagcggcatgttctttttgtctg

SEQ ID NO: 47331 - DNA, 2345 bp, Zea Mays
gccaccaccacgaagcaaagcagccaaggcgagtcaccctgcccggctctccatcctccaggtccagggctccagcctccactctccaggccacgggggcgggcgcggggcgagtcgagtccactgtggcaggggtacacgggcctgaaaaggcggctgcggcggcgccaccaaaccgctgccgcgcgagcgccgccaccgaacgcgccccgccggccgggcctcccctctcgcccgcccgccccaggcgtcgcgatcgcccccgcgggcgctcgctcctcaaataggccgcgagggatcacggcccgagcggcgtcgggggaggttcgtcgggttgacttgggcttggatgggcgggaccagcgcgagcggccggcggaggtgggcgcggcggtcctgccggacgggaggacaagccggtggggttgtcaggcggacgatcgcggcgccaactgctccgagggtaaccgaagggtttgctcatgtggacaagcaacggcgtgttcatggagcattatcagatttcagatgcaacagtggatcaacagttcatctttctttggatatcgaggaattcaagcataagggctcccacaaatcttctgttagatgtcttcctagttcacagagaaatgtaacagaaattagtcacatgcaacctgttgcgaggggacttcaagtagataagagcttcagtgataaagggttgtgtcatgcgagcagaactgtttcaggaatgcccattcgacctaagtattatctcagcagtcccaacaacaatttgaagagtcctcccactgtaaagagttgtagtcagatgagtgatttcagttatcgactggtcagaagtgctaaaaggtcagcttctccaggaatgggtttaaccagcacaaactactccctttatgagaaaatgtctttgctacgtcaacgaaggcatggtgataatcatcagaaccaaaaccgtatcaatgccttgaatcgacgacacaaaatcatgaatcctaggggagcagctgatctgctaagtaaagataaggttcatgaacaccttaattcctcattggaaagacattcacaggctttgttaaataatgcattgattagagaaaagcaactgtgctgttcagatatactcaatcaaaaagcacctgaacagatatggagctccgtttccagtgaatctgagaagatattatgcttttcctctggtgacagcattgatgatctgcaaggatcgtattcaagtgaaactagtgatagctccaacttatcatctctgggtgcagtagctggtgatgaatggaatacagccttcaagaaggtatactaccctcagactgcatgcatggactctacatctgtcatgtacactaaagaagtaggtcaggctagcccaatatctgttcttaagcctctatctgaagattgctctgattctgaaaacatcaggcgagagcctgcagatccatatgccgagcgacgacaaacccatacagcttgttgaagacattctcgaagaactggaagacgatgaggaaagggagttctcttacttgctggacatactgattgcttctggaatccatggaactgtggaggatcaaatgtacaaggtgtgccagtctaccgagtaccctgctagcgacgatgtgttcgagaaggtggaaaagaagtacaccaaagttgtccagtggtcaagatcagacaggaagcttttattcgacatggtgaacacgatactgtcacagatcctcgccccatgcttgaacatgcgaccttgggtcaacactaccaggaacttggctccgctttggggcgcagagggtctcctagagaaagtcttgcaggtgctaactcagagacgggaacaactcgcgcccagtgagactaagccggagaagaaagggttagatccgaagtggccagatttagcagactggatcgacagggcaggaagggacattgagagaatgattaaagatgatatgttggaagagctggcccttgagctactgttcagttaggttagggttccacggccgtagtaggttttattacagcagtacagatcccttgttttcttatctgggttttttagtcagttatacttgttagtagtagggttccatggccgtagtaggttttatgggatgtctgtaggaaaattcttttctgcctcggaaaggagtggggtttgtaagaatagaagtctttcctgtcgagttttgtcggctgtgagagttaaagtctgtaaatgagggcaaattgtagtccccggggcatttgtatttggattggactgttcttgaaaggaagaataagcggcatgttctttttgtctg

SEQ ID NO: 47332 - DNA, 583 bp, Zea Mays
aacaaggccgtagcccgcagcttcgtctgttacgctacgtccggttccccaccgcgccgtgtgaaaaaaatggctgtgccggaggtggtggtggacggcgtcgtcttcccgccggcggcccgcccgccgggctccgcgggctcgcatttcctcggcggcgcaggcgtgcgtggcctcgagatcggaggcaacttcgtcaagttcacggccatcggcgtgtacctggaggacgcggccgtgccggcgctggcgaggaagtgggccggcaagacggccggcgagctcgcgtccgacgccgccttcttccgcgacgtcgtcacgggcggcttcgagaagtttcgcgcggggtgacgatgatccgcccgctcacgggcgagcagtacgcggggaaagtggcggagaactgcgtggcgtactggaaggcggccggcctgtacacggacgccgagggcgtcgccgtggagaagttcaagcaggtgttcaagccccatacgttcccgccgggagcctccatccacttcacgcactcgcccgccggagtcctcacctactcacgctgctgttctgctccgatccgctccat

SEQ ID NO: 47333 - DNA, 892 bp, Zea Mays
tgcgttgcgtccccggtccagtccaggcgtgcgtggcctcgagatcggaggcaacttcgtcaagttcacggccatcggcgtgtacctggaggacgcggccgtgccggcgctggcgaggaagtgggccggcaagacggccggcgagctcgcgtccgacgccgccttcttccgcgacgtcgtcacgggcggcttcgagaagtttcgcgcggggtgacgatgatccgcccgctcacgggcgagcagtacgcggggaaagtggcggagaactgcgtggcgtactggaaggcggccggcctgtacacggacgccgagggcgtcgccgtggagaagttcaagcaggtgttcaagccccatacgttcccgccgggagcctccatccacttcacgcactcgcccgccggagtcctcaccgtcgccttctccagggactcgtcggtgccggttgccggcggcgtggcgatcgacaacaagcttctctgcgaggccgtgctggagtccatcatcggggagcacggcgtgtcgccggccgcgaagctgagcctcgcggcgagggtgtcggagctcctgaccaaagggaccgccgcagccgcagccgcgctgcgggcggagcccgtctcggttaccgcctgagcggtccagcgaaccgcgaggagaaagagaaccgatcaagcaatcacgtctgccgcccttgcgtgctcctgctccgaacagatgccacgacggacggtgacgctgtcgcgtctgtttgcgctgtggcgttggcgtcgtgtctctgcctttctggccgcatgtgttcgctgtggtaacatttgaataaaagaaaacgcagatttgtttgcactgcaccccctaattccccagcgtgtgtggatcaatgtttgactcaaccacg

SEQ ID NO: 47334 - DNA, 1860 bp, Zea Mays
ctacatcaacgttaactacaatacgtacaatattaaatacagacgtctcaattaaccatatatacagcaatgtggcagaaatgatacatcagcctacattccagacgtctcactgccatgtaaatcagagtggcgctcttatatataaaaaggcagtattccccccatagtccattcaactccaccgcgaccatttaagcaacacagcagcggcatctcagctctgttcccagctagttagccgcggcgccatggctcctctgctgttcagggacatgaaggggctctcgtgctcgtcccaggcgtccacggcgacatgcccgagcctggagcggcacccggcgccccgcccacacaaggccagcgccggcgccagccccctggctcccgttcctgctgccgagcccaggaccaggacgcaccggcttgacggcaagaaaggacagcagccgcagcacaaggctgccgtcgtccccgcgaacgccggtggtggcctcgtcagccccgccggctcgtccaggtacctgctgctgagcggccgcttcgccgccgtcgccgaggagatccaggaggtgctggagcctgccccggccgtcgacgccatcgccaagcgggaggaagctagtgacgctgctgatgccaagaccgcgcaggcgcaggagcaggtgagagcgaacagtcctccacttacctagcaattaatctagcatgcgctactttacttgtgcgcttcttccttctttttaaacacttggccctactcttgttgattagaccaaaaaaaaaaaacgatagaaaaccacaagtgagattatgtgatcagtagcagccatcatattcataccagtgttcgtgtagggggctcccagggtttatatatacagtacaatgttttctcgtctgatatcttgagctcccaggcgaagtactgaagttagttttgatccaaataccatgattacatgcggatatataggtttcttgtaaaagtttggttaaagattctgtagtgcaaactgcaaacgcctgttcatataaaatttgtcaaactccaagacgaagccagcaattgctatattcgctgacgaaagcaagcgtacatgtgtttccattgagctgagctccagcgccgtctgcattggcatctcttttaccaggtggtggttgtgctcaaggtatccctgcactgcaaagcgtgcgccgggaaagtgaagaagcacctctccaagatggaaggtgagcccctggctggcactggcagctgctgaaacttctgttcagagtcattaaaaacttaaacgacaagaggaccacgactaattaacccttttcctggttctgtttctgttctaacccttctcctgcgcaggcgtgacgtcgttcaacatcgatttcgcggcgaagaaggtgacggtggtcggcgacgtgacgccgctgggcgtgctcagcagcgtgtccaaggtgaagaacgcccagctctgggcggcgccaccggcgatagccgccgcctgaatgaagggagccgtatcccggttggccgtgggccgtggctgctgctagggatagggagtcgtcgaccagcatgcgtccaccgtgtcccggctggcagctggcacttgaatgcagcagctttggttctttcctgtgcggtcgtctcgtgagttgttgtggccctctctcctctcttgtttcgctgtggttggcgccatgcgaggtgaatgcgatctcttgcctggtgctgctccagtgcttccatctgcttctgctgtggatgggtcactctgctttctcctctgtgatgtaagactgtaattaacataagaatgggatttcattgctaaagaaaaaaaagcaaataaa

SEQ ID NO: 47335 - DNA, 996 bp, Zea Mays
ccccccatagtccattcaactccaccgcgaccatttaagcaacacagcagcggcatctcagctctgttcccagctagttagccgcggcgccatggctcctctgctgttcagggacatgaaggggctctcgtgctcgtcccaggcgtccacggcgacatgcccgagcctggagcggcacccggcgccccgcccacacaaggccagcgccggcgccagccccctggctcccgttcctgctgccgagcccaggaccaggacgcaccggcttgacggcaagaaaggacagcagccgcagcacaaggctgccgtcgtccccgcgaacgccggtggtggcctcgtcagccccgccggctcgtccaggtacctgctgctgagcggccgcttcgccgccgtcgccgaggagatccaggaggtgctggagcctgccccggccgtcgacgccatcgccaagcgggaggaagctagtgacgctgctgatgccaagaccgcgcaggcgcaggagcaggcgtgacgtcgttcaacatcgatttcgcggcgaagaaggtgacggtggtcggcgacgtgacgccgctgggcgtgctcagcagcgtgtccaaggtgaagaacgcccagctctgggcggcgccaccggcgatagccgccgcctgaatgaagggagccgtatcccggttggccgtgggccgtggctgctgctagggatagggagtcgtcgaccagcatgcgtccaccgtgtcccggctggcagctggcacttgaatgcagcagctttggttctttcctgtgcggtcgtctcgtgagttgttgtggccctctctcctctcttgtttcgctgtggttggcgccatgcgaggtgaatgcgatctcttgcctggtgctgctccagtgcttccatctgcttctgctgtggatgggtcactctgctttctcctctgtgatgtaagactgtaattaacataagaatgggatttcattgctaaagaaaaaaaagcaaataaa

SEQ ID NO: 47336 - DNA, 3546 bp, Zea Mays
cagccgcgcgaccgcgtgaacactgaacagccccccggtcgctcctcctccctctaccctccagctccagccgccagccgccagccgcccacgcccggagcaccgccgcaacccgcagcgccgctcgcccggaggccggagcaccgccgctctccccgcacggagcaccgccgcgaccacgccgctgtccatccgccgctccgcgctccctccttcgaccttcgccttggttccgacgcggtgaccgtgcgctaaacccttcgaccttcgcccggaggcgggagcgcggcggaccggagtccggagcaaccgtgagacgagcaggggcggccggcgggcgcggatatttgggcgcaacaactttctgcccttccatttctccaactaagaaggaataggatgccaagagagtttctgcaaccccaatgaagatggcaccagctccgcctccggaggggactgcaattctgctaattcgtggagctcagagttctatcttaacggtgctgctagttatgcttgggtgttagtgctatggctactcattaccaagctgctaccttgattgcctctccgtcttacccaaatgccattgcttggtcaagtgacaatctcgtggctgtcgcatctggtcatattgtaactattctgaacccagctgcgcttgatggaccccgtggattggttggacttcgtcacagtgacccttttcctataggagtggttaagagagaagatctcttggagccatgtttattgcccacttccttagcgcgtgaaactgaaccatgtgcccgatcgatttcatggtctcaacaaggatttgcacctaactatgggtgtttgctggctgtttgcactgtgaatgatcatgtgaagctttaccgatcaccaatttgggagttatgtgatgaatgggtagaggtcgcagatatatcacagttgctgtttaactattataaaattataaacttcggagaggataatggttctcatttgacttcttcgaagaatacaaattctggggaggcagaagttttaggatctacttgtcgatcggaagaatctctttatttcaggggtcctggacagagaaaaataaagccagcaagagttggtggttttatttatgacggcaatgaagttgatttagatgcttcaaaggatgcagacttctcgatggaaccatgctcaaaatcaaagaagaaatctttgaaaaagactgtaaaacccagggatgaagtggttgctgtaaatggacgaaacagcacagggaatgttaaagcatcattgtcctccaatgaacaaaacaaatctcttcctcttatcacggcaaaacaccagaatattacacaatagatgctggtgtggttaccagtgatccgatgctcatcggggttttgcatgctcatgaatcatgggtcaatgccataacttggcaagttctttctgcgggctcttcaaaatcctcgttgcttttagctactggatgctcagatggaagtgttaagatatggttagggaatattgaagggttaaatcaatgtgcaattggagaagaagtgccatttgtgttagttgctgaggttgccgctaatttatcagctccagtgtcgtcaatctcattgggcatacctgcccggtctcaacatgaggttagtttggcaattggaagagtatccgggttactagaaatatggatatggaatgcatctaccaacaaaattgagagttccagtgcatggcatgcacatgatcaagtggtttacgatgggctatcgatggcaattgtttattcagctgcagtcaggacaattctacacgttgttggatatctcacgaaaaccaccttgaagaattttttttgcattcagaattttcagagctaagggagtcagaagatctatcaaaagtttctgatcgatgctatggtcttacgctatcacctggagaagagataattgctgtggtccgcagtttggatctgaaccttttgaaccagatgtatcaagtcaggacacaaaaggcggtggtcgagttcatttggatcggtggccaatttgttggtattccactggacgggagtatcgatatttgcagtccgcagtctgcggacttatcctcaagtaaccttatgtggtggggatccaacatcttgtggtcgctgaagaaatacgaaaatgtcgaaaagaggcttgtgttgtgggacgttgtagctgcgctgcaagagctgaagaaaaccgcgcccgcctttctggagactctagtgcacagttgggcctcagctttatttgcgggcgactcacagtgtgtttctatcactgcccagtcatcacgctcgatgcatgacatgatgccccatgtcagctcgcggaagctgcacttactgaacataatctgcagaaaagtgatgctcggcaatcatgcgcggcatggtcctggtgctggaaacaacagtaatgatggaacaactgatttctggagcactcttttggtagcgagtgaaacggagctgcgagagaggctggtgggtttcacctttgccgcggtcgtgaaacggacagcgtgtctgttcaacggcacctccaccgcaaattgctggttccctgtcggcgtcgcccagatggattcttgggtatccatgaactacgaaaaggtgcacggtcagctgcagtcgatcagatcgaagatcaaagagctaggaagcaggatcgacggatactccgacgtagaaagctgcccctactgctcttcgccggtccgtttcgagtcgcctgacgtggccatctgcggagaaaggcacacgctgtcgcggtgcaggacatccatgaccctgtgctccgtcgcgcagccagtgtggcactgctcgtgctgcgggggcacggtcgacaagctgctgccggagtcgttcttcaccatgcctttggacgccgtccgtgacgacaaaggatcgctcgatctgtcggcagcctccgccccgctttgccccttctgcggcgtcctgctgcagaggtcgatgccggcgttcctgctctccacctcgccggtatagtcttcggatgcccccaggtgttacatgcagtagcaatgcaatgggaatatcgtagtggagccaactaccaagtttgttgtagctgatgctgtatggctgcagagtggcagtgccgtcattggggctcgaaatgtttgtgataggttttgtgacttctttctgcttagcccctctaatatatctcgagatacctattttttatttaccgtaccctgcctctggaccaaagcctatgtggcggtggccgccaggctgagtgcggggcgaggggcttgggccagctcctgcactcagcctgatgaccatgtccgctggtgctgtgcccgctgggggtgggcgccgttctgtgtctcctgtgggtgtgggctgtggcatcgacgtgaccgagagcatctcgtgcaacgctagtcgaggcctcctctgatggctccatgacatgcgcctcatcaccggtaagccctgagcctgcgccatgtgtgtggcgcttaaagatc

SEQ ID NO: 47337 - DNA, 2345 bp, Zea Mays
ctgaacagccccccggtcgctcctcctccctctaccctccagctccagccgccagccgccagccgcccacgcccggagcaccgccgcaacccgcagcgccgctcgcccggaggccggagcaccgccgctctccccgcacggagcaccgccgcgaccacgccgctgtccatccgccgctccgcgctccctccttcgaccttcgccttggttccgacgcggtgaccgtgcgctaaacccttcgaccttcgcccggaggcgggagcgcggcggaccggagtccggagcaaccgtgagacgagcaggggcggccggcgggcgcggatatttgggcgcaacaactttctgcccttccatttctccaactaagaaggaataggatgccaagagagtttctgcaaccccaatgaagatggcaccagctccgcctccggaggggactgcaattctgctaattcgtggagctcagagttctatcttaacggtgctgctagttatgcttgggtgttagtgctatggctactcattaccaagctgctaccttgattgcctctccgtcttacccaaatgccattgcttggtcaagtgacaatctcgtggctgtcgcatctggtcatattgtaactattctgaacccagctgcgcttgatggaccccgtggattggttggacttcgtcacagtgacccttttcctataggagtggttaagagagaagatctcttggagccatgtttattgcccacttccttagcgcgtgaaactgaaccatgtgcccgatcgatttcatggtctcaacaaggatttgcacctaactatgggtatacatacctttgacattctaaatgatcttctctaggtgtgtttgctggctgtttgcactgtgaatgatcatgtgaagctttaccgatcaccaatttgggagttatgtgatgaatgggtagaggtcgcagatatatcacagttgctgtttaactattataaaattataaacttcggagaggataatggttctcatttgacttcttcgaagaatacaaattctggggaggcagaagttttaggatctacttgtcgatcggaagaatctctttatttcaggggtcctggacagagaaaaataaagccagcaagagttggtggttttatttatgacggcaatgaagttgatttagatgcttcaaaggatgcagacttctcgatggaaccatgctcaaaatcaaagaagaaatctttgaaaaagactgtaaaacccagggatgaagtggttgctgtaaatggacgaaacagcacagggaatgttaaagcatcattgtcctccaatgaacaaaacaaatctcttcctcttatcacggcaaaacagtatgcctgtcgtgctgcacatttgtcttcccttgtagtttcatggtctccagttgtgtcattaagtgatagaacttcttgtttattgaggcattggtgcattcttgctgttggctctaaatctggaaatatttctttttggaaactatataagccagaatattacacaatagatgctggtgtggttaccagtgatccgatgctcatcggggttttgcatgctcatgaatcatgggtcaatgccataacttggcaagttctttctgcgggctcttcaaaatcctcgttgcttttagctactggatgctcagatggaagtgttaagatatggttagggaatattgaagggttaaatcaatgtgcaattggagaagaagtgccatttgtgttagttgctgaggttgccgctaatttatcagctccagtgtcgtcaatctcattgggcatacctgcccggtctcaacatgaggttagtttggcaattggaagagtatccgggttactagaaatatggatatggaatgcatctaccaacaaaattgagagttccagtgcatggcatgcacatgatcaagtggtttacgatgggctatcgatggcaattgtttattcagctgcagtcaggccaccagggtaatgggtgtattgagcccttcttcagacaattgttcttgacattaacgttgtttccaatacaccttccaatgctctgtacattgtgagaatgaaaatgaaaaacgtagtgttaaaaatttggtatgatgctatgtgaagcaagcagtattctaggtgcgccaagagggtgaacgcttcaatggcagcatgaggcagcaggaacgtgtggtgagcgtgccttggttataatatatatcaggttgttagtcttcacttcagactttcattttcttaggctataggcagcagactgcgcatatcaccgtgcaaaacactgttttatattgtactactatagactgcactgtttac

SEQ ID NO: 47338 - DNA, 3757 bp, Zea Mays
ctgaacagccccccggtcgctcctcctccctctaccctccagctccagccgccagccgccagccgcccacgcccggagcaccgccgcaacccgcagcgccgctcgcccggaggccggagcaccgccgctctccccgcacggagcaccgccgcgaccacgccgctgtccatccgccgctccgcgctccctccttcgaccttcgccttggttccgacgcggtgaccgtgcgctaaacccttcgaccttcgcccggaggcgggagcgcggcggaccggagtccggagcaaccgtgagacgagcaggggcggccggcgggcgcggatatttgggcgcaacaactttctgcccttccatttctccaactaagaaggaataggatgccaagagagtttctgcaaccccaatgaagatggcaccagctccgcctccggaggggactgcaattctgctaattcgtggagctcagagttctatcttaacggtgctgctagttatgcttgggtgttagtgctatggctactcattaccaagctgctaccttgattgcctctccgtcttacccaaatgccattgcttggtcaagtgacaatctcgtggctgtcgcatctggtcatattgtaactattctgaacccagctgcgcttgatggaccccgtggattggttggacttcgtcacagtgacccttttcctataggagtggttaagagagaagatctcttggagccatgtttattgcccacttccttagcgcgtgaaactgaaccatgtgcccgatcgatttcatggtctcaacaaggatttgcacctaactatgggtgtttgctggctgtttgcactgtgaatgatcatgtgaagctttaccgatcaccaatttgggagttatgtgatgaatgggtagagatatatcacagttgctgtttaactattataaaattataaacttcggagaggataatggttctcatttgacttcttcgaagaatacaaattctggggaggcagaagttttaggatctacttgtcgatcggaagaatctctttatttcaggggtcctggacagagaaaaataaagccagcaagagttggtggttttatttatgacggcaatgaagttgatttagatgcttcaaaggatgcagacttctcgatggaaccatgctcaaaatcaaagaagaaatctttgaaaaagactgtaaaacccagggatgaagtggttgctgtaaatggacgaaacagcacagggaatgttaaagcatcattgtcctccaatgaacaaaacaaatctcttcctcttatcacggcaaaacagtatgcctgtcgtgctgcacatttgtcttcccttgtagtttcatggtctccagttgtgtcattaagtgatagaacttcttgtttattgaggcattggtgcattcttgctgttggctctaaatctggaaatatttctttttggaaactatataagccagaatattacacaatagatgctggtgtggttaccagtgatccgatgctcatcggggttttgcatgctcatgaatcatgggtcaatgccataacttggcaagttctttctgcgggctcttcaaaatcctcgttgcttttagctactggatgctcagatggaagtgttaagatatggttagggaatattgaagggttaaatcaatgtgcaattggagaagaagtgccatttgtgttagttgctgaggttgccgctaatttatcagctccagtgtcgtcaatctcattgggcatacctgcccggtctcaacatgaggttagtttggcaattggaagagtatccgggttactagaaatatggatatggaatgcatctaccaacaaaattgagagttccagtgcatggcatgcacatgatcaagtggtttacgatgggctatcgatggcaattgtttattcagctgcagtcaggacaattctacacgttgttggatatctcacgaaaaccaccttgaagaattttttttgcattcagaattttcagagctaagggagtcagaagatgtaagagtagtagacacttaaatgttagttattcttgatgtccaattattttcctccatatggttgggttttcaatatgcatgcagctatcaaaagtttctgatcgatgctatggtcttacgctatcacctggagaagagataattgctgtggtccgcagtttggatctgaaccttttgaaccagatgtatcaagtcaggacacaaaaggcggtggtcgagttcatttggatcggtggccaatttgttggtattccactggacgggagtatcgatatttgcagtccgcagtctgcggacttatcctcaagtaaccttatgtggtggggatccaacatcttgtggtcgctgaagaaatacgaaaatgtcgaaaagaggcttgtgttgtgggacgttgtagctgcgctgcaagagctgaagaaaaccgcgcccgcctttctggagactctagtgcacagttgggcctcagctttatttgcgggcgactcacagtgtgtttctatcactgcccagtcatcacgctcgatgcatgacatgatgccccatgtcagctcgcggaagctgcacttactgaacataatctgcagaaaagtgatgctcggcaatcatgcgcggcatggtcctggtgctggaaacaacagtaatgatggaacaactgatttctggagcactcttttggtagcgagtgaaacggagctgcgagagaggctggtgggtttcacctttgccgcggtcgtgaaacggacagcgtgtctgttcaacggcacctccaccgcaaattgctggttccctgtcggcgtcgcccagatggattcttgggtatccatgaactacgaaaaggtgcacggtcagctgcagtcgatcagatcgaagatcaaagagctaggaagcaggatcgacggatactccgacgtagaaagctgcccctactgctcttcgccggtccgtttcgagtcgcctgacgtggccatctgcggagaaaggcacacgctgtcgcggtgcaggacatccatgaccctgtgctccgtcgcgcagccagtgtggcactgctcgtgctgcgggggcacggtcgacaagctgctgccggagtcgttcttcaccatgcctttggacgccgtccgtgacgacaaaggatcgctcgatctgtcggcagcctccgccccgctttgccccttctgcggcgtcctgctgcagaggtcgatgccggcgttcctgctctccacctcgccggtatagtcttcggatgcccccaggtgttacatgcagtagcaatgcaatgggaatatcgtagtggagccaactaccaagtttgttgtagctgatgctgtatggctgcagagtggcagtgccgtcattggggctcgaaatgtttgtgataggttttgtgacttctttctgcttagcccctctaatatatctcgagatacctattttttatttaccgtaccctgcctctggaccaaagcctatgtggcggtggccgccaggctgagtgcggggcgaggggcttgggccagctcctgcactcagcctgatgaccatgtccgctggtgctgtgcccgctgggggtgggcgccgttctgtgtctcctgtgggtgtgggctgtggcatcgacgtgaccgagagcatctcgtgcaacgctagtcgaggcctcctctgatggctccatgacatgcgcctcatcaccggtaagccctgagcctgcgccatgtgtgtggcgcttaaagatc

SEQ ID NO: 47339 - DNA, 3721 bp, Zea Mays
ctgaacagccccccggtcgctcctcctccctctaccctccagctccagccgccagccgccagccgcccacgcccggagcaccgccgcaacccgcagcgccgctcgcccggaggccggagcaccgccgctctccccgcacggagcaccgccgcgaccacgccgctgtccatccgccgctccgcgctccctccttcgaccttcgccttggttccgacgcggtgaccgtgcgctaaacccttcgaccttcgcccggaggcgggagcgcggcggaccggagtccggagcaaccgtgagacgagcaggggcggccggcgggcgcggatatttgggcgcaacaactttctgcccttccatttctccaactaagaaggaataggatgccaagagagtttctgcaaccccaatgaagatggcaccagctccgcctccggaggggactgcaattctgctaattcgtggagctcaggaataggacgctccgggcgaactgcgaagcagaagcagcgaagagttctatcttaacggtgctgctagttatgcttgggtgttagtgctatggctactcattaccaagctgctaccttgattgcctctccgtcttacccaaatgccattgcttggtcaagtgacaatctcgtggctgtcgcatctggtcatattgtaactattctgaacccagctgcgcttgatggaccccgtggattggttggacttcgtcacagtgacccttttcctataggagtggttaagagagaagatctcttggagccatgtttattgcccacttccttagcgcgtgaaactgaaccatgtgcccgatcgatttcatggtctcaacaaggatttgcacctaactatgggtgtttgctggctgtttgcactgtgaatgatcatgtgaagctttaccgatcaccaatttgggagttatgtgatgaatgggtagaggtcgcagatatatcacagttgctgtttaactattataaaattataaacttcggagaggataatggttctcatttgacttcttcgaagaatacaaattctggggaggcagaagttttaggatctacttgtcgatcggaagaatctctttatttcaggggtcctggacagagaaaaataaagccagcaagagttggtggttttatttatgacggcaatgaagttgatttagatgcttcaaaggatgcagacttctcgatggaaccatgctcaaaatcaaagaagaaatctttgaaaaagactgtaaaacccagggatgaagtggttgctgtaaatggacgaaacagcacagggaatgttaaagcatcattgtcctccaatgaacaaaacaaatctcttcctcttatcacggcaaaacagtatgcctgtcgtgctgcacatttgtcttcccttgtagtttcatggtctccagttgtgtcattaagtgatagaacttcttgtttattgaggcattggtgcattcttgctgttggctctaaatctggaaatatttctttttggaaactatataagccagaatattacacaatagatgctggtgtggttaccagtgatccgatgctcatcggggttttgcatgctcatgaatcatgggtcaatgccataacttggcaagttctttctgcgggctcttcaaaatcctcgttgcttttagctactggatgctcagatggaagtgttaagatatggttagggaatattgaagggttaaatcaatgtgcaattggagaagaagtgccatttgtgttagttgctgaggttgccgctaatttatcagctccagtgtcgtcaatctcattgggcatacctgcccggtctcaacatgaggttagtttggcaattggaagagtatccgggttactagaaatatggatatggaatgcatctaccaacaaaattgagagttccagtgcatggcatgcacatgatcaagtggtttacgatgggctatcgatggcaattgtttattcagctgcagtcaggacaattctacacgttgttggatatctcacgaaaaccaccttgaagaattttttttgcattcagaattttcagagctaagggagtcagaagatctatcaaaagtttctgatcgatgctatggtcttacgctatcacctggagaagagataattgctgtggtccgcagtttggatctgaaccttttgaaccagatgtatcaagtcaggacacaaaaggcggtggtcgagttcatttggatcggtggccaatttgttggtattccactggacgggagtatcgatatttgcagtccgcagtctgcggacttatcctcaagtaaccttatgtggtggggatccaacatcttgtggtcgctgaagaaatacgaaaatgtcgaaaagaggcttgtgttgtgggacgttgtagctgcgctgcaagagctgaagaaaaccgcgcccgcctttctggagactctagtgcacagttgggcctcagctttatttgcgggcgactcacagtgtgtttctatcactgcccagtcatcacgctcgatgcatgacatgatgccccatgtcagctcgcggaagctgcacttactgaacataatctgcagaaaagtgatgctcggcaatcatgcgcggcatggtcctggtgctggaaacaacagtaatgatggaacaactgatttctggagcactcttttggtagcgagtgaaacggagctgcgagagaggctggtgggtttcacctttgccgcggtcgtgaaacggacagcgtgtctgttcaacggcacctccaccgcaaattgctggttccctgtcggcgtcgcccagatggattcttgggtatccatgaactacgaaaaggtgcacggtcagctgcagtcgatcagatcgaagatcaaagagctaggaagcaggatcgacggatactccgacgtagaaagctgcccctactgctcttcgccggtccgtttcgagtcgcctgacgtggccatctgcggagaaaggcacacgctgtcgcggtgcaggacatccatgaccctgtgctccgtcgcgcagccagtgtggcactgctcgtgctgcgggggcacggtcgacaagctgctgccggagtcgttcttcaccatgcctttggacgccgtccgtgacgacaaaggatcgctcgatctgtcggcagcctccgccccgctttgccccttctgcggcgtcctgctgcagaggtcgatgccggcgttcctgctctccacctcgccggtatagtcttcggatgcccccaggtgttacatgcagtagcaatgcaatgggaatatcgtagtggagccaactaccaagtttgttgtagctgatgctgtatggctgcagagtggcagtgccgtcattggggctcgaaatgtttgtgataggttttgtgacttctttctgcttagcccctctaatatatctcgagatacctattttttatttaccgtaccctgcctctggaccaaagcctatgtggcggtggccgccaggctgagtgcggggcgaggggcttgggccagctcctgcactcagcctgatgaccatgtccgctggtgctgtgcccgctgggggtgggcgccgttctgtgtctcctgtgggtgtgggctgtggcatcgacgtgaccgagagcatctcgtgcaacgctagtcgaggcctcctctgatggctccatgacatgcgcctcatcaccggtaagccctgagcctgcgccatgtgtgtggcgcttaaagatc

SEQ ID NO: 47340 - DNA, 3935 bp, Zea Mays
ctgaacagccccccggtcgctcctcctccctctaccctccagctccagccgccagccgccagccgcccacgcccggagcaccgccgcaacccgcagcgccgctcgcccggaggccggagcaccgccgctctccccgcacggagcaccgccgcgaccacgccgctgtccatccgccgctccgcgctccctccttcgaccttcgccttggttccgacgcggtgaccgtgcgctaaacccttcgaccttcgcccggaggcgggagcgcggcggaccggagtccggagcaaccgtgagacgagcaggggcggccggcgggcgcggatatttgggcgcaacaactttctgcccttccatttctccaactaagaaggaataggatgccaagagagtttctgcaaccccaatgaagatggcaccagctccgcctccggaggggactgcaattctgctaattcgtggagctcagagttctatcttaacggtgctgctagttatgcttgggtgttagtgctatggctactcattaccaagctgctaccttgattgcctctccgtcttacccaaatgccattgcttggtcaagtgacaatctcgtggctgtcgcatctggtcatattgtaactattctgaacccagctgcgcttgatggaccccgtggattggttggacttcgtcacagtgacccttttcctataggagtggttaagagagaagatctcttggagccatgtttattgcccacttccttagcgcgtgaaactgaaccatgtgcccgatcgatttcatggtctcaacaaggatttgcacctaactatgggtgtttgctggctgtttgcactgtgaatgatcatgtgaagctttaccgatcaccaatttgggagttatgtgatgaatgggtagaggtcgcagatatatcacagttgctgtttaactattataaaattataaacttcggagaggataatggttctcatttgacttcttcgaagaatacaaattctggggaggcagaagttttaggatctacttgtcgatcggaagaatctctttatttcaggggtcctggacagagaaaaataaagccagcaagagttggtggttttatttatgacggcaatgaagttgatttagatgcttcaaaggatgcagacttctcgatggaaccatgctcaaaatcaaagaagaaatctttgaaaaagactgtaaaacccagggatgaagtggttgctgtaaatggacgaaacagcacagggaatgttaaagcatcattgtcctccaatgaacaaaacaaatctcttcctcttatcacggcaaaacagtatgcctgtcgtgctgcacatttgtcttcccttgtagtttcatggtctccagttgtgtcattaagtgatagaacttcttgtttattgaggcattggtgcattcttgctgttggctctaaatctggaaatatttctttttggaaactatataagccagaatattacacaatagatgctggtgtggttaccagtgatccgatgctcatcggggttttgcatgctcatgaatcatgggtcaatgccataacttggcaagttctttctgcgggctcttcaaaatcctcgttgcttttagctactggatgctcagatggaagtgttaagatatggttagggaatattgaagggttaaatcaatgtgcaattggagaagaagtgccatttgtgttagttgctgaggttgccgctaatttatcagctccagtgtcgtcaatctcattgggcatacctgcccggtctcaacatgaggttagtttggcaattggaagagtatccgggttactagaaatatggatatggaatgcatctaccaacaaaattgagagttccagtgcatggcatgcacatgatcaagtggtgacaggtttacgatgggctatcgatggcaattgtttattcagctgcagtcaggccaccagggtaatgggtgtattgagcccttcttcagacaattgttcttgacattaacgttgtttccaatacaccttccaatgctctgtacattgtgagaatgaaaatgaaaaacgtagtgttaaaaatttggtatgatgctatgtgaagcaagcagtattctaggtgcgccaagagggtgaacgcttcaatggcagcatgaggcagcaggaacgtgtggtgagcgtgccttggttataatatatatcaggacaattctacacgttgttggatatctcacgaaaaccaccttgaagaattttttttgcattcagaattttcagagctaagggagtcagaagatctatcaaaagtttctgatcgatgctatggtcttacgctatcacctggagaagagataattgctgtggtccgcagtttggatctgaaccttttgaaccagatgtatcaagtcaggacacaaaaggcggtggtcgagttcatttggatcggtggccaatttgttggtattccactggacgggagtatcgatatttgcagtccgcagtctgcggacttatcctcaagtaaccttatgtggtggggatccaacatcttgtggtcgctgaagaaatacgaaaatgtcgaaaagaggcttgtgttgtgggacgttgtagctgcgctgcaagagctgaagaaaaccgcgcccgcctttctggagactctagtgcacagttgggcctcagctttatttgcgggcgactcacagtgtgtttctatcactgcccagtcatcacgctcgatgcatgacatgatgccccatgtcagctcgcggaagctgcacttactgaacataatctgcagaaaagtgatgctcggcaatcatgcgcggcatggtcctggtgctggaaacaacagtaatgatggaacaactgatttctggagcactcttttggtagcgagtgaaacggagctgcgagagaggctggtgggtttcacctttgccgcggtcgtgaaacggacagcgtgtctgttcaacggcacctccaccgcaaattgctggttccctgtcggcgtcgcccagatggattcttgggtatccatgaactacgaaaaggtgcacggtcagctgcagtcgatcagatcgaagatcaaagagctaggaagcaggatcgacggatactccgacgtagaaagctgcccctactgctcttcgccggtccgtttcgagtcgcctgacgtggccatctgcggagaaaggcacacgctgtcgcggtgcaggacatccatgaccctgtgctccgtcgcgcagccagtgtggcactgctcgtgctgcgggggcacggtcgacaagctgctgccggagtcgttcttcaccatgcctttggacgccgtccgtgacgacaaaggatcgctcgatctgtcggcagcctccgccccgctttgccccttctgcggcgtcctgctgcagaggtcgatgccggcgttcctgctctccacctcgccggtatagtcttcggatgcccccaggtgttacatgcagtagcaatgcaatgggaatatcgtagtggagccaactaccaagtttgttgtagctgatgctgtatggctgcagagtggcagtgccgtcattggggctcgaaatgtttgtgataggttttgtgacttctttctgcttagcccctctaatatatctcgagatacctattttttatttaccgtaccctgcctctggaccaaagcctatgtggcggtggccgccaggctgagtgcggggcgaggggcttgggccagctcctgcactcagcctgatgaccatgtccgctggtgctgtgcccgctgggggtgggcgccgttctgtgtctcctgtgggtgtgggctgtggcatcgacgtgaccgagagcatctcgtgcaacgctagtcgaggcctcctctgatggctccatgacatgcgcctcatcaccggtaagccctgagcctgcgccatgtgtgtggcgcttaaagatc

SEQ ID NO: 47341 - DNA, 3728 bp, Zea Mays
ctgaacagccccccggtcgctcctcctccctctaccctccagctccagccgccagccgccagccgcccacgcccggagcaccgccgcaacccgcagcgccgctcgcccggaggccggagcaccgccgctctccccgcacggagcaccgccgcgaccacgccgctgtccatccgccgctccgcgctccctccttcgaccttcgccttggttccgacgcggtgaccgtgcgctaaacccttcgaccttcgcccggaggcgggagcgcggcggaccggagtccggagcaaccgtgagacgagcaggggcggccggcgggcgcggatatttgggcgcaacaactttctgcccttccatttctccaactaagaaggaataggatgccaagagagtttctgcaaccccaatgaagatggcaccagctccgcctccggaggggactgcaattctgctaattcgtggagctcaggaataggacgctccgggcgaactgcgaagcagaagcagcgaagagttctatcttaacggtgctgctagttatgcttgggtgttagtgctatggctactcattaccaagctgctaccttgattgcctctccgtcttacccaaatgccattgcttggtcaagtgacaatctcgtggctgtcgcatctggtcatattgtaactattctgaacccagctgcgcttgatggaccccgtggattggttggacttcgtcacagtgacccttttcctataggagtggttaagagagaagatctcttggagccatgtttattgcccacttccttagcgcgtgaaactgaaccatgtgcccgatcgatttcatggtctcaacaaggatttgcacctaactatgggtgtttgctggctgtttgcactgtgaatgatcatgtgaagctttaccgatcaccaatttgggagttatgtgatgaatgggtagaggtcgcagatatatcacagttgctgtttaactattataaaattataaacttcggagaggataatggttctcatttgacttcttcgaagaatacaaattctggggaggcagaagttttaggatctacttgtcgatcggaagaatctctttatttcaggggtcctggacagagaaaaataaagccagcaagagttggtggttttatttatgacggcaatgaagttgatttagatgcttcaaaggatgcagacttctcgatggaaccatgctcaaaatcaaagaagaaatctttgaaaaagactgtaaaacccagggatgaagtggttgctgtaaatggacgaaacagcacagggaatgttaaagcatcattgtcctccaatgaacaaaacaaatctcttcctcttatcacggcaaaacagtatgcctgtcgtgctgcacatttgtcttcccttgtagtttcatggtctccagttgtgtcattaagtgatagaacttcttgtttattgaggcattggtgcattcttgctgttggctctaaatctggaaatatttctttttggaaactatataagccagaatattacacaatagatgctggtgtggttaccagtgatccgatgctcatcggggttttgcatgctcatgaatcatgggtcaatgccataacttggcaagttctttctgcgggctcttcaaaatcctcgttgcttttagctactggatgctcagatggaagtgttaagatatggttagggaatattgaagggttaaatcaatgtgcaattggagaagaagtgccatttgtgttagttgctgaggttgccgctaatttatcagctccagtgtcgtcaatctcattgggcatacctgcccggtctcaacatgaggttagtttggcaattggaagagtatccgggttactagaaatatggatatggaatgcatctaccaacaaaattgagagttccagtgcatggcatgcacatgatcaagtggtgacaggtttacgatgggctatcgatggcaattgtttattcagctgcagtcaggacaattctacacgttgttggatatctcacgaaaaccaccttgaagaattttttttgcattcagaattttcagagctaagggagtcagaagatctatcaaaagtttctgatcgatgctatggtcttacgctatcacctggagaagagataattgctgtggtccgcagtttggatctgaaccttttgaaccagatgtatcaagtcaggacacaaaaggcggtggtcgagttcatttggatcggtggccaatttgttggtattccactggacgggagtatcgatatttgcagtccgcagtctgcggacttatcctcaagtaaccttatgtggtggggatccaacatcttgtggtcgctgaagaaatacgaaaatgtcgaaaagaggcttgtgttgtgggacgttgtagctgcgctgcaagagctgaagaaaaccgcgcccgcctttctggagactctagtgcacagttgggcctcagctttatttgcgggcgactcacagtgtgtttctatcactgcccagtcatcacgctcgatgcatgacatgatgccccatgtcagctcgcggaagctgcacttactgaacataatctgcagaaaagtgatgctcggcaatcatgcgcggcatggtcctggtgctggaaacaacagtaatgatggaacaactgatttctggagcactcttttggtagcgagtgaaacggagctgcgagagaggctggtgggtttcacctttgccgcggtcgtgaaacggacagcgtgtctgttcaacggcacctccaccgcaaattgctggttccctgtcggcgtcgcccagatggattcttgggtatccatgaactacgaaaaggtgcacggtcagctgcagtcgatcagatcgaagatcaaagagctaggaagcaggatcgacggatactccgacgtagaaagctgcccctactgctcttcgccggtccgtttcgagtcgcctgacgtggccatctgcggagaaaggcacacgctgtcgcggtgcaggacatccatgaccctgtgctccgtcgcgcagccagtgtggcactgctcgtgctgcgggggcacggtcgacaagctgctgccggagtcgttcttcaccatgcctttggacgccgtccgtgacgacaaaggatcgctcgatctgtcggcagcctccgccccgctttgccccttctgcggcgtcctgctgcagaggtcgatgccggcgttcctgctctccacctcgccggtatagtcttcggatgcccccaggtgttacatgcagtagcaatgcaatgggaatatcgtagtggagccaactaccaagtttgttgtagctgatgctgtatggctgcagagtggcagtgccgtcattggggctcgaaatgtttgtgataggttttgtgacttctttctgcttagcccctctaatatatctcgagatacctattttttatttaccgtaccctgcctctggaccaaagcctatgtggcggtggccgccaggctgagtgcggggcgaggggcttgggccagctcctgcactcagcctgatgaccatgtccgctggtgctgtgcccgctgggggtgggcgccgttctgtgtctcctgtgggtgtgggctgtggcatcgacgtgaccgagagcatctcgtgcaacgctagtcgaggcctcctctgatggctccatgacatgcgcctcatcaccggtaagccctgagcctgcgccatgtgtgtggcgcttaaagatc

SEQ ID NO: 47342 - DNA, 4661 bp, Zea Mays
ctgaacagccccccggtcgctcctcctccctctaccctccagctccagccgccagccgccagccgcccacgcccggagcaccgccgcaacccgcagcgccgctcgcccggaggccggagcaccgccgctctccccgcacggagcaccgccgcgaccacgccgctgtccatccgccgctccgcgctccctccttcgaccttcgccttggttccgacgcggtgaccgtgcgctaaacccttcgaccttcgcccggaggcgggagcgcggcggaccggagtccggagcaaccgtgagacgagcaggggcggccggcgggcgcggatatttgggcgcaacaactttctgcccttccatttctccaactaagaaggaataggatgccaagagagtttctgcaaccccaatgaagatggcaccagctccgcctccggaggggactgcaattctgctaattcgtggagctcaggaataggacgctccgggcgaactgcgaagcagaagcagcgaagagttctatcttaacggtgctgctagttatgcttgggtgttagtgctatggctactcattaccaagctgctaccttgattgcctctccgtcttacccaaatgccattgcttggtcaagtgacaatctcgtggctgtcgcatctggtcatattgtaactattctgaacccagctgcgcttgatggaccccgtggattggttggacttcgtcacagtgacccttttcctataggagtggttaagagagaagatctcttggagccatgtttattgcccacttccttagcgcgtgaaactgaaccatgtgcccgatcgatttcatggtctcaacaaggatttgcacctaactatgggtgtttgctggctgtttgcactgtgaatgatcatgtgaagctttaccgatcaccaatttgggagttatgtgatgaatgggtagaggtcgcagatatatcacagttgctgtttaactattataaaattataaacttcggagaggataatggttctcatttgacttcttcgaagaatacaaattctggggaggcagaagttttaggatctacttgtcgatcggaagaatctctttatttcaggggtcctggacagagaaaaataaagccagcaagagttggtggttttatttatgacggcaatgaagttgatttagatgcttcaaaggatgcagacttctcgatggaaccatgctcaaaatcaaagaagaaatctttgaaaaagactgtaaaacccagggatgaagtggttgctgtaaatggacgaaacagcacagggaatgttaaagcatcattgtcctccaatgaacaaaacaaatctcttcctcttatcacggcaaaacagtatgcctgtcgtgctgcacatttgtcttcccttgtagtttcatggtctccagttgtgtcattaagtgatagaacttcttgtttattgaggcattggtgcattcttgctgttggctctaaatctggaaatatttctttttggaaactatataagccagaatattacacaatagatgctggtgtggttaccagtgatccgatgctcatcggggttttgcatgctcatgaatcatgggtcaatgccataacttggcaagttctttctgcgggctcttcaaaatcctcgttgcttttagctactggatgctcagatggaaggtaaccattttatgcatattgtctgtaaatggtgatgtgcttttttcagctgcactatgtattgtttcttgtttgcttacgtgaattttgtgagctcttcttgactcatgacatggcaaaagtgatatatggggataatcataagcatagctttgcttctatgttttctggaataaggtccaagtttgtccataagcagcagtgagcagaatgacctgtataggcatgcaatgagcctgtcatacctctgccttaataaataaaaaagaaagcacaccagattgttgggattagggttacggaggtcatacgagtggtaggtttggggtctagggccacgaccccggcgcttgggcgtcgtcgggctgttggtggagaaggcgaggtactgtccacgagatgaacagtagccgcgatgaacactaatgggatatgggaagcacgggcaagataattgcctgcttgctcctttctttaaccaaaggggtacaatatataggctgtcatagcagcccctaacgaactaaccaactctatctacgagtttcaaactaatgcttatgcatctgaacaaactaattgatacttatgcatctaaacaaactaattgatacttatgcatctaaacaaactaagaactaactgatgcttatccatctaaacaaactacctgattttttagggcttttgggcgctgccagtcataacacccccccccccccaaaaaaaaaattataatcacgcaacacattctctgcactagatatctgggtggtggtgaaaatactttacccatgtgccttaaaaagattctcattggtctttttatattttataaactttggttattcctatggttattttttgcctttcaatggttattattagttttctgcagacactgcatatcacatgttgaagatttggtttgtattttcagtgttaagatatggttagggaatattgaagggttaaatcaatgtgcaattggagaagaagtgccatttgtgttagttgctgaggttgccgctaatttatcagctccagtgtcgtcaatctcattgggcatacctgcccggtctcaacatgaggttagtttggcaattggaagagtatccgggttactagaaatatggatatggaatgcatctaccaacaaaattgagagttccagtgcatggcatgcacatgatcaagtggtttacgatgggctatcgatggcaattgtttattcagctgcagtcaggacaattctacacgttgttggatatctcacgaaaaccaccttgaagaattttttttgcattcagaattttcagagctaagggagtcagaagatctatcaaaagtttctgatcgatgctatggtcttacgctatcacctggagaagagataattgctgtggtccgcagtttggatctgaaccttttgaaccagatgtatcaagtcaggacacaaaaggcggtggtcgagttcatttggatcggtggccaatttgttggtattccactggacgggagtatcgatatttgcagtccgcagtctgcggacttatcctcaagtaaccttatgtggtggggatccaacatcttgtggtcgctgaagaaatacgaaaatgtcgaaaagaggcttgtgttgtgggacgttgtagctgcgctgcaagagctgaagaaaaccgcgcccgcctttctggagactctagtgcacagttgggcctcagctttatttgcgggcgactcacagtgtgtttctatcactgcccagtcatcacgctcgatgcatgacatgatgccccatgtcagctcgcggaagctgcacttactgaacataatctgcagaaaagtgatgctcggcaatcatgcgcggcatggtcctggtgctggaaacaacagtaatgatggaacaactgatttctggagcactcttttggtagcgagtgaaacggagctgcgagagaggctggtgggtttcacctttgccgcggtcgtgaaacggacagcgtgtctgttcaacggcacctccaccgcaaattgctggttccctgtcggcgtcgcccagatggattcttgggtatccatgaactacgaaaaggtgcacggtcagctgcagtcgatcagatcgaagatcaaagagctaggaagcaggatcgacggatactccgacgtagaaagctgcccctactgctcttcgccggtccgtttcgagtcgcctgacgtggccatctgcggagaaaggcacacgctgtcgcggtgcaggacatccatgaccctgtgctccgtcgcgcagccagtgtggcactgctcgtgctgcgggggcacggtcgacaagctgctgccggagtcgttcttcaccatgcctttggacgccgtccgtgacgacaaaggatcgctcgatctgtcggcagcctccgccccgctttgccccttctgcggcgtcctgctgcagaggtcgatgccggcgttcctgctctccacctcgccggtatagtcttcggatgcccccaggtgttacatgcagtagcaatgcaatgggaatatcgtagtggagccaactaccaagtttgttgtagctgatgctgtatggctgcagagtggcagtgccgtcattggggctcgaaatgtttgtgataggttttgtgacttctttctgcttagcccctctaatatatctcgagatacctattttttatttaccgtaccctgcctctggaccaaagcctatgtggcggtggccgccaggctgagtgcggggcgaggggcttgggccagctcctgcactcagcctgatgaccatgtccgctggtgctgtgcccgctgggggtgggcgccgttctgtgtctcctgtgggtgtgggctgtggcatcgacgtgaccgagagcatctcgtgcaacgctagtcgaggcctcctctgatggctccatgacatgcgcctcatcaccggtaagccctgagcctgcgccatgtgtgtggcgcttaaagatc

SEQ ID NO: 47343 - DNA, 3811 bp, Zea Mays
ctgaacagccccccggtcgctcctcctccctctaccctccagctccagccgccagccgccagccgcccacgcccggagcaccgccgcaacccgcagcgccgctcgcccggaggccggagcaccgccgctctccccgcacggagcaccgccgcgaccacgccgctgtccatccgccgctccgcgctccctccttcgaccttcgccttggttccgacgcggtgaccgtgcgctaaacccttcgaccttcgcccggaggcgggagcgcggcggaccggagtccggagcaaccgtgagacgagcaggggcggccggcgggcgcggatatttgggcgcaacaactttctgcccttccatttctccaactaagaaggaataggatgccaagagagtttctgcaaccccaatgaagatggcaccagctccgcctccggaggggactgcaattctgctaattcgtggagctcagagttctatcttaacggtgctgctagttatgcttgggtgttagtgctatggctactcattaccaagctgctaccttgattgcctctccgtcttacccaaatgccattgcttggtcaagtgacaatctcgtggctgtcgcatctggtcatattgtaactattctgaacccagctgcgcttgatggaccccgtggattggttggacttcgtcacagtgacccttttcctataggagtggttaagagagaagatctcttggagccatgtttattgcccacttccttagcgcgtgaaactgaaccatgtgcccgatcgatttcatggtctcaacaaggatttgcacctaactatgggtatacatacctttgacattctaaatgatcttctctaggtgtgtttgctggctgtttgcactgtgaatgatcatgtgaagctttaccgatcaccaatttgggagttatgtgatgaatgggtagaggtcgcagatatatcacagttgctgtttaactattataaaattataaacttcggagaggataatggttctcatttgacttcttcgaagaatacaaattctggggaggcagaagttttaggatctacttgtcgatcggaagaatctctttatttcaggggtcctggacagagaaaaataaagccagcaagagttggtggttttatttatgacggcaatgaagttgatttagatgcttcaaaggatgcagacttctcgatggaaccatgctcaaaatcaaagaagaaatctttgaaaaagactgtaaaacccagggatgaagtggttgctgtaaatggacgaaacagcacagggaatgttaaagcatcattgtcctccaatgaacaaaacaaatctcttcctcttatcacggcaaaacagtatgcctgtcgtgctgcacatttgtcttcccttgtagtttcatggtctccagttgtgtcattaagtgatagaacttcttgtttattgaggcattggtgcattcttgctgttggctctaaatctggaaatatttctttttggaaactatataagccagaatattacacaatagatgctggtgtggttaccagtgatccgatgctcatcggggttttgcatgctcatgaatcatgggtcaatgccataacttggcaagttctttctgcgggctcttcaaaatcctcgttgcttttagctactggatgctcagatggaagtgttaagatatggttagggaatattgaagggttaaatcaatgtgcaattggagaagaagtgccatttgtgttagttgctgaggttgccgctaatttatcagctccagtgtcgtcaatctcattgggcatacctgcccggtctcaacatgaggttagtttggcaattggaagagtatccgggttactagaaatatggatatggaatgcatctaccaacaaaattgagagttccagtgcatggcatgcacatgatcaagtggtgacaggtttacgatgggctatcgatggcaattgtttattcagctgcagtcaggacaattctacacgttgttggatatctcacgaaaaccaccttgaagaattttttttgcattcagaattttcagagctaagggagtcagaagatgtaagagtagtagacacttaaatgttagttattcttgatgtccaattattttcctccatatggttgggttttcaatatgcatgcagctatcaaaagtttctgatcgatgctatggtcttacgctatcacctggagaagagataattgctgtggtccgcagtttggatctgaaccttttgaaccagatgtatcaagtcaggacacaaaaggcggtggtcgagttcatttggatcggtggccaatttgttggtattccactggacgggagtatcgatatttgcagtccgcagtctgcggacttatcctcaagtaaccttatgtggtggggatccaacatcttgtggtcgctgaagaaatacgaaaatgtcgaaaagaggcttgtgttgtgggacgttgtagctgcgctgcaagagctgaagaaaaccgcgcccgcctttctggagactctagtgcacagttgggcctcagctttatttgcgggcgactcacagtgtgtttctatcactgcccagtcatcacgctcgatgcatgacatgatgccccatgtcagctcgcggaagctgcacttactgaacataatctgcagaaaagtgatgctcggcaatcatgcgcggcatggtcctggtgctggaaacaacagtaatgatggaacaactgatttctggagcactcttttggtagcgagtgaaacggagctgcgagagaggctggtgggtttcacctttgccgcggtcgtgaaacggacagcgtgtctgttcaacggcacctccaccgcaaattgctggttccctgtcggcgtcgcccagatggattcttgggtatccatgaactacgaaaaggtgcacggtcagctgcagtcgatcagatcgaagatcaaagagctaggaagcaggatcgacggatactccgacgtagaaagctgcccctactgctcttcgccggtccgtttcgagtcgcctgacgtggccatctgcggagaaaggcacacgctgtcgcggtgcaggacatccatgaccctgtgctccgtcgcgcagccagtgtggcactgctcgtgctgcgggggcacggtcgacaagctgctgccggagtcgttcttcaccatgcctttggacgccgtccgtgacgacaaaggatcgctcgatctgtcggcagcctccgccccgctttgccccttctgcggcgtcctgctgcagaggtcgatgccggcgttcctgctctccacctcgccggtatagtcttcggatgcccccaggtgttacatgcagtagcaatgcaatgggaatatcgtagtggagccaactaccaagtttgttgtagctgatgctgtatggctgcagagtggcagtgccgtcattggggctcgaaatgtttgtgataggttttgtgacttctttctgcttagcccctctaatatatctcgagatacctattttttatttaccgtaccctgcctctggaccaaagcctatgtggcggtggccgccaggctgagtgcggggcgaggggcttgggccagctcctgcactcagcctgatgaccatgtccgctggtgctgtgcccgctgggggtgggcgccgttctgtgtctcctgtgggtgtgggctgtggcatcgacgtgaccgagagcatctcgtgcaacgctagtcgaggcctcctctgatggctccatgacatgcgcctcatcaccggtaagccctgagcctgcgccatgtgtgtggcgcttaaagatc

SEQ ID NO: 47344 - DNA, 5094 bp, Zea Mays
ctgaacagccccccggtcgctcctcctccctctaccctccagctccagccgccagccgccagccgcccacgcccggagcaccgccgcaacccgcagcgccgctcgcccggaggccggagcaccgccgctctccccgcacggagcaccgccgcgaccacgccgctgtccatccgccgctccgcgctccctccttcgaccttcgccttggttccgacgcggtgaccgtgcgctaaacccttcgaccttcgcccggaggcgggagcgcggcggaccggagtccggagcaaccgtgagacgagcaggggcggccggcgggcgcggatatttgggcgcaacaactttctgcccttccatttctccaactaagaaggaataggatgccaagagagtttctgcaaccccaatgaagatggcaccagctccgcctccggaggggactgcaattctgctaattcgtggagctcaggaataggacgctccgggcgaactgcgaagcagaagcagcgaagagttctatcttaacggtgctgctagttatgcttgggtgttagtgctatggctactcattaccaagctgctaccttgattgcctctccgtcttacccaaatgccattgcttggtcaagtgacaatctcgtggctgtcgcatctggtcatattgtaactattctgaacccagctgcgcttgatggaccccgtggattggttggacttcgtcacagtgacccttttcctataggagtggttaagagagaagatctcttggagccatgtttattgcccacttccttagcgcgtgaaactgaaccatgtgcccgatcgatttcatggtctcaacaaggatttgcacctaactatgggtgtttgctggctgtttgcactgtgaatgatcatgtgaagctttaccgatcaccaatttgggagttatgtgatgaatgggtagagatatatcacagttgctgtttaactattataaaattataaacttcggagaggataatggttctcatttgacttcttcgaagaatacaaattctggggaggcagaagttttaggatctacttgtcgatcggaagaatctctttatttcaggggtcctggacagagaaaaataaagccagcaagagttggtggttttatttatgacggcaatgaagttgatttagatgcttcaaaggatgcagacttctcgatggaaccatgctcaaaatcaaagaagaaatctttgaaaaaggtagagattttacacatctatgctgaagtcttggtttattcttttactttgtaataaaagggaaacctagttgattcttaacaaaaaaaagaaccaattattccctccgcttttaaatggtactttggacttggtacatccatttgaattttggagtattcatctttccttcaaatatttatgcaaatagacaaacatacaaggcttgcttaaagtactttagatgacatatctagcgacactcttttaagtttcgttagctactaagtaattgaataaatattgctggtcaatgtacatgactgttttgtgttttctatttaacattactgtgtttgtgattccagactgtaaaacccagggatgaagtggttgctgtaaatggacgaaacagcacagggaatgttaaagcatcattgtcctccaatgaacaaaacaaatctcttcctcttatcacggcaaaacagtatgcctgtcgtgctgcacatttgtcttcccttgtagtttcatggtctccagttgtgtcattaagtgatagaacttcttgtttattgaggcattggtgcattcttgctgttggctctaaatctggaaatatttctttttggaaactatataagccagaatattacacaatagatgctggtgtggttaccagtgatccgatgctcatcggggttttgcatgctcatgaatcatgggtcaatgccataacttggcaagttctttctgcgggctcttcaaaatcctcgttgcttttagctactggatgctcagatggaaggtaaccattttatgcatattgtctgtaaatggtgatgtgcttttttcagctgcactatgtattgtttcttgtttgcttacgtgaattttgtgagctcttcttgactcatgacatggcaaaagtgatatatggggataatcataagcatagctttgcttctatgttttctggaataaggtccaagtttgtccataagcagcagtgagcagaatgacctgtataggcatgcaatgagcctgtcatacctctgccttaataaataaaaaagaaagcacaccagattgttgggattagggttacggaggtcatacgagtggtaggtttggggtctagggccacgaccccggcgcttgggcgtcgtcgggctgttggtggagaaggcgaggtactgtccacgagatgaacagtagccgcgatgaacactaatgggatatgggaagcacgggcaagataattgcctgcttgctcctttctttaaccaaaggggtacaatatataggctgtcatagcagcccctaacgaactaaccaactctatctacgagtttcaaactaatgcttatgcatctgaacaaactaattgatacttatgcatctaaacaaactaattgatacttatgcatctaaacaaactaagaactaactgatgcttatccatctaaacaaactacctgattttttagggcttttgggcgctgccagtcataacacccccccccccccaaaaaaaaaattataatcacgcaacacattctctgcactagatatctgggtggtggtgaaaatactttacccatgtgccttaaaaagattctcattggtctttttatattttataaactttggttattcctatggttattttttgcctttcaatggttattattagttttctgcagacactgcatatcacatgttgaagatttggtttgtattttcagtgttaagatatggttagggaatattgaagggttaaatcaatgtgcaattggagaagaagtgccatttgtgttagttgctgaggttgccgctaatttatcagctccagtgtcgtcaatctcattgggcatacctgcccggtctcaacatgaggttagtttggcaattggaagagtatccgggttactagaaatatggatatggaatgcatctaccaacaaaattgagagttccagtgcatggcatgcacatgatcaagtggtgacaggtttacgatgggctatcgatggcaattgtttattcagctgcagtcaggacaattctacacgttgttggatatctcacgaaaaccaccttgaagaattttttttgcattcagaattttcagagctaagggagtcagaagatgtaagagtagtagacacttaaatgttagttattcttgatgtccaattattttcctccatatggttgggttttcaatatgcatgcagctatcaaaagtttctgatcgatgctatggtcttacgctatcacctggagaagagataattgctgtggtccgcagtttggatctgaaccttttgaaccagatgtatcaagtcaggacacaaaaggcggtggtcgagttcatttggatcggtggccaatttgttggtattccactggacgggagtatcgatatttgcagtccgcagtctgcggacttatcctcaagtaaccttatgtggtggggatccaacatcttgtggtcgctgaagaaatacgaaaatgtcgaaaagaggcttgtgttgtgggacgttgtagctgcgctgcaagagctgaagaaaaccgcgcccgcctttctggagactctagtgcacagttgggcctcagctttatttgcgggcgactcacagtgtgtttctatcactgcccagtcatcacgctcgatgcatgacatgatgccccatgtcagctcgcggaagctgcacttactgaacataatctgcagaaaagtgatgctcggcaatcatgcgcggcatggtcctggtgctggaaacaacagtaatgatggaacaactgatttctggagcactcttttggtagcgagtgaaacggagctgcgagagaggctggtgggtttcacctttgccgcggtcgtgaaacggacagcgtgtctgttcaacggcacctccaccgcaaattgctggttccctgtcggcgtcgcccagatggattcttgggtatccatgaactacgaaaaggtgcacggtcagctgcagtcgatcagatcgaagatcaaagagctaggaagcaggatcgacggatactccgacgtagaaagctgcccctactgctcttcgccggtccgtttcgagtcgcctgacgtggccatctgcggagaaaggcacacgctgtcgcggtgcaggacatccatgaccctgtgctccgtcgcgcagccagtgtggcactgctcgtgctgcgggggcacggtcgacaagctgctgccggagtcgttcttcaccatgcctttggacgccgtccgtgacgacaaaggatcgctcgatctgtcggcagcctccgccccgctttgccccttctgcggcgtcctgctgcagaggtcgatgccggcgttcctgctctccacctcgccggtatagtcttcggatgcccccaggtgttacatgcagtagcaatgcaatgggaatatcgtagtggagccaactaccaagtttgttgtagctgatgctgtatggctgcagagtggcagtgccgtcattggggctcgaaatgtttgtgataggttttgtgacttctttctgcttagcccctctaatatatctcgagatacctattttttatttaccgtaccctgcctctggaccaaagcctatgtggcggtggccgccaggctgagtgcggggcgaggggcttgggccagctcctgcactcagcctgatgaccatgtccgctggtgctgtgcccgctgggggtgggcgccgttctgtgtctcctgtgggtgtgggctgtggcatcgacgtgaccgagagcatctcgtgcaacgctagtcgaggcctcctctgatggctccatgacatgcgcctcatcaccggtaagccctgagcctgcgccatgtgtgtggcgcttaaagatc

SEQ ID NO: 47345 - DNA, 3761 bp, Zea Mays
ctgaacagccccccggtcgctcctcctccctctaccctccagctccagccgccagccgccagccgcccacgcccggagcaccgccgcaacccgcagcgccgctcgcccggaggccggagcaccgccgctctccccgcacggagcaccgccgcgaccacgccgctgtccatccgccgctccgcgctccctccttcgaccttcgccttggttccgacgcggtgaccgtgcgctaaacccttcgaccttcgcccggaggcgggagcgcggcggaccggagtccggagcaaccgtgagacgagcaggggcggccggcgggcgcggatatttgggcgcaacaactttctgcccttccatttctccaactaagaaggaataggatgccaagagagtttctgcaaccccaatgaagatggcaccagctccgcctccggaggggactgcaattctgctaattcgtggagctcagagttctatcttaacggtgctgctagttatgcttgggtgttagtgctatggctactcattaccaagctgctaccttgattgcctctccgtcttacccaaatgccattgcttggtcaagtgacaatctcgtggctgtcgcatctggtcatattgtaactattctgaacccagctgcgcttgatggaccccgtggattggttggacttcgtcacagtgacccttttcctataggagtggttaagagagaagatctcttggagccatgtttattgcccacttccttagcgcgtgaaactgaaccatgtgcccgatcgatttcatggtctcaacaaggatttgcacctaactatgggtgtttgctggctgtttgcactgtgaatgatcatgtgaagctttaccgatcaccaatttgggagttatgtgatgaatgggtagaggtcgcagatatatcacagttgctgtttaactattataaaattataaacttcggagaggataatggttctcatttgacttcttcgaatacaaattctggggaggcagaagttttaggatctacttgtcgatcggaagaatctctttatttcaggggtcctggacagagaaaaataaagccagcaagagttggtggttttatttatgacggcaatgaagttgatttagatgcttcaaaggatgcagacttctcgatggaaccatgctcaaaatcaaagaagaaatctttgaaaaagactgtaaaacccagggatgaagtggttgctgtaaatggacgaaacagcacagggaatgttaaagcatcattgtcctccaatgaacaaaacaaatctcttcctcttatcacggcaaaacagtatgcctgtcgtgctgcacatttgtcttcccttgtagtttcatggtctccagttgtgtcattaagtgatagaacttcttgtttattgaggcattggtgcattcttgctgttggctctaaatctggaaatatttctttttggaaactatataagccagaatattacacaatagatgctggtgtggttaccagtgatccgatgctcatcggggttttgcatgctcatgaatcatgggtcaatgccataacttggcaagttctttctgcgggctcttcaaaatcctcgttgcttttagctactggatgctcagatggaagtgttaagatatggttagggaatattgaagggttaaatcaatgtgcaattggagaagaagtgccatttgtgttagttgctgaggttgccgctaatttatcagctccagtgtcgtcaatctcattgggcatacctgcccggtctcaacatgaggttagtttggcaattggaagagtatccgggttactagaaatatggatatggaatgcatctaccaacaaaattgagagttccagtgcatggcatgcacatgatcaagtggtttacgatgggctatcgatggcaattgtttattcagctgcagtcaggacaattctacacgttgttggatatctcacgaaaaccaccttgaagaattttttttgcattcagaattttcagagctaagggagtcagaagatgtaagagtagtagacacttaaatgttagttattcttgatgtccaattattttcctccatatggttgggttttcaatatgcatgcagctatcaaaagtttctgatcgatgctatggtcttacgctatcacctggagaagagataattgctgtggtccgcagtttggatctgaaccttttgaaccagatgtatcaagtcaggacacaaaaggcggtggtcgagttcatttggatcggtggccaatttgttggtattccactggacgggagtatcgatatttgcagtccgcagtctgcggacttatcctcaagtaaccttatgtggtggggatccaacatcttgtggtcgctgaagaaatacgaaaatgtcgaaaagaggcttgtgttgtgggacgttgtagctgcgctgcaagagctgaagaaaaccgcgcccgcctttctggagactctagtgcacagttgggcctcagctttatttgcgggcgactcacagtgtgtttctatcactgcccagtcatcacgctcgatgcatgacatgatgccccatgtcagctcgcggaagctgcacttactgaacataatctgcagaaaagtgatgctcggcaatcatgcgcggcatggtcctggtgctggaaacaacagtaatgatggaacaactgatttctggagcactcttttggtagcgagtgaaacggagctgcgagagaggctggtgggtttcacctttgccgcggtcgtgaaacggacagcgtgtctgttcaacggcacctccaccgcaaattgctggttccctgtcggcgtcgcccagatggattcttgggtatccatgaactacgaaaaggtgcacggtcagctgcagtcgatcagatcgaagatcaaagagctaggaagcaggatcgacggatactccgacgtagaaagctgcccctactgctcttcgccggtccgtttcgagtcgcctgacgtggccatctgcggagaaaggcacacgctgtcgcggtgcaggacatccatgaccctgtgctccgtcgcgcagccagtgtggcactgctcgtgctgcgggggcacggtcgacaagctgctgccggagtcgttcttcaccatgcctttggacgccgtccgtgacgacaaaggatcgctcgatctgtcggcagcctccgccccgctttgccccttctgcggcgtcctgctgcagaggtcgatgccggcgttcctgctctccacctcgccggtatagtcttcggatgcccccaggtgttacatgcagtagcaatgcaatgggaatatcgtagtggagccaactaccaagtttgttgtagctgatgctgtatggctgcagagtggcagtgccgtcattggggctcgaaatgtttgtgataggttttgtgacttctttctgcttagcccctctaatatatctcgagatacctattttttatttaccgtaccctgcctctggaccaaagcctatgtggcggtggccgccaggctgagtgcggggcgaggggcttgggccagctcctgcactcagcctgatgaccatgtccgctggtgctgtgcccgctgggggtgggcgccgttctgtgtctcctgtgggtgtgggctgtggcatcgacgtgaccgagagcatctcgtgcaacgctagtcgaggcctcctctgatggctccatgacatgcgcctcatcaccggtaagccctgagcctgcgccatgtgtgtggcgcttaaagatc

SEQ ID NO: 47346 - DNA, 3817 bp, Zea Mays
ctgaacagccccccggtcgctcctcctccctctaccctccagctccagccgccagccgccagccgcccacgcccggagcaccgccgcaacccgcagcgccgctcgcccggaggccggagcaccgccgctctccccgcacggagcaccgccgcgaccacgccgctgtccatccgccgctccgcgctccctccttcgaccttcgccttggttccgacgcggtgaccgtgcgctaaacccttcgaccttcgcccggaggcgggagcgcggcggaccggagtccggagcaaccgtgagacgagcaggggcggccggcgggcgcggatatttgggcgcaacaactttctgcccttccatttctccaactaagaaggaataggatgccaagagagtttctgcaaccccaatgaagatggcaccagctccgcctccggaggggactgcaattctgctaattcgtggagctcagagttctatcttaacggtgctgctagttatgcttgggtgttagtgctatggctactcattaccaagctgctaccttgattgcctctccgtcttacccaaatgccattgcttggtcaagtgacaatctcgtggctgtcgcatctggtcatattgtaactattctgaacccagctgcgcttgatggaccccgtggattggttggacttcgtcacagtgacccttttcctataggagtggttaagagagaagatctcttggagccatgtttattgcccacttccttagcgcgtgaaactgaaccatgtgcccgatcgatttcatggtctcaacaaggatttgcacctaactatgggtatacatacctttgacattctaaatgatcttctctaggtgtgtttgctggctgtttgcactgtgaatgatcatgtgaagctttaccgatcaccaatttgggagttatgtgatgaatgggtagaggtcgcagatatatcacagttgctgtttaactattataaaattataaacttcggagaggataatggttctcatttgacttcttcgaagaatacaaattctggggaggcagaagttttaggatctacttgtcgatcggaagaatctctttatttcaggggtcctggacagagaaaaataaagccagcaagagttggtggttttatttatgacggcaatgaagttgatttagatgcttcaaaggatgcagacttctcgatggaaccatgctcaaaatcaaagaagaaatctttgaaaaagactgtaaaacccagggatgaagtggttgctgtaaatggacgaaacagcacagggaatgttaaagcatcattgtcctccaatgaacaaaacaaatctcttcctcttatcacggcaaaacagtatgcctgtcgtgctgcacatttgtcttcccttgtagtttcatggtctccagttgtgtcattaagtgatagaacttcttgtttattgaggcattggtgcattcttgctgttggctctaaatctggaaatatttctttttggaaactatataagccagaatattacacaatagatgctggtgtggttaccagtgatccgatgctcatcggggttttgcatgctcatgaatcatgggtcaatgccataacttggcaagttctttctgcgggctcttcaaaatcctcgttgcttttagctactggatgctcagatggaagtgttaagatatggttagggaatattgaagggttaaatcaatgtgcaattggagaagaagtgccatttgtgttagttgctgaggttgccgctaatttatcagctccagtgtcgtcaatctcattgggcatacctgcccggtctcaacatgaggttagtttggcaattggaagagtatccgggttactagaaatatggatatggaatgcatctaccaacaaaattgagagttccagtgcatggcatgcacatgatcaagtggtttacgatgggctatcgatggcaattgtttattcagctgcagtcaggacaattctacacgttgttggatatctcacgaaaaccaccttgaagaattttttttgcattcagaattttcagagctaagggagtcagaagatctatcaaaagtttctgatcgatgctatggtcttacgctatcacctggagaagagataattgctgtggtccgcagtttggatctgaaccttttgaaccagatgtatcaagtcaggacacaaaaggcggtggtcgagttcatttggatcggtggccaatttgttggtattccactggacgggagtatcgatatttgcagtccgcagtctgcggacttatcctcaagtaaccttatgtggtggggatccaacatcttgtggtcgctgaagaaatacgaaaatgtcgaaaagaggcttgtgttgtgggacgttgtagctgcgctgcaagagctgaagaaaaccgcgcccgcctttctggagactctagtgcacagttgggcctcagctttatttgcgggcgactcacagtgtgtttctatcactgcccagtcatcacgctcgatgcatgacatgatgccccatgtcagctcgcggaagctgcacttactgaacataatctgcagaaaagtgatgctcggcaatcatgcgcggcatggtcctggtgctggaaacaacagtaatgatggaacaactgatttctggagcactcttttggtagcgagtgaaacggagctgcgagagaggctggtgggtttcacctttgccgcggtcgtgaaacggacagcgtgtctgttcaacggcacctccaccgcaaattgctggttccctgtcggcgtcgcccagatggattcttgggtatccatgaactacgaaaaggtgcacggtcagctgcagtcgatcagatcgaagatcaaagagctaggaagcaggtgactcaactcaactcaactgaccaatcatctgtcacatccagttttgtctttgaaatgagataccggttcaccgaacctagctgttccttcctgcaggatcgacggatactccgacgtagaaagctgcccctactgctcttcgccggtccgtttcgagtcgcctgacgtggccatctgcggagaaaggcacacgctgtcgcggtgcaggacatccatgaccctgtgctccgtcgcgcagccagtgtggcactgctcgtgctgcgggggcacggtcgacaagctgctgccggagtcgttcttcaccatgcctttggacgccgtccgtgacgacaaaggatcgctcgatctgtcggcagcctccgccccgctttgccccttctgcggcgtcctgctgcagaggtcgatgccggcgttcctgctctccacctcgccggtatagtcttcggatgcccccaggtgttacatgcagtagcaatgcaatgggaatatcgtagtggagccaactaccaagtttgttgtagctgatgctgtatggctgcagagtggcagtgccgtcattggggctcgaaatgtttgtgataggttttgtgacttctttctgcttagcccctctaatatatctcgagatacctattttttatttaccgtaccctgcctctggaccaaagcctatgtggcggtggccgccaggctgagtgcggggcgaggggcttgggccagctcctgcactcagcctgatgaccatgtccgctggtgctgtgcccgctgggggtgggcgccgttctgtgtctcctgtgggtgtgggctgtggcatcgacgtgaccgagagcatctcgtgcaacgctagtcgaggcctcctctgatggctccatgacatgcgcctcatcaccggtaagccctgagcctgcgccatgtgtgtggcgcttaaagatc

SEQ ID NO: 47347 - DNA, 3714 bp, Zea Mays
ctgaacagccccccggtcgctcctcctccctctaccctccagctccagccgccagccgccagccgcccacgcccggagcaccgccgcaacccgcagcgccgctcgcccggaggccggagcaccgccgctctccccgcacggagcaccgccgcgaccacgccgctgtccatccgccgctccgcgctccctccttcgaccttcgccttggttccgacgcggtgaccgtgcgctaaacccttcgaccttcgcccggaggcgggagcgcggcggaccggagtccggagcaaccgtgagacgagcaggggcggccggcgggcgcggatatttgggcgcaacaactttctgcccttccatttctccaactaagaaggaataggatgccaagagagtttctgcaaccccaatgaagatggcaccagctccgcctccggaggggactgcaattctgctaattcgtggagctcaggaataggacgctccgggcgaactgcgaagcagaagcagcgaagagttctatcttaacggtgctgctagttatgcttgggtgttagtgctatggctactcattaccaagctgctaccttgattgcctctccgtcttacccaaatgccattgcttggtcaagtgacaatctcgtggctgtcgcatctggtcatattgtaactattctgaacccagctgcgcttgatggaccccgtggattggttggacttcgtcacagtgacccttttcctataggagtggttaagagagaagatctcttggagccatgtttattgcccacttccttagcgcgtgaaactgaaccatgtgcccgatcgatttcatggtctcaacaaggatttgcacctaactatgggtgtttgctggctgtttgcactgtgaatgatcatgtgaagctttaccgatcaccaatttgggagttatgtgatgaatgggtagagatatatcacagttgctgtttaactattataaaattataaacttcggagaggataatggttctcatttgacttcttcgaagaatacaaattctggggaggcagaagttttaggatctacttgtcgatcggaagaatctctttatttcaggggtcctggacagagaaaaataaagccagcaagagttggtggttttatttatgacggcaatgaagttgatttagatgcttcaaaggatgcagacttctcgatggaaccatgctcaaaatcaaagaagaaatctttgaaaaagactgtaaaacccagggatgaagtggttgctgtaaatggacgaaacagcacagggaatgttaaagcatcattgtcctccaatgaacaaaacaaatctcttcctcttatcacggcaaaacagtatgcctgtcgtgctgcacatttgtcttcccttgtagtttcatggtctccagttgtgtcattaagtgatagaacttcttgtttattgaggcattggtgcattcttgctgttggctctaaatctggaaatatttctttttggaaactatataagccagaatattacacaatagatgctggtgtggttaccagtgatccgatgctcatcggggttttgcatgctcatgaatcatgggtcaatgccataacttggcaagttctttctgcgggctcttcaaaatcctcgttgcttttagctactggatgctcagatggaagtgttaagatatggttagggaatattgaagggttaaatcaatgtgcaattggagaagaagtgccatttgtgttagttgctgaggttgccgctaatttatcagctccagtgtcgtcaatctcattgggcatacctgcccggtctcaacatgaggttagtttggcaattggaagagtatccgggttactagaaatatggatatggaatgcatctaccaacaaaattgagagttccagtgcatggcatgcacatgatcaagtggtttacgatgggctatcgatggcaattgtttattcagctgcagtcaggacaattctacacgttgttggatatctcacgaaaaccaccttgaagaattttttttgcattcagaattttcagagctaagggagtcagaagatctatcaaaagtttctgatcgatgctatggtcttacgctatcacctggagaagagataattgctgtggtccgcagtttggatctgaaccttttgaaccagatgtatcaagtcaggacacaaaaggcggtggtcgagttcatttggatcggtggccaatttgttggtattccactggacgggagtatcgatatttgcagtccgcagtctgcggacttatcctcaagtaaccttatgtggtggggatccaacatcttgtggtcgctgaagaaatacgaaaatgtcgaaaagaggcttgtgttgtgggacgttgtagctgcgctgcaagagctgaagaaaaccgcgcccgcctttctggagactctagtgcacagttgggcctcagctttatttgcgggcgactcacagtgtgtttctatcactgcccagtcatcacgctcgatgcatgacatgatgccccatgtcagctcgcggaagctgcacttactgaacataatctgcagaaaagtgatgctcggcaatcatgcgcggcatggtcctggtgctggaaacaacagtaatgatggaacaactgatttctggagcactcttttggtagcgagtgaaacggagctgcgagagaggctggtgggtttcacctttgccgcggtcgtgaaacggacagcgtgtctgttcaacggcacctccaccgcaaattgctggttccctgtcggcgtcgcccagatggattcttgggtatccatgaactacgaaaaggtgcacggtcagctgcagtcgatcagatcgaagatcaaagagctaggaagcaggatcgacggatactccgacgtagaaagctgcccctactgctcttcgccggtccgtttcgagtcgcctgacgtggccatctgcggagaaaggcacacgctgtcgcggtgcaggacatccatgaccctgtgctccgtcgcgcagccagtgtggcactgctcgtgctgcgggggcacggtcgacaagctgctgccggagtcgttcttcaccatgcctttggacgccgtccgtgacgacaaaggatcgctcgatctgtcggcagcctccgccccgctttgccccttctgcggcgtcctgctgcagaggtcgatgccggcgttcctgctctccacctcgccggtatagtcttcggatgcccccaggtgttacatgcagtagcaatgcaatgggaatatcgtagtggagccaactaccaagtttgttgtagctgatgctgtatggctgcagagtggcagtgccgtcattggggctcgaaatgtttgtgataggttttgtgacttctttctgcttagcccctctaatatatctcgagatacctattttttatttaccgtaccctgcctctggaccaaagcctatgtggcggtggccgccaggctgagtgcggggcgaggggcttgggccagctcctgcactcagcctgatgaccatgtccgctggtgctgtgcccgctgggggtgggcgccgttctgtgtctcctgtgggtgtgggctgtggcatcgacgtgaccgagagcatctcgtgcaacgctagtcgaggcctcctctgatggctccatgacatgcgcctcatcaccggtaagccctgagcctgcgccatgtgtgtggcgcttaaagatc

SEQ ID NO: 47348 - DNA, 4014 bp, Zea Mays
ctgaacagccccccggtcgctcctcctccctctaccctccagctccagccgccagccgccagccgcccacgcccggagcaccgccgcaacccgcagcgccgctcgcccggaggccggagcaccgccgctctccccgcacggagcaccgccgcgaccacgccgctgtccatccgccgctccgcgctccctccttcgaccttcgccttggttccgacgcggtgaccgtgcgctaaacccttcgaccttcgcccggaggcgggagcgcggcggaccggagtccggagcaaccgtgagacgagcaggggcggccggcgggcgcggatatttgggcgcaacaactttctgcccttccatttctccaactaagaaggaataggatgccaagagagtttctgcaaccccaatgaagatggcaccagctccgcctccggaggggactgcaattctgctaattcgtggagctcagagttctatcttaacggtgctgctagttatgcttgggtgttagtgctatggctactcattaccaagctgctaccttgattgcctctccgtcttacccaaatgccattgcttggtcaagtgacaatctcgtggctgtcgcatctggtcatattgtaactattctgaacccagctgcgcttgatggaccccgtggattggttggacttcgtcacagtgacccttttcctataggagtggttaagagagaagatctcttggagccatgtttattgcccacttccttagcgcgtgaaactgaaccatgtgcccgatcgatttcatggtctcaacaaggatttgcacctaactatgggtgtttgctggctgtttgcactgtgaatgatcatgtgaagctttaccgatcaccaatttgggagttatgtgatgaatgggtagaggtcgcagatatatcacagttgctgtttaactattataaaattataaacttcggagaggataatggttctcatttgacttcttcgaagaatacaaattctggggaggcagaagttttaggatctacttgtcgatcggaagaatctctttatttcaggggtcctggacagagaaaaataaagccagcaagagttggtggttttatttatgacggcaatgaagttgatttagatgcttcaaaggatgcagacttctcgatggaaccatgctcaaaatcaaagaagaaatctttgaaaaagactgtaaaacccagggatgaagtggttgctgtaaatggacgaaacagcacagggaatgttaaagcatcattgtcctccaatgaacaaaacaaatctcttcctcttatcacggcaaaacagtatgcctgtcgtgctgcacatttgtcttcccttgtagtttcatggtctccagttgtgtcattaagtgatagaacttcttgtttattgaggcattggtgcattcttgctgttggctctaaatctggaaatatttctttttggaaactatataagccagaatattacacaatagatgctggtgtggttaccagtgatccgatgctcatcggggttttgcatgctcatgaatcatgggtcaatgccataacttggcaagttctttctgcgggctcttcaaaatcctcgttgcttttagctactggatgctcagatggaagtgttaagatatggttagggaatattgaagggttaaatcaatgtgcaattggagaagaagtgccatttgtgttagttgctgaggttgccgctaatttatcagctccagtgtcgtcaatctcattgggcatacctgcccggtctcaacatgaggttagtttggcaattggaagagtatccgggttactagaaatatggatatggaatgcatctaccaacaaaattgagagttccagtgcatggcatgcacatgatcaagtggtttacgatgggctatcgatggcaattgtttattcagctgcagtcaggccaccagggtaatgggtgtattgagcccttcttcagacaattgttcttgacattaacgttgtttccaatacaccttccaatgctctgtacattgtgagaatgaaaatgaaaaacgtagtgttaaaaatttggtatgatgctatgtgaagcaagcagtattctaggtgcgccaagagggtgaacgcttcaatggcagcatgaggcagcaggaacgtgtggtgagcgtgccttggttataatatatatcaggacaattctacacgttgttggatatctcacgaaaaccaccttgaagaattttttttgcattcagaattttcagagctaagggagtcagaagatgtaagagtagtagacacttaaatgttagttattcttgatgtccaattattttcctccatatggttgggttttcaatatgcatgcagctatcaaaagtttctgatcgatgctatggtcttacgctatcacctggagaagagataattgctgtggtccgcagtttggatctgaaccttttgaaccagatgtatcaagtcaggacacaaaaggcggtggtcgagttcatttggatcggtggccaatttgttggtattccactggacgggagtatcgatatttgcagtccgcagtctgcggacttatcctcaagtaaccttatgtggtggggatccaacatcttgtggtcgctgaagaaatacgaaaatgtcgaaaagaggcttgtgttgtgggacgttgtagctgcgctgcaagagctgaagaaaaccgcgcccgcctttctggagactctagtgcacagttgggcctcagctttatttgcgggcgactcacagtgtgtttctatcactgcccagtcatcacgctcgatgcatgacatgatgccccatgtcagctcgcggaagctgcacttactgaacataatctgcagaaaagtgatgctcggcaatcatgcgcggcatggtcctggtgctggaaacaacagtaatgatggaacaactgatttctggagcactcttttggtagcgagtgaaacggagctgcgagagaggctggtgggtttcacctttgccgcggtcgtgaaacggacagcgtgtctgttcaacggcacctccaccgcaaattgctggttccctgtcggcgtcgcccagatggattcttgggtatccatgaactacgaaaaggtgcacggtcagctgcagtcgatcagatcgaagatcaaagagctaggaagcaggatcgacggatactccgacgtagaaagctgcccctactgctcttcgccggtccgtttcgagtcgcctgacgtggccatctgcggagaaaggcacacgctgtcgcggtgcaggacatccatgaccctgtgctccgtcgcgcagccagtgtggcactgctcgtgctgcgggggcacggtcgacaagctgctgccggagtcgttcttcaccatgcctttggacgccgtccgtgacgacaaaggatcgctcgatctgtcggcagcctccgccccgctttgccccttctgcggcgtcctgctgcagaggtcgatgccggcgttcctgctctccacctcgccggtatagtcttcggatgcccccaggtgttacatgcagtagcaatgcaatgggaatatcgtagtggagccaactaccaagtttgttgtagctgatgctgtatggctgcagagtggcagtgccgtcattggggctcgaaatgtttgtgataggttttgtgacttctttctgcttagcccctctaatatatctcgagatacctattttttatttaccgtaccctgcctctggaccaaagcctatgtggcggtggccgccaggctgagtgcggggcgaggggcttgggccagctcctgcactcagcctgatgaccatgtccgctggtgctgtgcccgctgggggtgggcgccgttctgtgtctcctgtgggtgtgggctgtggcatcgacgtgaccgagagcatctcgtgcaacgctagtcgaggcctcctctgatggctccatgacatgcgcctcatcaccggtaagccctgagcctgcgccatgtgtgtggcgcttaaagatc

SEQ ID NO: 47349 - DNA, 4259 bp, Zea Mays
caccattaccctccctggttccctgcttgtgaccggtgagcatctctggaggctcgagtcttgactgagttctatcttaacggtgctgctagttatgcttgggtgttagtgctatggctactcattaccaagctgctaccttgattgcctctccgtcttacccaaatgccattgcttggtcaagtgacaatctcgtggctgtcgcatctggtcatattgtaactattctgaacccagctgcgcttgatggaccccgtggattggttggacttcgtcacagtgacccttttcctataggagtggttaagagagaagatctcttggagccatgtttattgcccacttccttagcgcgtgaaactgaaccatgtgcccgatcgatttcatggtctcaacaaggatttgcacctaactatgggtatacatacctttgacattctaaatgatcttctctaggtgtgtttgctggctgtttgcactgtgaatgatcatgtgaagctttaccgatcaccaatttgggagttatgtgatgaatgggtagaggtcgcagatatatcacagttgctgtttaactattataaaattataaacttcggagaggataatggttctcatttgacttcttcgaagaatacaaattctggggaggcagaagttttaggatctacttgtcgatcggaagaatctctttatttcaggggtcctggacagagaaaaataaagccagcaagagttggtggttttatttatgacggcaatgaagttgatttagatgcttcaaaggatgcagacttctcgatggaaccatgctcaaaatcaaagaagaaatctttgaaaaagactgtaaaacccagggatgaagtggttgctgtaaatggacgaaacagcacagggaatgttaaagcatcattgtcctccaatgaacaaaacaaatctcttcctcttatcacggcaaaacagtatgcctgtcgtgctgcacatttgtcttcccttgtagtttcatggtctccagttgtgtcattaagtgatagaacttcttgtttattgaggcattggtgcattcttgctgttggctctaaatctggaaatatttctttttggaaactatataagccagaatattacacaatagatgctggtgtggttaccagtgatccgatgctcatcggggttttgcatgctcatgaatcatgggtcaatgccataacttggcaagttctttctgcgggctcttcaaaatcctcgttgcttttagctactggatgctcagatggaaggtaaccattttatgcatattgtctgtaaatggtgatgtgcttttttcagctgcactatgtattgtttcttgtttgcttacgtgaattttgtgagctcttcttgactcatgacatggcaaaagtgatatatggggataatcataagcatagctttgcttctatgttttctggaataaggtccaagtttgtccataagcagcagtgagcagaatgacctgtataggcatgcaatgagcctgtcatacctctgccttaataaataaaaaagaaagcacaccagattgttgggattagggttacggaggtcatacgagtggtaggtttggggtctagggccacgaccccggcgcttgggcgtcgtcgggctgttggtggagaaggcgaggtactgtccacgagatgaacagtagccgcgatgaacactaatgggatatgggaagcacgggcaagataattgcctgcttgctcctttctttaaccaaaggggtacaatatataggctgtcatagcagcccctaacgaactaaccaactctatctacgagtttcaaactaatgcttatgcatctgaacaaactaattgatacttatgcatctaaacaaactaattgatacttatgcatctaaacaaactaagaactaactgatgcttatccatctaaacaaactacctgattttttagggcttttgggcgctgccagtcataacacccccccccccccaaaaaaaaaattataatcacgcaacacattctctgcactagatatctgggtggtggtgaaaatactttacccatgtgccttaaaaagattctcattggtctttttatattttataaactttggttattcctatggttattttttgcctttcaatggttattattagttttctgcagacactgcatatcacatgttgaagatttggtttgtattttcagtgttaagatatggttagggaatattgaagggttaaatcaatgtgcaattggagaagaagtgccatttgtgttagttgctgaggttgccgctaatttatcagctccagtgtcgtcaatctcattgggcatacctgcccggtctcaacatgaggttagtttggcaattggaagagtatccgggttactagaaatatggatatggaatgcatctaccaacaaaattgagagttccagtgcatggcatgcacatgatcaagtggtttacgatgggctatcgatggcaattgtttattcagctgcagtcaggacaattctacacgttgttggatatctcacgaaaaccaccttgaagaattttttttgcattcagaattttcagagctaagggagtcagaagatctatcaaaagtttctgatcgatgctatggtcttacgctatcacctggagaagagataattgctgtggtccgcagtttggatctgaaccttttgaaccagatgtatcaagtcaggacacaaaaggcggtggtcgagttcatttggatcggtggccaatttgttggtattccactggacgggagtatcgatatttgcagtccgcagtctgcggacttatcctcaagtaaccttatgtggtggggatccaacatcttgtggtcgctgaagaaatacgaaaatgtcgaaaagaggcttgtgttgtgggacgttgtagctgcgctgcaagagctgaagaaaaccgcgcccgcctttctggagactctagtgcacagttgggcctcagctttatttgcgggcgactcacagtgtgtttctatcactgcccagtcatcacgctcgatgcatgacatgatgccccatgtcagctcgcggaagctgcacttactgaacataatctgcagaaaagtgatgctcggcaatcatgcgcggcatggtcctggtgctggaaacaacagtaatgatggaacaactgatttctggagcactcttttggtagcgagtgaaacggagctgcgagagaggctggtgggtttcacctttgccgcggtcgtgaaacggacagcgtgtctgttcaacggcacctccaccgcaaattgctggttccctgtcggcgtcgcccagatggattcttgggtatccatgaactacgaaaaggtgcacggtcagctgcagtcgatcagatcgaagatcaaagagctaggaagcaggatcgacggatactccgacgtagaaagctgcccctactgctcttcgccggtccgtttcgagtcgcctgacgtggccatctgcggagaaaggcacacgctgtcgcggtgcaggacatccatgaccctgtgctccgtcgcgcagccagtgtggcactgctcgtgctgcgggggcacggtcgacaagctgctgccggagtcgttcttcaccatgcctttggacgccgtccgtgacgacaaaggatcgctcgatctgtcggcagcctccgccccgctttgccccttctgcggcgtcctgctgcagaggtcgatgccggcgttcctgctctccacctcgccggtatagtcttcggatgcccccaggtgttacatgcagtagcaatgcaatgggaatatcgtagtggagccaactaccaagtttgttgtagctgatgctgtatggctgcagagtggcagtgccgtcattggggctcgaaatgtttgtgataggttttgtgacttctttctgcttagcccctctaatatatctcgagatacctattttttatttaccgtaccctgcctctggaccaaagcctatgtggcggtggccgccaggctgagtgcggggcgaggggcttgggccagctcctgcactcagcctgatgaccatgtccgctggtgctgtgcccgctgggggtgggcgccgttctgtgtctcctgtgggtgtgggctgtggcatcgacgtgaccgagagcatctcgtgcaacgctagtcgaggcctcctctgatggctccatgacatgcgcctcatcaccggtaagccctgagcctgcgccatgtgtgtggcgcttaaagatc

SEQ ID NO: 47350 - DNA, 2642 bp, Zea Mays
ataaccttcagcatgagatccaagcagtgggtagcacacggtgtccaaaataagagttggtggttttatttatgacggcaatgaagttgatttagatgcttcaaaggatgcagacttctcgatggaaccatgctcaaaatcaaagaagaaatctttgaaaaagactgtaaaacccagggatgaagtggttgctgtaaatggacgaaacagcacagggaatgttaaagcatcattgtcctccaatgaacaaaacaaatctcttcctcttatcacggcaaaacagtatgcctgtcgtgctgcacatttgtcttcccttgtagtttcatggtctccagttgtgtcattaagtgatagaacttcttgtttattgaggcattggtgcattcttgctgttggctctaaatctggaaatatttctttttggaaactatataagccagaatattacacaatagatgctggtgtggttaccagtgatccgatgctcatcggggttttgcatgctcatgaatcatgggtcaatgccataacttggcaagttctttctgcgggctcttcaaaatcctcgttgcttttagctactggatgctcagatggaagtgttaagatatggttagggaatattgaagggttaaatcaatgtgcaattggagaagaagtgccatttgtgttagttgctgaggttgccgctaatttatcagctccagtgtcgtcaatctcattgggcatacctgcccggtctcaacatgaggttagtttggcaattggaagagtatccgggttactagaaatatggatatggaatgcatctaccaacaaaattgagagttccagtgcatggcatgcacatgatcaagtggtttacgatgggctatcgatggcaattgtttattcagctgcagtcaggacaattctacacgttgttggatatctcacgaaaaccaccttgaagaattttttttgcattcagaattttcagagctaagggagtcagaagatctatcaaaagtttctgatcgatgctatggtcttacgctatcacctggagaagagataattgctgtggtccgcagtttggatctgaaccttttgaaccagatgtatcaagtcaggacacaaaaggcggtggtcgagttcatttggatcggtggccaatttgttggtattccactggacgggagtatcgatatttgcagtccgcagtctgcggacttatcctcaagtaaccttatgtggtggggatccaacatcttgtggtcgctgaagaaatacgaaaatgtcgaaaagaggcttgtgttgtgggacgttgtagctgcgctgcaagagctgaagaaaaccgcgcccgcctttctggagactctagtgcacagttgggcctcagctttatttgcgggcgactcacagtgtgtttctatcactgcccagtcatcacgctcgatgcatgacatgatgccccatgtcagctcgcggaagctgcacttactgaacataatctgcagaaaagtgatgctcggcaatcatgcgcggcatggtcctggtgctggaaacaacagtaatgatggaacaactgatttctggagcactcttttggtagcgagtgaaacggagctgcgagagaggctggtgggtttcacctttgccgcggtcgtgaaacggacagcgtgtctgttcaacggcacctccaccgcaaattgctggttccctgtcggcgtcgcccagatggattcttgggtatccatgaactacgaaaaggtgcacggtcagctgcagtcgatcagatcgaagatcaaagagctaggaagcaggatcgacggatactccgacgtagaaagctgcccctactgctcttcgccggtccgtttcgagtcgcctgacgtggccatctgcggagaaaggcacacgctgtcgcggtgcaggacatccatgaccctgtgctccgtcgcgcagccagtgtggcactgctcgtgctgcgggggcacggtcgacaagctgctgccggagtcgttcttcaccatgcctttggacgccgtccgtgacgacaaaggatcgctcgatctgtcggcagcctccgccccgctttgccccttctgcggcgtcctgctgcagaggtcgatgccggcgttcctgctctccacctcgccggtatagtcttcggatgcccccaggtgttacatgcagtagcaatgcaatgggaatatcgtagtggagccaactaccaagtttgttgtagctgatgctgtatggctgcagagtggcagtgccgtcattggggctcgaaatgtttgtgataggttttgtgacttctttctgcttagcccctctaatatatctcgagatacctattttttatttaccgtaccctgcctctggaccaaagcctatgtggcggtggccgccaggctgagtgcggggcgaggggcttgggccagctcctgcactcagcctgatgaccatgtccgctggtgctgtgcccgctgggggtgggcgccgttctgtgtctcctgtgggtgtgggctgtggcatcgacgtgaccgagagcatctcgtgcaacgctagtcgaggcctcctctgatggctccatgacatgcgcctcatcaccggtaagccctgagcctgcgccatgtgtgtggcgcttaaagatc

SEQ ID NO: 47351 - DNA, 6114 bp, Zea Mays
ccctcacacccgactacaaaaaccttccggcgccgccgcctgatcgctccagcgccctcgccgtcggcagctcggccgccgtactcccgctaccgagctaggaggcatcaccttcgccggtccaacatgggtaagacacgtggtatgggagctgggcgcaagctcaagacccacagaaggaaccagaggtgggctgacaaagcctacaagaagagccatctcggcaacgagtggaagaaaccctttgctgggtcatctcacgcaaagggaatcgtccttgagaagatcggcattgaggctaagcagcctaactctgctatccgtaagtgcgctcgtgtccagctggtgaagaacgggaagaagattgctgcctttgtgccaaacgatggttgcttgaactacatcgaggagaacgatgaggtgctgattgctggattcggtcgtaagggccatgctgtgggagatattcccggcgtccgtttcaaggtcgtgaagcgtacgacatttttctatcctgttgctaatccgggcgaactagcaaagcagtgcaaatctggaaaccgcgacctgatcgcagaacgccagaacaggaggctcgggcccgtaccgtaccgcatccctatcattgccaggtcagcagcctatccggccgcccccgcccggagcacgccgccggcgccgacgtcggcgcgtcgcatggatatggcccccgcgtctgtctacttcaacccgcgctcggtcgaggaaatcttcaaggacttctccggccgccgcgcggggctcgtccgcgccctcacctccgatgtggacgatttctgcagattgtgcgacccagataaggagaatttgtgtctctacggccttcccaacgggagctgggaggtgtcgccgccggcggaggaggttcctccggagttgcccgagccggcgctcggcatcaactttgcgcgcgacggcatgcagcgccgcgactggctcacactcgtcgccgtccactctgactcgtggctcatctccgtcgcattcttctacggtgcccgcctcaacggcaacgaccggaagcgcttgttcagcatgatgagtgatcttccttccgtcttagaagcattcgcggacaggaaacacggcagagataggtctggggttgatagcagcggcaagtccagacactcatcaaagagaggaaaagatggccatgccaagagtttcagggcagcagctcctgccgccaaggagtatgacgaagacgatgacgaggaagacgaggaggagcacacggagaccttttgcggaagctgcggcggcctttacaacgcgagcgagttctggatcggctgcgacatctgcgagcggtggttccacggcaagtgcgtgcggatcacccctgcgaaagcggatcacataaagcactacaagtgcccggactgcagctcgaagaagatgaggcagatctatgatgccgtgattaagacggggacggaatccaacgcgggcaaggccgcgctcgacgcgttgggcgctgagctgactacccctctcgtcgccgacgtgctgcaccgcctccgctacgaggagaagctggcgtttcggttcttcgcctgggcgtcccaacaggacggctacaaccacgaaccgacgacttacaacgacatcatcgacattctctccggcacgcgatacaagagccgccagttcggtgtcctctgcaacgtgctcgatcacatgaagcgccatggctcgaggtcggtgccggttgaggaccttctggagatcctgcgcgcctacacggagaagcatctcacgcacatgagaaagctggccaagaagcggcgggttcggatgcgtacgccgccagagactgatgcgctcaacgttctgctggacgcgttctgcaagtgtgggatggtcaaggaagcagaggcagtgtttggtcgcgtgaagaggaagttgctgggtaatgcagagacatacagtaccctgttcttcgggtggtgccgggcgagggaccccaagaaggccatgaaggtgctcgaggaaatgattcagatgaagcacacgccagagagtttcacctacgttgcagccattatatcattttgcagcgctggattggtgtcagaggcaagggaactgtttgagttcatgaggactgaggggttgacgatatcatcgcccacagccaaaacatattcgattatgattgttgcattagcaaaggctgaccggatggaggagtgttttgaactgctttcagacatgagaagttgtggctgtatgcctgacgtgacgacttataaagatttgattgaagggatgtgcttggtgggtaaactggatgctgcttatcgtgtgttggacgagatggggagggctggatttcctcctgacattgtcactcatcgaaaggctgatgatgcacttgaactctgtgagaggatgatagaggcacactgtgagcccagtgttcatacctataatatgatgatgatgatgttcttcgagatgggagaggcacatagagcattagatatatgtcttgagatggacaaaagaagatgtcaacgtgctatcgatacctacgagataatgatctatggtctctttgattgtggagaaacagaatatgcaactgctcttctagatgaggttataaaccgtgacatgaaactttcatacaagaagtttgatgctataatgctgaggagcttattcaaaggatcagaaggctgatgaagctattttggaagtgttagaccttcgatggtatgccattggaccaaagtattaattatatatgcaacgcttgtatcatctgttccactaataccagcagtgtgctattgctgtttgttctagcctgctacctgcaattgttagccgattaccataagaatttaacaactttttaaacctaaggtgtctatgttggtgatccttctaagctcagtatgaaggctgcatttggaaaggtttggtggttgaaagaagctgatggtagtattattggtggaaccatcaagacaaattcaggaaatgagcaagaatccaaaaccacccagggatgcgtaagagattgatgcattttctttttgttccactaattggctgttcccggatatatatgcaacgctcgtgtcatctgttccaatacttgaagaagcagcacgctacgagttgagatatgggcacagaaatagagctacaagaggaggtggatattttggcatattacacgttgagtggtgaactcaagtatcagtttgggtctggaaggtgaagctgatcagttgctgctggatgaggcttctcaacgacggcttctcgacaaacatcattatgcccgagtgccaggtggcagagcctgcacttaatcagaaggaggaagttatgatagaatatcgaccaccagcacctgcagttcattctaggcctgcaccccaatggatatgcccagtgtcttttatagagctcagtaaaactaccttcccttcccctctcgtctatgcatgttgtggaggtttctacctacaagactggtctttagcatggtatggcagcatgtttgtgtatccactctgtagaaaatatcttatgcttcatgtctttagcatggcacttgtgtctcaaatcctttcaacaattggatccattttagtgaaaccaaccatgcggaggccagggtccacgatcaggtggtccaatagtgtcaggttgaagtcccccaagctgatcttcaggatcctcaaagaggaagacgtcggcgcgcgcgcctgcctgaagctgaggccggtgagcgtgctgatgcagctcatcacctgtggctcgctctcggtgaaggatcacgggaacgctggggtcgttcagatgtgcaagccgaggttcccgaaccttaggttgctcccctcgccgctgatctcgcgcaccatgatgatgggcgagctcgactgtctctcagaaaaccccaagttgatggggataaagctgtaggagcaggagtacttcagcgggagccttgttgagaccaagaagacgcaaagagatggtccggctaagaggtatccggcgcttaaacgttcttcttcctacaatgtagaaaggtaagcttgatgagtgctttgctatgttcttgatatcctgcttaatcaaattgatatctgggcacacataaatatgtctaggctaactgttgaaaccctacatgattctttgatgttacttactggttgtcaattttaaagaaaaaatgttgcaacccaactgtcgagaccttctaattcatgactccgtaccattttgcgttgtagagtttgcttaccaatttgatttatgttagttatgtttccttttcgaaaactatgtctcattaagagtagaaccgatgacatgtgggcattggatccaaaattttgcacgaactgttgatagggacgcaaaccgttattgttgggtttaggcttgggatcaaagagttaagaattggagaagagccatgtactgaagaatatttatgaacgctagcaccgttgcttttgtcgttgcctaaaacactaacaggttgataccagaaacattgtatggttgtcatatagcgccagcatgcagctggcatgtatctatcaaacaaaaataccaaagtacgggaatctacctgccgggagagaatttgaggcctgtaggatcccaaatcggtaatgagagatttgtaaatgaggcgtgctcgcaccctgactgttcatctactccaccgtcacctcgcgtccgccctcgtcacattggttttcgtcgaggtgagttctccctccgtcctttttcctctgccccaccggcgttctctgagaatcagccggttctccgtcctccgatacgaagggacaatgtgctccacggagagctagaacaaattggaacgatgaacatggttatgcagtaatttggttctacctcatgtccaaggttgccaatatatacaatagtacaatcaggattgttctctgggttctctttaaattatcatgatattatatgtttccgttgcaacgcacgggcactaacctagttattaccttagtttagtagtcgattgagtgttgcagctcagaaaccacaagtacagcaagccatgactcttggtccacacgcgcgtcatacattatttaccatctcgactaaaaaccccatcatactttttgctcggacagaatttatcggagaaattaaacttggccctatctttagttatagcaaaagatagtagccgggccctcagttttggccaccttcctcgcttcaactggtcgtcggccccggcgccggtgccggagccggcgcagatcccgtctcatcagccagcttcatgtcggaatagacgacgcggccttccgactcggagtcggtgctgttgtccccggccgaggcgtcggagctgttgttgtccccggccgagtcgtcgacgctgtcgaggatgcggattctgttcttgccggcggaggcggtggtggcgaggtggcagatgagcagccccaccagcgccaagctcagcaaggccacgcggatcctggtgggcgccatcgcgcgtggaatctagctagtcgtagcagaatttgccacttgggaatcgaaattcgacaggcatactactccactatagctgccgtcggtcggctagctacgaaatgtagcctctgctcttgagggcctccacagcgtccctgatgatcttctccagagggctgaagtgcagccccaacgcgacgagcttcttggacccctcctcggctccctgtcgcaccagcccaggctgggtatccttggggaacctgcaacggtacagctcggcgaccttggccgcgaagtcgctccagtgggagatggactgggcgcagatgtgcctcccggacgctgccgggctctcgaacaccaggatatgcgccatggcggcgtcgtgcacatgcaccgcccccatccagatgtccctgtactcctccgtgcaacctgcgacgacgaacaggccggcatccatcctttattttcttcttcattattgaataattagacaaattttagattaaattctgaatataaatcatgacaaaatcagaagcactgaagtaaaaa

SEQ ID NO: 47352 - DNA, 2104 bp, Zea Mays
ttatttgtttgtacgacgtgttgaatgcatattgtggagctggacagtttggcctgcaaaatgtttctctgcagttttacaatatgtttagcttacatgaactgtatatggctctgtgatcatctacaatatgtacatcaaggcactctggttgcctccctgatgccatcatctacaatatgtacatcgaggggttgtataaactaccaactattatgcatattgtcgcattcgtagaatgatcagtcaaagccttgatcacatacatatgttcaacataacttatgcttcaggtctttagcatggtatggcagcatgtttgtgtatccactctgtagaaaatatcttatgcttcatgtctttagcatggtatggcaacatgtttgtgcatccactctgtagaaaaaagatgtcatatgtactgtatcgacactagaattttgtgttgttttttcatctgaaaatgtaggtggagaacaatgaactttaattgagtatgttatttctccaattatactggatgtttgggcacacccgttcatcagcattgatgttgtcgaagtgttagagtttttaggctatcaaggctcttggatgcttacaggcacttgtgtctcaaatcctttcaacaattggatccattttagtgaaaaatttatgatgtcactgccatggtgaaggtgaccaaccacgtaggcgcccacaccccacgtgtgtgtacctatttgcggcgtacccggcgttgagcttgttgttacagccaaccatgcggaggccagggtccacgatcaggtggtccaatagtgtcaggttgaagtcccccaagctgatgtaagcaacttatagccttaataattcctgctttgagctgcttcgtgcaagatattgctcgcatctgtaggcttagtggtatttagtttatggaatgaaattgtccattatcatctcactctttatttttgtttggtttatggaatgaaatgagttgatcaagctggcttcgacaagtggcaacctcgtgctatacaagtaatcatgttttttgtcagtgagttcgtttcttttgtcacctacggtgcatctggctataagaagataagatttggtaaagacgtttgttctgagttatccaacctagagaccgagcataacgaccttacatatagggattgtataaagtcaagctatcaaggctagctaccatgctgcatccagtggagaactagagattaacacgtattttatggatgcatgtttacatccttaaaacattaatatataggattagaataaaactgcagagttgtttgagggatatggccatatcatacatgaactgattgtcaatcgtgcgatccgtacagaggaaaatgtaacctattttagcctttttgatttgagatggagtttttgttgttcatatatgagcaattaatatttgtgattttgaattgtttgatgagtcatactgtaccttcctataaaatgggatatttaaagttcatgtgaaagttcaatcttgttttctctaatcgtgtgacttggactgttggagaaatgttggctaatttcacttgttttcaggaaataggtggattgctctggttgttgagaagtttgttgaacccgatgtttccttggttccaacactgtcatgctccatcgattattttggagagttgatcagtgggcagaaaccgtggaagaaaagctgacatttgcactcacccgagccctatcagcagcgccggccctggcaggggtcgagcagtgccctcaaccaggcccccagattaatggagcctccctttaggtactaaataacattacgtatatacatgcatatatcatatattgtatatgtatgtctgctggctctacagaactttgaaagacgtaattataagcaaggagaattaggcgtagcccgtcaatcttgatttctatattgcagtagtagtacttcgtagtctcaggcccatctgtctaggctctcggtcgcagacagacaagcggtcgtgtcctctcctctcggtagccaacacacgacattgggtacgacggcgtttttgtcttgccctacacgacgaaaaagaaactaaca

SEQ ID NO: 47353 - DNA, 997 bp, Zea Mays
cgggtaccaaccgcatccctagtacagatcgagtgtaccgtagccactccacgtctccacgctccacggtcccactcgcaccccccgacgggtcggaacctcagctcagaggatcggaagaacggacgacggcgagatggcaagcggggaagaaggcaagggcgagacggtgctggtcaccggggccagcggcttcatcggttcgaccctcgtccgcggcctcctcggccgcggctacaacgtccgcgccggcgtcctcgaccccgacgacagggcggagacggaccacctcctcgcgctcgccgccggcgccggccgcctcagcttcttccgctgcgacctcctggacggcgccgcgctgctcgacgcggcaagggggtgctcgggcgtcttccacctcgcgtcaccctgcaccgtcgaccccgtcaaggacccccagctgatggtgcctgcggtggaagggacgctgaacgtggtgcgcgcggccaaggacgccggcggagtgcggcgggtggtcgtgacctcgtccatctcggccgtcgtgcccaaccccgggtggcccgccggcgaggtcgtcgacgagcgttgctggaccgacatcgactactgcgagaagaatggggtttggtaccctgcttccaagacgctggcggagaaggcggcgtggaagtttgcagaggagaacgggctggatgtggttgtggttaacccggggactgtgctgggcccgatgattccaccagccatcaacgctagcatggccatgttttgtcgcctccttcaaggctgcacggaggagtacgccgatttcttcctagggccagtgcacgtggaagacgtcgccatggcgcatatcctggtgttcgagagcgcatcggcgtcggggaggcacctgtgcgtccactccatctgccactggagcgacttcgccgccaaagtcgccgagctctaccccgactacaaagtgcccaaacattgtgctgtgttgctttacctg

SEQ ID NO: 47354 - DNA, 1560 bp, Zea Mays
caaccgcatccctagtacagatcgagtgtaccgtagccactccacgtctccacgctccacggtcccactcgcaccccccgacgggtcggaacctcagctcagaggatcggaagaacggacgacggcgagatggcaagcggggaagaaggcaagggcgagacggtgctggtcaccggggccagcggcttcatcggttcgaccctcgtccgcggcctcctcggccgcggctacaacgtccgcgccggcgtcctcgaccccgacgacagggcggagacggaccacctcctcgcgctcgccgccggcgccggccgcctcagcttcttccgctgcgacctcctggacggcgccgcgctgctcgacgcggcaagggggtgctcgggcgtcttccacctcgcgtcaccctgcaccgtcgaccccgtcaaggacccccagctgatggtgcctgcggtggaagggacgctgaacgtggtgcgcgcggccaaggacgccggcggagtgcggcgggtggtcgtgacctcgtccatctcggccgtcgtgcccaaccccgggtggcccgccggcgaggtcgtcgacgagcgttgctggaccgacatcgactactgcgagaagaatggggtttggtaccctgcttccaagacgctggcggagaaggcggcgtggaagtttgcagaggagaacgggctggatgtggttgtggttaacccggggactgtgctgggcccgatgattccaccagccatcaacgctagcatggccatgttttgtcgcctccttcaaggctgcacggaggagtacgccgatttcttcctagggccagtgcacgtggaagacgtcgccatggcgcatatcctggtgttcgagagcgcatcggcgtcggggaggcacctgtgcgtccactccatctgccactggagcgacttcgccgccaaagtcgccgagctctaccccgactacaaagtgcccaagttccccatggacacccagcctgggctggtgagacaggaggtggggtccaagaagctcaccgcgctggggcttcagatcacccccatggagaagatcatcagggatgccgtcgagagcctcaagagccgaggccacatctcctgaatcctgatggatggcaggatgggcagtgcttgtgatgcgtgaggccgtacgtcatggaccttgctaagttgctagcgtggcttgtgtaactagttgtaataaataatgatgtcaccagacgacgacgacgaacctgagaaggaaaattgagctaatagctcgattttcagttcttaatcacgaagtttcaggtaccgaactggattggattctttgtcgcagatgaggcctagagacacacgctgaacgttctgatagttgccgtcaactgtacttggccacgccatttgctcctcctcttctttggcctgcactctgcacaaagttcagtaatgtgctttggtgcaggatcatgagcaactgtatacagattttttgggggtgcaaaacagtgaagcaccctctaaagcctttcgttcggttgtacgtggatcggaagtggttgagagt

SEQ ID NO: 47355 - DNA, 1506 bp, Zea Mays
tgcacctactttttttccctctcgtctctgttgcccggttgcccctcgctgtgacgactgacgagcaaccaatccacccaaatcccagaccgagctccaatcctcagcgccgccagtcgcgccgcctccgatggccgcgcggcgcgggccccacgtcatcaagctccacgatcccaacccgcccctcctcggccgggcgccggggaccgcaccggccgccatccccgcgccgtcgcgcgatgagggcatcctcgcgcagcaccctcgcgccgccccctcgagcgcatccgcctcgcacccggccttcgcccttatcgaggagcgcctcgtagcccgggaccaggacatccaggagctcctcgtcgacaaccagcggttcgccgccacgcacgtcgcgcttcagcagcagcttatcgcggcgcagcacgagctccgggcggtctccgtcgctgccaccagggcgcgcgccgagcgggaggtcgaggtgcgagcgctggccgaccaggcggcccacatagaggccgaggcgcgggccgtcgccgctgcgcgcgcggaggtcgaccaggttcacgccgacgtccaggtgctcgtcgcggcgcgcactgaccttgtcaaccggctccagggcctacgggagaagctcgcgcacaagaaggctgaggcgagtaagaccgattccgtccgtgcccagattgaaaccatgcgccgggagatccagaagggcagagctgcggttgattttgaaaagaaggcacactctgataaccttgaacaaagtaaagcaatggagaaaaatatgattgctgtggctagtgagattgagaggcttcgaggagagcttgcaaatgctgaaaaaggggccaccgctgtcaacccagcagcagctggtatgttgcggcttatggcaattctgagccaacatatactgcaatgtatggcaatcctgatgcaacatatactgcacaggcctatcctgatgcttataacactaatcaggctcacatgcacgctggtgccagttcctattacacgagtcaaccattttcctatggacaatacgagagccagcacaccaatatccaaagatgactgccggcacaagatagctttgactcgtctgccatctcattctcgctgtaaaaggatagtcgcagaatccaccggattaagcatgctagaaaaatctgttgcatcggagcgctggaactcctcgtggtcatgtttgcttttcttttctggctaatttgttccagaatggatgggtcgaattttggagcaaaaatctttctggcttctccatgtactaccataacgatttgtcagttaattctgcagattggtgtggtgttattcagggccgactatgatgcctctagccatttgtgtacatacgtataaatgaactaggtgagtgcccgtgcgttgcaacggaaccgtataataacacgataacttatgtacatatgtgtgttatattgttatgagaaaatgtttcagaatccattt

SEQ ID NO: 47356 - DNA, 1923 bp, Zea Mays
ccctgtttccctcactcctccccatgcctcaacaagcgtgacagttgtctcagtactccacagtgagtgagagagagagagagtgtgtgtgtcctgtgtgatcttcttcttgaactataaatagggcaaggcacttggggccattccatcttcattcacttccagcagtagctcacactccgatccatatatatatgggctagtgcggttgcttcgacagagcttggtcttgcgctgctagctgcaaagaacgacgtagctactatacatacacatattcatactcatagataggaatagtgttagacatgtgatggtgagaacctgatcatgcaagcatctgaggatcggagaaggaaggaagggtatggaacagtccttgaagctcaggagggatagcgcctaggaaatcacacatagattggagccacgaagaggaagggagaatgagagagagagagacagagcagctatgctgctctgtctctctctctcactttctcttggatccatctcaaggttctgtctatatatgatgaatcgatccgaagcgctatctatcctgagctccacggcttgttcttaccagttacgtaccacgtacgcgccgccgccgccgccggccgatctcgagctcctcgcgcgctcccagctagaattgccttctgtgtgcgtcgtactccttcattctttcttgttgagatgcaggaggcgagcctgagattgatcgaggtcgtcgtcgtcgtcgtctcgtcgctagtagcttcgcttcaagttcaaggacatcatcgtccccggccggccagtgcgcgtccgcggccgatccaggtgtctcatcctgctggctccatgcatgcatgcaggcatgattactttagtagtatatccgtgtgcaggcggatgaggtgtgtgtgcgcgcgctcaccagtcgcacgtgttatcatgcatgcatgcaacttgcaagagctttgacaagttatgggccggggcacgcacgccgcagcgcccccgcccaacttgcaagcgtgcagtaaatgctgacctaaccaattcaagagcatgtccatcatgcatgatgcatctatctcctaaccaattcacgtatattcacctgccaatgatcaacggttgttttttctgctccaacacacctcccatgcatgttccttcttaaagtttatctatcccatcttattttccattttttattcgggtctgattctttgttcctgtctagctatatatgattctttgttcggatctagcccgcttattcgtgctggtctagactagatcttccgttttaaacgatggtgggctgagctcgtatcaggctaaaaaacatgcttcgagtcaggttttgggtttgctggacatctatactcccaactagtattggtggagtcgttgaaagcctgcttgttatgttcaggttgttacggaaatggagaacgttgccgaaccaaacaaagggtgttaagcaccagtacactgtaacacataggggaggcagtcgatcccgttgtcgttaacgttcacttgattgaaccaaacatcactttaatccgagtcgatgcaaatttatcgtttcgtgctcccgaaaccggggacagcgtcctcgacgtacagcgccagatccagttaatgtgattatgatccatcaaaatacaattgtaaaaaaaaaatctgattttatatctaattagtgcggttctgattcatcgagaaacaataaattactacctccgtatttttttttaaaaaaattggagctaatatttcacatttcttgcttccaaacaggcaggaccgccggagtgaacaaatcctctagtccaaaccaaacgtatcaatcaaccaattttgttgccgcgacaggacggcatacaggccgtgcgcggcgaacgcgaggccgaagaggag

SEQ ID NO: 47357 - DNA, 1077 bp, Zea Mays
ccaccaagttgcgtttgcgtccctggccgaggaggaaagcaactagccagccagtcaccaaacgcgcaacccgatcgagatcgagagatctgcatatgtcagagtccggcccggccgccgatggaggcgccgggggcgggccggctgacgctggcggggtgaggtccatggtgcagcggtggaagatggacggcgcgccggcgcgggcgcggctgctgctgcgggccctggcgtggctcttctccctcctcgccctcgtcgtcatggcgtccaaccagcacggcggcagccaggacttccgcgagtaccccgaatacaactactgcctgggcatctcgatcgtggcgtggctgtacgccacggcgcaggtcctgcgcgacgtccaccgcctcggctccgggcgggacctcatcgcggcgaggaaggcgtcggccgtcgtcgacttcgccggagaccaggtggtgggttcatccggtcgtcgcttacttcttgatatcggccatgtccgcggcggcgccggtgacggactacatgcgccaggcggcggataacctgttcacggactcggcggcggcggcgatcagcatggccttcttcgcgttcgtggccattggcctctctgctctcgtctccgggtacaacctctccatggaggctcttgtatagcctgtgaatcacaactctaccatctcatgtgtgatgtgtcacgttacccaacctcgacactgttcatatagtattgcctccaattgttagttgagcatatttctttttctctctgataaagaagatggaatgtgtaactactgtttaatttacatagaccatgcaaagacgaaagtcaaactcactgagaatgatcctttcaaaagccaatacagtatatatatatatatatatatctattactactctataagacagcaaggagggcgtccacagttgtcgtgcccccgctcccgcacatcgcgccgccccatcttccccgactgtcgtcccgccgcagaaatctcgcccgcccctcccccctcgcccgcacgtggacccgcctctcctcgccgtgatctccacttctag

SEQ ID NO: 47358 - DNA, 510 bp, Zea Mays
ccaccaagttgcgtttgcgtccctggccgaggaggaaagcaactagccagccagtcaccaaacgcgcaacccgatcgagatcgagagatctgcatatgtcagagtccggcccggccgccgatggaggcgccgggggcgggccggctgacgctggcggggtgaggtccatggtgcagcggtggaagatggacggcgcgccggcgcgggcgcggctgctgctgcgggccctggcgtggctcttctccctcctcgccctcgtcgtcatggcgtccaaccagcacggcggcagccaggacttccgcgagtaccccgaatacaagtcgtcgcttacttcttgatatcggccatgtccgcggcggcgccggtgacggactacatgcgccaggcggcggataacctgttcacggactcggcggcggcggcgatcagcatggccttcttcgcgttcgtggccattggcctctctgctctcgtctccggggccccctcattgaagagcctccatctctg

SEQ ID NO: 47359 - DNA, 3148 bp, Zea Mays
atgcagggccacatgctccaggcgttgtgcatccccgccgtgattgtctttgcgagcgccctggtgctggtggccgcggtgttgtgcgccgtcgcggtgcgggcgctgcggcgggcggcggcgcgggagatggcgctgaacgtcgacctggcccggcagaaggaggcgctgcggcaggcagagcgcaagagcatgaataagagcaatgcctttgccagcgctagccacgacatccggtccgcgctgtccgccatcgccgggctcgtggacatgtcccgtcaggaggcgcagtcgctccccgccgtcatggaaaacctcgatcagatgggtgtctgcaccaacaagttgttcgatatcctgaactcaattctagacacaagcaaggtggagtcggggaagatgcagctagaggaagccgagttcagcatggcagacgtcctgcaggagtcggtggacatggcctacgtgacaggcgtccggcggggagtcgaggtggtctgggacccctgcgacttctcagtcctgagatgcgcggctgtcctcggggacagcaagcgcctcaagcagatcctagacaacctactcggcaacgccctcaagttcaccgatgaaggtcacgtcgtccttcggagctgggcgacccgaccgatcaccgggagcaatgtcagagctccgtcaaggtttgtgcacccacggcacggcggcggcggcttcttgggatgcttgttcagggcaaggaagcgtcctggtgaccaggatcatgtgcagaatgaccccaatttggttgagttttactttgaagtggtcgacactggcattgggatcccccaggagaagaagatgtccgtgttcgagaactatgttcaggtgaacaatggccaaggcggcacgggcttggggctcggaatcgtgcaatcctttgtacgtctgatgggaggagagattagcatcaaggacaaagagcccggagaaaggggaacatgcttcgcgttcaacgtgctcctgaggataagcgaggtgcaacagcctcaagacatagaagaaggaccgtcggttccattaggcaccctgaaccgctccatttccatagcctcagcgtttcaagaagccagcaacttcaagggcgtgcactgcgttctctacgttcatgggtatgaaaccaggaggatcctgcagacgtggatggagagcatcgaggtcaaggtctggctggttccgcaagccgagttcatcggttccaccttggagaaggtgcagagcaatagcacggccaccgctaccgcggaatgcggcagcgccgaccggtgcttcagctccaaggagatggtgaacctgttgaggaacaactctagtcctaggagagccatcctcggggggattccttccggtatccttgttgtcatcgacgtgtccggtggtgaaacggaagaaatttgccaggagatggccaagctttccaggatcaagcatcaagccccatgcaaagttgttctgctcgaggatatcaagaccccttccaatgatctgaggaggctcaaggacatgggctgcgatctcgttttgcgaaagccagtgcacgggtctcgccagttcactctccttatgaccctgagagacctccaagttttagatgcacaggcacagtcttcccatgttggccctgagattgctgggaacagccagcaacaagatttgccggatgttgttgttccttgcgtggaagacactgttgcatcaactgaagcttcatgcttggctcagaagcctggagatgataagccgctagccgggatgcgaatcttgctggctgaagacaatctagtgctgcaatcaatccaaaggaaaatcatgaaccagcttggagcatttgtcacagtagctcaaaatggaactatggctgtgaacttgctcagagaagctcttgagcaagccaatgcttcagaagaggatatagtgtccttgccctaccatgtcatcttcatggattgccagatgcccggtatggatggctatgaagcgacgaaactcatccgcgaggaagaacaacgctacggaattcatgctccgatcatcgctttgaccgcgcacgacatggaggaggatctgcagaaggccatcgatgctgggatggatcttcacctggcaaaaccaatatcgcggaagaagatagtggacgctgttcgcagtttctgcaaattttctctttcttcgtcccgtcaggaatgccctccttcctctgagatctcggagtcgccctcctcttgcccaagcccagaccgatcgaggaccagccctgcatccagatctatgttttttgtgcccctccacgtgatccctgctggcggaggtagcaccgtgtgggagaatgacgcccccccacttcggcaatatggtcgcacggtcgcacccgtggtggcctggccacatctacaaagtcaggctcaccgtctcatcgatgacgatgaggtacaccgcggctaccgcgacgggttcatcctggtcgtcttcttcggcgacaagagcacgggtggttcgagcccggcgagctcgtccccttcgaggaccgcttcaccgagaaggcagcccacgccgaggccgtcgacaagcgacgtcattttcttccttgtcaatctcccggcattcgacaccaacgttgactaccaccgccaccagacccaggccgcgcggcaacgatttgtgcgcagaaggagctcgactaagtgcttaacgctgccatggctgatggctcaacgggacgcggcggaaaaggctgcacacaccgtgccagggatggagatgaccacgttgttctcagcgtaccgtcgcgcagtgttttcgcccatagaccacctacgcccaagcgttgggacttcggggtggatcccgagcttccgcttgctacggactagagagccacggcggcagagcgagctcaacaaggtatcaacactaattggtatagcagtaatttgttcatgtttgcataacatcatccctactaagttttgctaatgactttcctgaacactttttattcaactgtaagaaacaaaggcatatgagctacatgcatcctgtatgagtaccatgtttcattagatgaagcagtattcctttaacttttagctaaagtatatgtgttctgttt

SEQ ID NO: 47360 - DNA, 4258 bp, Zea Mays
atgcagggccacatgctccaggcgttgtgcatccccgccgtgattgtctttgcgagcgccctggtgctggtggccgcggtgttgtgcgccgtcgcggtgcgggcgctgcggcgggcggcggcgcgggagatggcgctgaacgtcgacctggcccggcagaaggaggcgctgcggcaggcagagcgcaagagcatgaataagagcaatgcctttgccagcgctagccacgacatccggtccgcgctgtccgccatcgccgggctcgtggacatgtcccgtcaggaggcgcagtcgctccccgccgtcatggaaaacctcgatcagatgggtgtctgcaccaacaagttgttcgatatcctgaactcaattctagacacaagcaaggtggagtcggggaagatgcagctagaggaagccgagttcagcatggcagacgtcctgcaggagtcggtggacatggcctacgtgacaggcgtccggcggggagtcgaggtggtctgggacccctgcgacttctcagtcctgagatgcgcggctgtcctcggggacagcaagcgcctcaagcagatcctagacaacctactcggcaacgccctcaagttcaccgatgaaggtcacgtcgtccttcggagctgggcgacccgaccgatcaccgggagcaatgtcagagctccgtcaaggtttgtgcacccacggcacggcggcggcggcttcttgggatgcttgttcagggcaaggaagcgtcctggtgaccaggatcatgtgcagaatgaccccaatttggttgagttttactttgaagtggtcgacactggcattgggatcccccaggagaagaagatgtccgtgttcgagaactatgttcaggtgaacaatggccaaggcggcacgggcttggggctcggaatcgtgcaatcctttgtacgtctgatgggaggagagattagcatcaaggacaaagagcccggagaaaggggaacatgcttcgcgttcaacgtgctcctgaggataagcgaggtgcaacagcctcaagacatagaagaaggaccgtcggttccattaggcaccctgaaccgctccatttccatagcctcagcgtttcaagaagccagcaacttcaagggcgtgcactgcgttctctacgttcatgggtatgaaaccaggaggatcctgcagacgtggatggagagcatcgaggtcaaggtctggctggttccgcaagccgagttcatcggttccaccttggagaaggtgcagagcaatagcacggccaccgctaccgcggaatgcggcagcgccgaccggtgcttcagctccaaggagatggtgaacctgttgaggaacaactctagtcctaggagagccatcctcggggggattccttccggtatccttgttgtcatcgacgtgtccggtggtgaaacggaagaaatttgccaggagatggccaagctttccaggatcaagcatcaagccccatgcaaagttgttctgctcgaggatatcaagaccccttccaatgatctgaggaggctcaaggacatgggctgcgatctcgttttgcgaaagccagtgcacgggtctcgccagttcactctccttatgaccctgagagacctccaagttttagatgcacaggcacagtcttcccatgttggccctgagattgctgggaacagccagcaacaagatttgccggatgttgttgttccttgcgtggaagacactgttgcatcaactgaagcttcatgcttggctcagaagcctggagatgataagccgctagccgggatgcgaatcttgctggctgaagacaatctagtgctgcaatcaatccaaaggaaaatcatgaaccagcttggagcatttgtcacagtagctcaaaatggaactatggctgtgaacttgctcagagaagctcttgagcaagccaatgcttcagaagaggatatagtgtccttgccctaccatgtcatcttcatggattgccagatgcccggtatggatggctatgaagcgacgaaactcatccgcgaggaagaacaacgctacggaattcatgctccgatcatcgctttgaccgcgcacgacatggaggaggatctgcagaaggccatcgatgctgggatggatcttcacctggcaaaaccaatatcgcggaagaagatagtggacgctgttcgcagtttctgcaaattttctctttcttcgtcccgtcaggaatgccctccttcctctgagatctcggagtcgccctcctcttgcccaagcccagaccgatcgaggaccagccctgcatccagatctatgttttttgtgcccctccacgtgatccctgctggcggaggtagcaccgtgtgggagaatgacgcccccccacttcggcaatatggtcgcacggtcgcacccgtggtggcctggccacatctacaaagtcaggctcaccgtctcatcgatgacgatgaggtacaccgcggctaccgcgacgggttcatcctggtcgtcttcttcggcgacaagagcacgggtggttcgagcccggcgagctcgtccccttcgaggaccgcttcaccgagaaggcagcccacgccgaggccgtcgacaagacccaggccgcgcggcaacgatttgtgcgcagaaggagctcgactaagtgcttaacgctgccatggctgatggctcaacgggacgcggcggaaaaggctgcacacaccgtgccagggatggagatgaccacgttgttctcagcgtaccgtcgcgcagtgttttcgcccatagaccacctacgcccaagcgttgggacttcggggtggatcccgagcttccgcttgctacggactagagagccacggcggcagagcgagctcaacaagaaccactttggggccaacagtgtcgtaacaagagggcccctatcgtgcccacctttgggcgtttcccggcgctcgtgggctaacacaagcgagccccttcactcgctctcaaaacccgggctgtgagaggaggggaaatctcacttataagctcaccacggccccctccggctagcgaggtggtactaaagccgggcgctaacggctaggctcctgacatcccatcccccttttcgggcggtatggcgactgtctgcctctgataccaattgtcagcgaccttcccggcctagcccactcaacgctacacctttgggcgtttcccggcgctcgtgggctaacacaagcgagccccttcactcgctctcaaaacccgggctgtgagaggagggaaaatctcacttataagctcaccacggccccctccggctagcgaggtggtactaaagccgggcgctcctccatattatgctgctaatataacatctagatatttttttactgtaagaaccctcagtgtaggctccaagcggtaagcaccactgcagtctgcagttaaaatgcgtgtttccctctacattgattatgcatctatttaaatttggcagtgttctgctcaacaaatctgcttaacatatcagcaacaataccgtctggaagacaatttctgctaatgccaactttttgatcctccacttgtgtgcagctttctcaccttagatgcatttaaaatttctctatgcactgatagactacttatgataatctaatgttgattccaacaaacataagtgtcacttcctttggcttagaacctaattttatagatgtgtttaagaagtatgcattcgcggcttctcaccactccctaatgttggtgcgtgttgttttgaccacaaattcgttctgaaaattttaggtttcaaatgccaatacattttaaggagatgtacatgttagaaatatttttctaaaaacttggttagaattagagaagtctgacttagaaccaagattataaccaagattaaatgacctataatttggagcaacgggtccagtttaaaggcattcataaaccactgtaccatcgtaatgcagaatactggagatggctacctgaacttatgctgagaatcaagaatgtttgagtgcggtggagcatgattctctattttatgttgtgacagttgtcaattatggtgaagcaaagttttccttagtaactcgacttttggtcgatatattgtattgctaccataaacttgttaaaaaattttacatgttgttaagaaatggattgtgttcatcaacctttttggtactcttagcctgttcagttcaaaaactaatacacagatttcctatattctctagcatttgtt

SEQ ID NO: 47361 - DNA, 3231 bp, Zea Mays
caaaatcctcgcaaaacccttgcttccacttccgccattctttccccccaatgcggcagtagcctccccgcagcacccgcgaagcgatggccctctccgctgcgcttcgcctcccgctcccgctccctcgccttctcggtccctccgccgtcatcttcggcgccgcctcccgccgccgcgctgccgccgccgccgccaacgcggccgccctccgcctcctctcggcctcgtctcccagtcccgcgtccttctcttcgcggcccacgcgtcccctccgctcgcgccgccgcaaccgcggcgacgatgggagggcggcggcggccggcggggccggcggtggggagggcggcggagctggactggtggtcaaggagcggattctgcccgtcgagctgcacaaggaggccacggaggcctacatgtcgtacgccatgtccgtgctgctcggccgtgcgctccccgacgtccgtgacggtctcaagcccgtccaccgcaggatactctatgccatgcatgagatgggccttgcgtctcgtaggccattcagaaaatgtgccagagttgttggtgaggtactaggtaagtttcatccacatggagatactgctgtatatgaaagcttggttagaatggctcaggatttttccatgaggtacccgcttgttcaaggacatggaaactttggctctgtagatgcagaccctcctgctgctatgcgatacacggagtgccgcttggattcgttagcagaagccatgttcttgactgatctggagctgaacacagttgactttgtgccaaactttgataactcacagaaggagccatctctactgccatcccgtgtcccatctttgttgttgaatggttcttctgggattgcggttggaatggcaacaaatattcctcctcataatctgggagagcttgttgatgtgctttctgtaattattgaaaaccgtgaagctacactccaagaactactggaacgcatgcctggtcctgacttccctacaggagggacaatcctgggaaatcaaggtattttggaagcatataaatctggacgtggccgcattgttgtgaggggaaagactgacatcgaaacaattgacgagaaaagcaagcgcacagctattattattaaagagattccataccaaactaacaaagctactcttgtacaaaagatagctgagcttgttgaagataaggtattggaaggtataagtgatattagggatgaaagtgaccgcactggaatgcgtgtagtaattgagctgaaaagaagtgcagatcctgctgttgtcctgaacaacttgtatcgtcatacagctctgcagtctagctttagctgcaacatggtggctatacttgatgggcagccaaaattgatgggactgaaagaaattcttcaggcatttcttgacttccgatgctctgttatcgaaaggcgtgcaagatataagctttcacaagctctagaaaggaaacatattgtggagggaattgttattggcctcgacaatttggatgctgtgattcaaataatacgagaaacatcaaatcacactgcggcaacaagagctcttgtcaatgaatttgatctatctgagaaacaagctgaagcgctgttggatatcacactaaagaagcttacttcccttgagcggaagaaatttgtggatgaagctaaaaccatgtcagaggaaatttctaagttaaatgagcttctgtcaagcaagaaacttatcttccagcttatacaacaagaagccgccgatttgaaaagcaagttttctacaccgaggcgttctgtgatagatgattcaataagcagtgaagttgatgacatcgatattatccctaacgaggaaatgcttttgattcttagtgagaaaggctatgctaagcgaatgaaccccgacacattcagtttacaacatcggggaaccataggaaagtctgttggaaagatgcgaatgaatgacagcacgtcagatttcattgtttgccagacgcatgaccatgttctttatttcagtgacaagggaattgtatactcagcacgtgcttataagataccagaatgtactagaactgctactgggactccgttggtacagttgctacctttatctgatggagagcggataacctccatcattcctgtgagtgaatttggtgagaaccaatatctagtgatgctcaccgttaatggctatatcaagaaagtaccccttaatgccttttcatcaatcagatctactggtatcatatcaattcaactggttcctggtgatgagcttaagtgggtccgtcattgtggcaatgatgacctggttgcattggcttcacagaaaggaagggtaatagtcaactcatgtgataagcttcgtgcccttggaaggaataccaggggtgtctgtgccatgaagttaaaagagggcgatatgatggcagccatggacataattccagcaacggtgcacaaaatgcccgaaagatgcaacagcaggctcagagattcgagtcctccatggttgcttttcatagctgaaagcggtattgggaaacgggtgcccttaaatgctttccggcaatcaaatttcaatgctgtaggcttgcaaggctacaagcttccagcagattgtcgtttggccgctgtatttgttgctggtctttcgctcactgaagacggtgaaagtgacgagcaggttgttttggttagccagagtggcactgtaaacagaatcaaagttaaagatatatccatccagtctcgacgctcgaggggagtgattctgatgaggctggagcatgccggaaagatccagtcagcatcactgatatccgcagcggcagcagaagtaactgaagattagtcttgcacccaagatgcaagtagtttagtctgaatttaatccctggcgtacgctgcagcatgaaatttgtctgctttcctgtggctagtaagcgtcaggagtagtcaggttgttgtacccgctgaactcagcgtaattaggaggcttgacatgtattttttggtgtctagagtggtgaatgtaaaatgccactatggctttcaaattgttgggtgataattttggatggcttgtctgcttttagttttgagcatattcactgtaactaaacactcactctaatcagaaaccactggtctcctgattgccggttaggcttgtttgggatttgcgctgttccatgttt

SEQ ID NO: 47362 - DNA, 3945 bp, Zea Mays
caaaatcctcgcaaaacccttgcttccacttccgccattctttccccccaatgcggcagtagcctccccgcagcacccgcgaagcgatggccctctccgctgcgcttcgcctcccgctcccgctccctcgccttctcggtccctccgccgtcatcttcggcgccgcctcccgccgccgcgctgccgccgccgccgccaacgcggccgccctccgcctcctctcggcctcgtctcccagtcccgcgtccttctcttcgcggcccacgcgtcccctccgctcgcgccgccgcaaccgcggcgacgatgggagggcggcggcggccggcggggccggcggtggggagggcggcggagctggactggtggtcaaggagcggattctgcccgtcgagctgcacaaggaggccacggaggcctacatgtcgtacgccatgtccgtgctgctcggccgtgcgctccccgacgtccgtgacggtctcaagcccgtccaccgcaggatactctatgccatgcatgagatgggccttgcgtctcgtaggccattcagaaaatgtgccagagttgttggtgaggtactaggtaagtttcatccacatggagatactgctgtatatgaaagcttggttagaatggctcaggatttttccatgaggtacccgcttgttcaaggacatggaaactttggctctgtagatgcagaccctcctgctgctatgcgatacacggagtgccgcttggattcgttagcagaagccatgttcttgactgatctggagctgaacacagttgactttgtgccaaactttgataactcacagaaggagccatctctactgccatcccgtgtcccatctttgttgttgaatggttcttctgggattgcggttggaatggcaacaaatattcctcctcataatctgggagagcttgttgatgtgctttctgtaattattgaaaaccgtgaagctacactccaagaactactggaacgcatgcctggtcctgacttccctacaggagggacaatcctgggaaatcaaggtattttggaagcatataaatctggacgtggccgcattgttgtgaggggaaagactgacatcgaaacaattgacgagaaaagcaagcgcacagctattattattaaagagattccataccaaactaacaaagctactcttgtacaaaagatagctgagcttgttgaagataaggtattggaaggtataagtgatattagggatgaaagtgaccgcactggaatgcgtgtagtaattgagctgaaaagaagtgcagatcctgctgttgtcctgaacaacttgtatcgtcatacagctctgcagtctagctttagctgcaacatggtggctatacttgatgggcagccaaaattgatgggactgaaagaaattcttcaggcatttcttgacttccgatgctctgttatcgaaaggcgtgcaagatataagctttcacaagctctagaaaggaaacatattgtggagggaattgttattggcctcgacaatttggatgctgtgattcaaataatacgagaaacatcaaatcacactgcggcaacaagagctcttgtcaatgaatttgatctatctgagaaacaagctgaagcgctgttggatatcacactaaagaagcttacttcccttgagcggaagaaatttgtggatgaagctaaaaccatgtcagaggaaatttctaagttaaatgagcttctgtcaagcaagaaacttatcttccagcttatacaacaagaagccgccgatttgaaaagcaagttttctacaccgaggcgttctgtgatagatgattcaataagcagtgaagttgatgacatcgatattatccctaacgaggaaatgcttttgattcttagtgagaaaggctatgctaagcgaatgaaccccgacacattcagtttacaacatcggggaaccataggaaagtctgttggaaagatgcgaatgaatgacagcacgtcagatttcattgtttgccagacgcatgaccatgttctttatttcagtgacaagggaattgtatactcagcacgtgcttataagataccagaatgtactagaactgctactgggactccgttggtacagttgctacctttatctgatggagagcggataacctccatcattcctgtgagtgaatttggtgagaaccaatatctagtgatgctcaccgttaatggctatatcaagaaagtaccccttaatgccttttcatcaatcagatctactggtatcatatcaattcaactggttcctggtgatgagcttaagtgggtccgtcattgtggcaatgatgacctggttgcattggcttcacagaaaggaagggtaatagtcaactcatgtgataagcttcgtgcccttggaaggaataccaggggtgtctgtgccatgaagttaaaagagggcgatatgatggcagccatggacataattccagcaacggtgcacaaaatgcccgaaagatgcaacagcaggctcagagattcgagtcctccatggttgcttttcatagctgaaagcggtattgggaaacgggtgcccttaaatgctttccggcaatcaaatttcaatgctgtaggcttgcaaggctacaagcttccagcagattgtcgtttggccgctgtatttgttgctggtctttcgctcactgaagacggtgaaagtgacgagcaggttgttttggttagccagagtggcactgtaaacagaatcaaagttaaagatatatccatccagtctcgacgctcgaggggagtgattctgatgaggctggagcatgccggaaagatccagtcagcatcactgatatccgcagcggcagcagaagtaactgaagattagtcttgcacccaagatgcaagtagtttagtctgaatttaatccctggcgtacgctgcagcatgaaatttgtctgctttcctgtggctagtaagcgtcaggagtatatctaaacgcccgtaagggaaaaaaagtaggaaaatggagtgcatctaagggatgcttttatatgactgtattgtggaaactcggctctgtaaaagaagtggtgatcaaagatttttcatgggactgttttactgcggaggttttcggtaatcccaaacagaaaggtaaagacccaagtcaattcctggcacaaaaacaggcatctttctgatgtggtgttgaacatatggagcatcaaagaatctcataatgtaataatggcaaccagttaactcaactgaactcttttagctgtttggttcagaaacatctcaaggcccaaattacataaaacaatttaactgtgagaatcttaagcagagctcaaaaactgccgagctcaggggcatacatcttacatacggaaataccaacccaaccctaaatatccagcaccatcatcatcatcatcatccaaaataggtgacataattggggagcttaccttggttgcaatgttgctggacagccagtccaggccttcatacaatccctcacccgttgtagcacaagtgctttgaatgtacctgccgccaaaatccaataaatcaagcaccagctgactgctagctaaataatatactacattaccaagcagaagagcagaactacgacactatgactacatagagcaatataatgaggaaagaagaaatctgttgatagtgtatgataccaatgacgttggcgaagtgaatgcagtccaagcttatcagtgatctcagcggcattcatagcatttggaagatcttgcttgttagcaaaaacaagcaacacagcatcacgtaactcatcctgcaacagcattcggtggagctcatcccttgcttcaacaacacggtccctatcattgctgtccacaacaaagatgagaccctgcgtgttctggaagtaatgcctccacagtggcctgatc

SEQ ID NO: 47363 - DNA, 2301 bp, Zea Mays
aacaagttgattaagtgcacagaaacaccctttgaccttgcaaaggcatatggggattttccaatcactcatcctgaaatgtatgcttaagaacatagttttgatatgaaaacatatctgtcaacattcaataaggcacacacaagtattcaattgaacagaaatataatttaagtaacaaaggaataccagtccaatcccaaactaatatgcacaattgctcaacgtcacaaaggagttcaagataacatcacaaagtagaacctgggtaggagcctctgaaaatccatttaatttggcaagaagcacacccacttcattctgcttgaacttttagcttacgataacacataccagctaccaaaacaaagatacatactaaccaataatagaagcacaaatttaacagcctaaccatgctactctcagtctcacaacagaatatagatcaacaattcaagcatagccacaggtgtgaggtgtacactactcattcctcttgtttttggtagaaactaaacattatcgctggcgattagacaagcacatatctattcaattgttatggagcctgaataacaacagagtaattagcgacgctggatgtaacacagcacagcgcaaccaatttgttccttttgattgctcttcatcatacaagaggctgcagaggcaataccctggccgctcagtcgctggagcccgggccgggcgtcttggacccgattccgtacttctcctggagcctggtgatctcgtcctccttcttcttgatatccgacttcttggacatcttggcgggctggtagtagagcacgataaggtagcggttggcgacgttgaagccggagaggtggtcgacggcgttcttggcgtcgtagatgtcctcgtagacaacgtaagcggtcccgcgcgtgtccttggcgttgcccagacggatctgccggatcgcgccgtacttgccgaagatgtcgtacatctcctcgctcgagatgttgaacggcaggttccgcacgtagagcacccggttcacctccggcgggaggcgcgcattccccttcctcaggcccgccgccgccatcgctgccgcgccgagataacctagggtttggggattggggattggggattggggatttgggggtatgctttgcttgttgcgtatggccacctcttcctcttgcgcttcgggtggagccggcgcacggggtcgattagttgccgactccgggagagttcccaccgacatgtggcccttacttctcaagcggggcccatatgtcggcgtcgagtctcgaagcttcgttttggcgcaataaggcgacctgagtcctgaaccgcctcgagccgctctcggcttcgaatcccgacaacctccctccccaagctgcttagccgccggctgggcctcagacctgcgtcaagcttccggcggcagcccatcgagcaccacaatggcgtccggcggagcggccatctcggcggggcctacaccgccgtcggcgacggcgtcgtcggttgagtggcaccagcggccgccgaacccgaagaaccccgtggtgttcttcgacgtgaccatcgggtccatcgccgccggccgcatcaagatggagctcttcgccgacatcgcccccaagaccgcggagaacttccggcagttctgcactggggagcatagaaaaaatgctttgccacaaggttataagggctgccaattccatagagtgatcaaagatttcatgattcagggtggtgacttcttgaagaatgatggtactggatgcacatcaatctacggtaccaaatttgatgatgaaaattttatagcaaagcatacagggcctggactgctctcgatggcaaacagtggaattaactctaatggatctcagttctttataacatgtgcaaagtgtgactggcttgacaacaaacatgtggtatttggggagtgcttggagacggtttgctcgtcgtgaggaagattgaaaatgttgcaactggagcgaataacaaaccaaagcttgcctgcgttataagtgagtgtggtgaaatgtagtttgatccctttgtgtggctaatcgtggattcttgacgctgctgatgtagaccctgtttggttgatggaagtacttaaacagtggaaacattgatggaaatgtattgtgtctaggcaacctgcagaataatagaccaaaaaaactaatattcttgtttggcttgggagttcggccttctgttgtgcggaacatgtttgatcctgttgtttctgattagagatggcaatggccttgatccttt

SEQ ID NO: 47364 - DNA, 2830 bp, Zea Mays
cggaaagaacagaacgagagaggactcagggggtggcgccatctagcccgcgaaaggagggagaaggcaacgggaaagcgatagcccgtgccgtggcgcgtggtgggattggcggcaaagcaagcgggggcgatcggagagagagatgggagaaattacgcgtcgaccagcagcagccgccgcaaccagcagcccgcccaaccctacccgcgcgcccgtccccctccccgtcctcgcccgcgtcatcgacccggcacccccccttctcgtcttcccctccacctcgtcacgccgcacgggcccggcccaaataccctcgccctcgcgctcccacctctcgcactccacaaaccctaaccctagctcgctgccgcctctggtccctcgtcgtcggcccactgtctgagataaacctctcgccgccgcggttgctggtcgagctattcgtttgctttcgcgctgcttgatttctctcgttgcgtgtggtgtggtgtggtggtggttggtgggggacctcgaggggttttggatttgagggttttattcttcgcgctgcggatcgaagctgttcgtcggcgttcgttgcagctcccgtgccgcgctctcgcactcggcggcagcgaggtgctttattttgatattttgggggggttttctcagtcggtgctctcgctttcattgccggcggtttgttaggcgtatatttgtctcggttcattcgtgagggattttttattatctacgtacagttgttttgttagagggtctattgggcttatcttctctctggcggttgcaacttgattcagtgacatacattagtttttttttcatagagaatgtcatatatactaactgtaatgccgcattggaaacgtgcaggcagcggcggcggagttggctggcgcggaggtcacttggtcgagttaagcgcgtgttgtaatggaggggctcaacgccactgatgctgtgatcaagaagccaaggagtgttgcattcaggaagccaaggtccatgaagcagctcacggttgagtgcaatggcatttgcctgccatctcggagtgctcgtcatgacgatgacactggcgtcgaagctggtgggcagcggaggaaagagctacacctaaatagccctgaaatgaagggctccatgactcataggagtgacgtgcccagtaagataagaagggatgataaatctggaggtgactatgatggtcatggtcggagcagaaaaacgaaggatgccgccaagcatggaagtgaaagtgttcttgccctggagtgcacagcaagaaacattgaatcccttgacaatccacagttggtccccagagatgactctttgcctggtgaaaataggccgagaaaagtaaagttcaaatttaatcggacccaacgtaccaaaaatggccaggatgatggtggcagtggcattcctgccacgtcggcctgctttattaatcagtacaagcaaaaggattctggtggccacacaaccaaagatacccatggtaatcgtgctgaaggaaaacatggtaacaagcatggcaattctctgtctcctgaccttgtttgcaagagcaaaaggattcctaagaaaagaacacttgacgaagattctgatgatggagatggtgaaatacgctatctacaaaaactcaaaggggcaaaagttgcaccagatcctgtgaacactggtcataaagcttatgatttcgttgatgacgcactcaagaaaaaagagctaaccaagctttctaaaaataagagcatcccatatgaagtggacgaagacttcagaatgtctcggtctggcaggaatggtaggaagaagttaggggatgacaatgagtttatagaagatgaggaatctgagatggaggaaaagagtgggctaaagaaagctgattcacctcaagatgtgaagattgaaacccctggtcttacaacaagacagcgagcccttcaaagcagggtaactaattatgttatagagcaaaaggagaagctctcagatgtggagctacaagccaaaaaggcagaagctgcacagagacgtaagatgcaagttgagaaggcagagaaagaacaacaggctgaagcaatgaggaagatactgggtctagattctgagaagaaaaaggaagagaagaagctgaaagaacgggaaaacagggaaaaacaagcgaaattggaagaatgcaagaaaaactgcgtccggactgtcatgggcccaaccggaactgtgattacattccctgagagcatggggcttcctagcatatttaactccaagcctgtcagctatccacctccaagggagaagtgtgcaggcccgtcgtgcacaaacccgtacaagtaccgcgactccaagacgctgctccctctctgcagcctggcgtgctacaaggctgtccagggccgccctcctgaccagggaaccgacgctgcccaggggagtggaggtggccaggaaagcgctgggaagcaagcatgatgaatctagctacctgacgcgattgaaccgtgaccgtcagttggctggagaagtgtatgttaacatgtccagctcgctggtgtgtggtttcctttggcagtagtctaacaatcaacctgacaaaagatggggtgatcgcctgcccgtcgtgaaccaagccgggttttgttaatggcggttcgagtttaaacccatggtgtggtcggatcggtgtatgagactagtcgagaaatatgaagggggaaaaaaacttgtacagcaatcttgtgcttgcgtggttggttgggagcccagcatgcagctgtggcacgttgaaagtgatattatc

SEQ ID NO: 47365 - DNA, 2424 bp, Zea Mays
cggaaagaacagaacgagagaggactcagggggtggcgccatctagcccgcgaaaggagggagaaggcaacgggaaagcgatagcccgtgccgtggcgcgtggtgggattggcggcaaagcaagcgggggcgatcggagagagagatgggagaaattacgcgtcgaccagcagcagccgccgcaaccagcagcccgcccaaccctacccgcgcgcccgtccccctccccgtcctcgcccgcgtcatcgacccggcacccccccttctcgtcttcccctccacctcgtcacgccgcacgggcccggcccaaataccctcgccctcgcgctcccacctctcgcactccacaaaccctaaccctagctcgctgccgcctctggtccctcgtcgtcggcccactgtctgagataaacctctcgccgccgcggttgctggcagcggcggcggagttggctggcgcggaggtcacttggtcgagttaagcgcgtgttgtaatggaggggctcaacgccactgatgctgtgatcaagaagccaaggagtgttgcattcaggaagccaaggtccatgaagcagctcacggttgagtgcaatggcatttgcctgccatctcggagtgctcgtcatgacgatgacactggcgtcgaagctggtgggcagcggaggaaagagctacacctaaatagccctgaaatgaagggctccatgactcataggagtgacgtgcccagtaagataagaagggatgataaatctggaggtgactatgatggtcatggtcggagcagaaaaacgaaggatgccgccaagcatggaagtgaaagtgttcttgccctggagtgcacagcaagaaacattgaatcccttgacaatccacagttggtccccagagatgactctttgcctggtgaaaataggccgagaaaagtaaagttcaaatttaatcggacccaacgtaccaaaaatggccaggatgatggtggcagtggcattcctgccacgtcggcctgctttattaatcagtacaagcaaaaggattctggtggccacacaaccaaagatacccatggtaatcgtgctgaaggaaaacatggtaacaagcatggcaattctctgtctcctgaccttgtttgcaagagcaaaaggattcctaagaaaagaacacttgacgaagattctgatgatggagatggtgaaatacgctatctacaaaaactcaaaggggcaaaagttgcaccagatcctgtgaacactggtcataaagcttatgatttcgttgatgacgcactcaagaaaaaagagctaaccaagctttctaaaaataagagcatcccatatgaagtggacgaagacttcagaatgtctcggtctggcaggaatggtaggaagaagttaggggatgacaatgagtttatagaagatgaggaatctgagatggaggaaaagagtgggctaaagaaagctgattcacctcaagatgtgaagattgaaacccctggtcttacaacaagacagcgagcccttcaaagcaggggtgggaatggtgaaagctttattgaatttcccgatggattaccagcagcttcgtcaagaaagcaaaaggagaagctctcagatgtggagctacaagccaaaaaggcagaagctgcacagagacgtaagatgcaagttgagaaggcagagaaagaacaacaggctgaagcaatgaggaagatactgggtctagattctgagaagaaaaaggaagagaagaagctgaaagaacgggaaaacagggaaaaacaagcgaaattggaagaatgcaagaaaaactgcgtccggactgtcatgggcccaaccggaactgtgattacattccctgagagcatggggcttcctagcatatttaactccaagcctgtcagctatccacctccaagggagaagtgtgcaggcccgtcgtgcacaaacccgtacaagtaccgcgactccaagacgctgctccctctctgcagcctggcgtgctacaaggctgtccagggccgccctcctgaccagggaaccgacgctgcccaggggagtggaggtggccaggaaagcgctgggaagcaagcatgatgaatctagctacctgacgcgattgaaccgtgaccgtcagttggctggagaagtgtatgttaacatgtccagctcgctggtgtgtggtttcctttggcagtagtctaacaatcaacctgacaaaagatggggtgatcgcctgcccgtcgtgaaccaagccgggttttgttaatggcggttcgagtttaaacccatggtgtggtcggatcggtgtatgagactagtcgagaaatatgaagggggaaaaaaacttgtacagcaatcttgtgcttgcgtggttggttgggagcccagcatgcagctgtggcacgttgaaagtgatattatc

SEQ ID NO: 47366 - DNA, 2390 bp, Zea Mays
cggaaagaacagaacgagagaggactcagggggtggcgccatctagcccgcgaaaggagggagaaggcaacgggaaagcgatagcccgtgccgtggcgcgtggtgggattggcggcaaagcaagcgggggcgatcggagagagagatgggagaaattacgcgtcgaccagcagcagccgccgcaaccagcagcccgcccaaccctacccgcgcgcccgtccccctccccgtcctcgcccgcgtcatcgacccggcacccccccttctcgtcttcccctccacctcgtcacgccgcacgggcccggcccaaataccctcgccctcgcgctcccacctctcgcactccacaaaccctaaccctagctcgctgccgcctctggtccctcgtcgtcggcccactgcagcggcggcggagttggctggcgcggaggtcacttggtcgagttaagcgcgtgttgtaatggaggggctcaacgccactgatgctgtgatcaagaagccaaggagtgttgcattcaggaagccaaggtccatgaagcagctcacggttgagtgcaatggcatttgcctgccatctcggagtgctcgtcatgacgatgacactggcgtcgaagctggtgggcagcggaggaaagagctacacctaaatagccctgaaatgaagggctccatgactcataggagtgacgtgcccagtaagataagaagggatgataaatctggaggtgactatgatggtcatggtcggagcagaaaaacgaaggatgccgccaagcatggaagtgaaagtgttcttgccctggagtgcacagcaagaaacattgaatcccttgacaatccacagttggtccccagagatgactctttgcctggtgaaaataggccgagaaaagtaaagttcaaatttaatcggacccaacgtaccaaaaatggccaggatgatggtggcagtggcattcctgccacgtcggcctgctttattaatcagtacaagcaaaaggattctggtggccacacaaccaaagatacccatggtaatcgtgctgaaggaaaacatggtaacaagcatggcaattctctgtctcctgaccttgtttgcaagagcaaaaggattcctaagaaaagaacacttgacgaagattctgatgatggagatggtgaaatacgctatctacaaaaactcaaaggggcaaaagttgcaccagatcctgtgaacactggtcataaagcttatgatttcgttgatgacgcactcaagaaaaaagagctaaccaagctttctaaaaataagagcatcccatatgaagtggacgaagacttcagaatgtctcggtctggcaggaatggtaggaagaagttaggggatgacaatgagtttatagaagatgaggaatctgagatggaggaaaagagtgggctaaagaaagctgattcacctcaagatgtgaagattgaaacccctggtcttacaacaagacagcgagcccttcaaagcaggggtgggaatggtgaaagctttattgaatttcccgatggattaccagcagcttcgtcaagaaagcaaaaggagaagctctcagatgtggagctacaagccaaaaaggcagaagctgcacagagacgtaagatgcaagttgagaaggcagagaaagaacaacaggctgaagcaatgaggaagatactgggtctagattctgagaagaaaaaggaagagaagaagctgaaagaacgggaaaacagggaaaaacaagcgaaattggaagaatgcaagaaaaactgcgtccggactgtcatgggcccaaccggaactgtgattacattccctgagagcatggggcttcctagcatatttaactccaagcctgtcagctatccacctccaagggagaagtgtgcaggcccgtcgtgcacaaacccgtacaagtaccgcgactccaagacgctgctccctctctgcagcctggcgtgctacaaggctgtccagggccgccctcctgaccagggaaccgacgctgcccaggggagtggaggtggccaggaaagcgctgggaagcaagcatgatgaatctagctacctgacgcgattgaaccgtgaccgtcagttggctggagaagtgtatgttaacatgtccagctcgctggtgtgtggtttcctttggcagtagtctaacaatcaacctgacaaaagatggggtgatcgcctgcccgtcgtgaaccaagccgggttttgttaatggcggttcgagtttaaacccatggtgtggtcggatcggtgtatgagactagtcgagaaatatgaagggggaaaaaaacttgtacagcaatcttgtgcttgcgtggttggttgggagcccagcatgcagctgtggcacgttgaaagtgatattatc

SEQ ID NO: 47367 - DNA, 1957 bp, Zea Mays
atgtgcttgtgatcataatgtactttcatatctttacttctcacctaattttgtccagcatttcatttacgttatcgattgtgactggacagacatctcacatatatgcttagatactttagagaatgtgtcaccactcagttaatactggcatattattttggttgaagattggatacataccagaatgccaacaaaactttccaggtttctctatgtacggccaaagtttgctggcttgttttaatgccttaaactttcccaaacttgttcgatacacttcctcctcccatttccttctgttaaaaacagtatatggcccctgtttgtttaatcgataccgtccccacaagtgcagcaatttctcatccctcgtgtgccgtaaagccgatatccttcctatggcatgctccatctctggccccgtgctggttagctctgcatagggtccttgctgcgccccttctagggtttgcttgaaagtttggtgtggcctccgccctgctgccaccaccaccaggagagatgccacgaggctcgtcgagcaggggcgcaagagggggcgtcggaaggaatcagggaaggggtgctagaggaaaggattctggtggccacacaaccaaagatacccatggtaatcgtgctgaaggaaaacatggtaacaagcatggcaattctctgtctcctgaccttgtttgcaagagcaaaaggattcctaagaaaagaacacttgacgaagattctgatgatggagatggtgaaatacgctatctacaaaaactcaaaggggcaaaagttgcaccagatcctgtgaacactggtcataaagcttatgatttcgttgatgacgcactcaagaaaaaagagctaaccaagctttctaaaaataagagcatcccatatgaagtggacgaagacttcagaatgtctcggtctggcaggaatggtaggaagaagttaggggatgacaatgagtttatagaagatgaggaatctgagatggaggaaaagagtgggctaaagaaagctgattcacctcaagatgtgaagattgaaacccctggtcttacaacaagacagcgagcccttcaaagcaggggtgggaatgtaactaattatgttatagagcaaaaggagaagctctcagatgtggagctacaagccaaaaaggcagaagctgcacagagacgtaagatgcaagttgagaaggcagagaaagaacaacaggctgaagcaatgaggaagatactgggtctagattctgagaagaaaaaggaagagaagaagctgaaagaacgggaaaacagggaaaaacaagcgaaattggaagaatgcaagaaaaactgcgtccggactgtcatgggcccaaccggaactgtgattacattccctgagagcatggggcttcctagcatatttaactccaagcctgtcagctatccacctccaagggagaagtgtgcaggcccgtcgtgcacaaacccgtacaagtaccgcgactccaagacgctgctccctctctgcagcctggcgtgctacaaggctgtccagggccgccctcctgaccagggaaccgacgctgcccaggggagtggaggtggccaggaaagcgctgggaagcaagcatgatgaatctagctacctgacgcgattgaaccgtgaccgtcagttggctggagaagtgtatgttaacatgtccagctcgctggtgtgtggtttcctttggcagtagtctaacaatcaacctgacaaaagatggggtgatcgcctgcccgtcgtgaaccaagccgggttttgttaatggcggttcgagtttaaacccatggtgtggtcggatcggtgtatgagactagtcgagaaatatgaagggggaaaaaaacttgtacagcaatcttgtgcttgcgtggttggttgggagcccagcatgcagctgtggcacgttgaaagtgatattatc

SEQ ID NO: 47368 - DNA, 1990 bp, Zea Mays
atgtgcttgtgatcataatgtactttcatatctttacttctcacctaattttgtccagcatttcatttacgttatcgattgtgactggacagacatctcacatatatgcttagatactttagagaatgtgtcaccactcagttaatactggcatattattttggttgaagattggatacataccagaatgccaacaaaactttccaggtttctctatgtacggccaaagtttgctggcttgttttaatgccttaaactttcccaaacttgttcgatacacttcctcctcccatttccttctgttaaaaacagtatatggcccctgtttgtttaatcgataccgtccccacaagtgcagcaatttctcatccctcgtgtgccgtaaagccgatatccttcctatggcatgctccatctctggccccgtgctggttagctctgcatagggtccttgctgcgccccttctagggtttgcttgaaagtttggtgtggcctccgccctgctgccaccaccaccaggagagatgccacgaggctcgtcgagcaggggcgcaagagggggcgtcggaaggaatcagggaaggggtgctagaggaaaggattctggtggccacacaaccaaagatacccatggtaatcgtgctgaaggaaaacatggtaacaagcatggcaattctctgtctcctgaccttgtttgcaagagcaaaaggattcctaagaaaagaacacttgacgaagattctgatgatggagatggtgaaatacgctatctacaaaaactcaaaggggcaaaagttgcaccagatcctgtgaacactggtcataaagcttatgatttcgttgatgacgcactcaagaaaaaagagctaaccaagctttctaaaaataagagcatcccatatgaagtggacgaagacttcagaatgtctcggtctggcaggaatggtaggaagaagttaggggatgacaatgagtttatagaagatgaggaatctgagatggaggaaaagagtgggctaaagaaagctgattcacctcaagatgtgaagattgaaacccctggtcttacaacaagacagcgagcccttcaaagcaggggtgggaatggtgaaagctttattgaatttcccgatggattaccagcagcttcgtcaagaaagcaaaaggagaagctctcagatgtggagctacaagccaaaaaggcagaagctgcacagagacgtaagatgcaagttgagaaggcagagaaagaacaacaggctgaagcaatgaggaagatactgggtctagattctgagaagaaaaaggaagagaagaagctgaaagaacgggaaaacagggaaaaacaagcgaaattggaagaatgcaagaaaaactgcgtccggactgtcatgggcccaaccggaactgtgattacattccctgagagcatggggcttcctagcatatttaactccaagcctgtcagctatccacctccaagggagaagtgtgcaggcccgtcgtgcacaaacccgtacaagtaccgcgactccaagacgctgctccctctctgcagcctggcgtgctacaaggctgtccagggccgccctcctgaccagggaaccgacgctgcccaggggagtggaggtggccaggaaagcgctgggaagcaagcatgatgaatctagctacctgacgcgattgaaccgtgaccgtcagttggctggagaagtgtatgttaacatgtccagctcgctggtgtgtggtttcctttggcagtagtctaacaatcaacctgacaaaagatggggtgatcgcctgcccgtcgtgaaccaagccgggttttgttaatggcggttcgagtttaaacccatggtgtggtcggatcggtgtatgagactagtcgagaaatatgaagggggaaaaaaacttgtacagcaatcttgtgcttgcgtggttggttgggagcccagcatgcagctgtggcacgttgaaagtgatattatc

SEQ ID NO: 47369 - DNA, 1374 bp, Zea Mays
gggaaatcctggtctggtcagatctggattctggtggccacacaaccaaagatacccatggtaatcgtgctgaaggaaaacatggtaacaagcatggcaattctctgtctcctgaccttgtttgcaagagcaaaaggattcctaagaaaagaacacttgacgaagattctgatgatggagatggtgaaatacgctatctacaaaaactcaaaggggcaaaagttgcaccagatcctgtgaacactggtcataaagcttatgatttcgttgatgacgcactcaagaaaaaagagctaaccaagctttctaaaaataagagcatcccatatgaagtggacgaagacttcagaatgtctcggtctggcaggaatggtaggaagaagttaggggatgacaatgagtttatagaagatgaggaatctgagatggaggaaaagagtgggctaaagaaagctgattcacctcaagatgtgaagattgaaacccctggtcttacaacaagacagcgagcccttcaaagcagggtaactaattatgttatagagcaaaaggagaagctctcagatgtggagctacaagccaaaaaggcagaagctgcacagagacgtaagatgcaagttgagaaggcagagaaagaacaacaggctgaagcaatgaggaagatactgggtctagattctgagaagaaaaaggaagagaagaagctgaaagaacgggaaaacagggaaaaacaagcgaaattggaagaatgcaagaaaaactgcgtccggactgtcatgggcccaaccggaactgtgattacattccctgagagcatggggcttcctagcatatttaactccaagcctgtcagctatccacctccaagggagaagtgtgcaggcccgtcgtgcacaaacccgtacaagtaccgcgactccaagacgctgctccctctctgcagcctggcgtgctacaaggctgtccagggccgccctcctgaccagggaaccgacgctgcccaggggagtggaggtggccaggaaagcgctgggaagcaagcatgatgaatctagctacctgacgcgattgaaccgtgaccgtcagttggctggagaagtgtatgttaacatgtccagctcgctggtgtgtggtttcctttggcagtagtctaacaatcaacctgacaaaagatggggtgatcgcctgcccgtcgtgaaccaagccgggttttgttaatggcggttcgagtttaaacccatggtgtggtcggatcggtgtatgagactagtcgagaaatatgaagggggaaaaaaacttgtacagcaatcttgtgcttgcgtggttggttgggagcccagcatgcagctgtggcacgttgaaagtgatattatc

SEQ ID NO: 47370 - DNA, 1434 bp, Zea Mays
gggaaatcctggtctggtcagatctggattctggtggccacacaaccaaagatacccatggtaatcgtgctgaaggaaaacatggtaacaagcatggcaattctctgtctcctgaccttgtttgcaagagcaaaaggattcctaagaaaagaacacttgacgaagattctgatgatggagatggtgaaatacgctatctacaaaaactcaaaggggcaaaagttgcaccagatcctgtgaacactggtcataaagcttatgatttcgttgatgacgcactcaagaaaaaagagctaaccaagctttctaaaaataagagcatcccatatgaagtggacgaagacttcagaatgtctcggtctggcaggaatggtaggaagaagttaggggatgacaatgagtttatagaagatgaggaatctgagatggaggaaaagagtgggctaaagaaagctgattcacctcaagatgtgaagattgaaacccctggtcttacaacaagacagcgagcccttcaaagcaggggtgggaatggtgaaagctttattgaatttcccgatggattaccagcagcttcgtcaagaataactaattatgttatagagcaaaaggagaagctctcagatgtggagctacaagccaaaaaggcagaagctgcacagagacgtaagatgcaagttgagaaggcagagaaagaacaacaggctgaagcaatgaggaagatactgggtctagattctgagaagaaaaaggaagagaagaagctgaaagaacgggaaaacagggaaaaacaagcgaaattggaagaatgcaagaaaaactgcgtccggactgtcatgggcccaaccggaactgtgattacattccctgagagcatggggcttcctagcatatttaactccaagcctgtcagctatccacctccaagggagaagtgtgcaggcccgtcgtgcacaaacccgtacaagtaccgcgactccaagacgctgctccctctctgcagcctggcgtgctacaaggctgtccagggccgccctcctgaccagggaaccgacgctgcccaggggagtggaggtggccaggaaagcgctgggaagcaagcatgatgaatctagctacctgacgcgattgaaccgtgaccgtcagttggctggagaagtgtatgttaacatgtccagctcgctggtgtgtggtttcctttggcagtagtctaacaatcaacctgacaaaagatggggtgatcgcctgcccgtcgtgaaccaagccgggttttgttaatggcggttcgagtttaaacccatggtgtggtcggatcggtgtatgagactagtcgagaaatatgaagggggaaaaaaacttgtacagcaatcttgtgcttgcgtggttggttgggagcccagcatgcagctgtggcacgttgaaagtgatattatc

SEQ ID NO: 47371 - DNA, 1416 bp, Zea Mays
gggaaatcctggtctggtcagatctggattctggtggccacacaaccaaagatacccatggtaatcgtgctgaaggaaaacatggtaacaagcatggcaattctctgtctcctgaccttgtttgcaagagcaaaaggattcctaagaaaagaacacttgacgaagattctgatgatggagatggtgaaatacgctatctacaaaaactcaaaggggcaaaagttgcaccagatcctgtgaacactggtcataaagcttatgatttcgttgatgacgcactcaagaaaaaagagctaaccaagctttctaaaaataagagcatcccatatgaagtggacgaagacttcagaatgtctcggtctggcaggaatggtaggaagaagttaggggatgacaatgagtttatagaagatgaggaatctgagatggaggaaaagagtgggctaaagaaagctgattcacctcaagatgtgaagattgaaacccctggtcttacaacaagacagcgagcccttcaaagcaggggtgggaatggtgaaagctttattgaatttcccgatggattaccagcagcttcgtcaagaaagcaaaaggagaagctctcagatgtggagctacaagccaaaaaggcagaagctgcacagagacgtaagatgcaagttgagaaggcagagaaagaacaacaggctgaagcaatgaggaagatactgggtctagattctgagaagaaaaaggaagagaagaagctgaaagaacgggaaaacagggaaaaacaagcgaaattggaagaatgcaagaaaaactgcgtccggactgtcatgggcccaaccggaactgtgattacattccctgagagcatggggcttcctagcatatttaactccaagcctgtcagctatccacctccaagggagaagtgtgcaggcccgtcgtgcacaaacccgtacaagtaccgcgactccaagacgctgctccctctctgcagcctggcgtgctacaaggctgtccagggccgccctcctgaccagggaaccgacgctgcccaggggagtggaggtggccaggaaagcgctgggaagcaagcatgatgaatctagctacctgacgcgattgaaccgtgaccgtcagttggctggagaagtgtatgttaacatgtccagctcgctggtgtgtggtttcctttggcagtagtctaacaatcaacctgacaaaagatggggtgatcgcctgcccgtcgtgaaccaagccgggttttgttaatggcggttcgagtttaaacccatggtgtggtcggatcggtgtatgagactagtcgagaaatatgaagggggaaaaaaacttgtacagcaatcttgtgcttgcgtggttggttgggagcccagcatgcagctgtggcacgttgaaagtgatattatc

SEQ ID NO: 47372 - DNA, 4875 bp, Zea Mays
tcgtgtgctccgtcgcgaaacggacgagtgtccgtacacacaaacggtctcgccctttgcgagttgcgattgcgacgacttgttcccgcaaaagccaggaacggaaccaaacagcagcaacctcctcccgtttcatcgtcgtcctcttctggaactagaaaaggcgaggagcgatccgtttctccccttctcgcgcagccattattgcccgcccagtctgacgccgccgtatcctcgcggcgccatggttttatcattgcgtccactcctcgcctcaccttccttccacgctgagggttttcctttttttgtctcattctaacatcacagttctacacgatctctgatcgattgattcggccaagataatctgagtcttgtgcttatctactacacctcttcccattttcttcatttccagttttttcgggggcttcatatctcccacggcacgcgtcacatcttcttcatgcgttgtgtgccgagtcgaggcagacatcggaggcgcgcgactgactgagctcaaaccaatttgggttttgagggttttttttcccttctgctgctgatcaagctcacaaagatcgctagctccatctaccaatggacgagtccggggaagcgagcgtcggctccttcaggatcgggccgtcgacgctgctgggccgcggggtggcgctccgcgtgctcctcttcagctcgctgtggcgcctgcgggcgtgcgcgtacgccgccatctcgcgcgtgcgcggcgcggcgctgccggtggcggcgtcctggctgcacctcaggaacacccacggcgtcctcctcatggtcgtcctcttcgccctcttcttgcggaagctctccggcgcgcggtcgcgggcggcgctcgcgcgccggcgcaggcagtacgagaaagccatgctgcgtgccggtacgtacgaggtctgggcgcgcgccgccaaggtgctcgacaggatgtctgagcaggtgaggcggatttctacgacgaggagctcatcagggacaggcttgaggagatccggagacggagggaggacgggtcgctccgggacgtggtattctgcatgcgtggcgatcttgttaggaacttggggaacatgtgcaaccctgaacttcacaagggcaggctagaggttcctaagcttataaaggaatacattgaagaggtttctactcaactaagaatggtgtgcgaatctgacaccgacgagatactattggaagagaagcttgcctttgtccaggagacctgacatgcctttgggaggacagcgctgctcttgagtgggggtgcttcactagggtctttccatgtaggtgtaggtgtagtgaaaacattggtcgagcataagcttctgcctcggattatagcaggatcaagcgttggttctattatatgttcgattgttgctactcgaacatggcctgagattgagagcttcttcacagactcatcacagaccttgcagttctttgatgggatcggtggattttttgcagtgatgaggcgtgtcaccacttacggcgcactgcatgacattagccagatgcaaaggcttctgagggatctcacgagtaacttaacatttcaagaggcttatgacatgactggccgtgtccttgggatcaccgtttgctctcctaggaaaaatgagccaccccgctgcctcaactacccgacgtcaccgcacgttgttatttggagtgcagtaactgcctcttgtgcatttcctggactttttgaagctcaagaactgatggcaaaggatagattcggcaacatagttcccttccatgcaccctttgccacagatccggaacaaggtcctggagcatcgaagcgccggtggagagatgggagcttggaaatggatttgcccatgatcagactcaaggagttgtttaatgtaaaccatttcattgtgagccaaactaatcctcacatttctccactactccgaatgaaagaacttgttagagtctgcggagggcgctttgctggaaagcttgctcgtcttgctgagatggaggttaagtatcgatgtaaccaaatcctagagattggtcttccaatgggagggcttgcaaaattgtttgctcaggactgggagagggtgatgtcaccatggttatgccagcaacagtagctcagtatttgaagatcattcagaatccaacatacgctgaactccaaatggctgccaaccaaggccgcaggtgcacatgggagaagctctctgcaatcagagcaaactgtgccattgaacttgtattggatgaatccatagcagttttaaaccacaaacggaggctaaaaagaagcatggaaatgacagcggctgcttcgcaggtccattctaactatgttcggctcaaaactccaaggaggataccatcatggagctgcatcagtcgagagaattcttcagaatctctctcggaagagattgttagcacaccaacacttgctcaccatgctcagcgcaattcttatgatggaagtaagagtgaatcagaaaccatcgaccttaattcctggaccaggagtggtgggcctctaatgaggacatcatctgctgacaagttcatcagtttcattcataaccttgagatcgacacggaattaactagggcatgcactgtggagggtaatgctgcaggtatttggtcagagcctaccttcccaagcgatccaccgccgaacaatagctcaagtgttactatgccaggtagatgcacagaaaattctgagactgaggcatgcaacactgccaacaccagagccagtcaggcttctactcccacgagcatggctgtttgcgaaggggatttgctgcagcctgagagcactagtaacggtatcctacttaacattgtgaaaagaaaagggatgccctacgggctagtgtaactgaattggccgaaagctcctgctcacttgataatgatgcttttgtagcttcgcatcaacctcgagctggtgattagattcttcttgattttggaaggtcattatatagccacagcagcaacgctgtaggacgaaattgtacttgatctatttgaagagcaactatatgcgtgaattcagcaatgatacttggaatgttcaatcatctgttggctacatgaacatgctgcggtttattagtcttgcacacacttgtcacaacagcagaagaaatagcggtagagcaccgcctgggcgacgtcctcgggcatggcgtcgacgcccttgaggttggcctcgccgccgacaaaggccaggaagtccttgagcgcgtcatctgcgcgcgcgccctggggcaggtgcggcatcgacagcgccgtgggcacggcatagggggacacgcagttgacgcgcaccccgtggcggccgagctccgcggcgacgctcttggtgagcccgaccacggcgtgcttggacgccgtgtagacgtgcgggcccgtcccgccgatggcgctggccacgctggccagcgacacgatggagccccgcttccgcgggatcatagcgcgcgccgcgtgcttcatccccaggaacacgccgtgcacgttgacgtcgagcaccctgcgcgcctccgcgaagtccacgttgcggatgtccgtcaccttggtgcccgtcacgccggcgttgttcaccatcacgtccagcgcgccgaaccgctccgccgcagcgtccacggcgcggctcacgtcctcctccgacgtcacgtcgcagtggacgaacatggcgccctgcgcgtcacctcccagggcgtcgcgcagctgctgcccagcctcatcctggatgtccgcgatgcagaccttggcgccgtgctccatgaagaggcgaacgatggcctcaccgatgccggtggcgccaccagtgacgagggccaccttcccttccagcctgtgtttggggcaagaaacgcaagatcaaatctgaaggacaaaaacacaggcacagctactggatggagatggagcagcaccgtactatggtgttgcaactggatcgactgtatgccgatgtatactgcacgtttggaacagtagaatggttgaggatacacttggcacaccatttcctattttcctcccataaagaagagagggggaaatgaccacttcgctcgctaaaagataagcacagagcaccagtgcttggcctgggtggatccttcaattcatcgcccttcgacgcgaaaaggtggaaattttgatcaatatcttggataagcccgccttctttttggagtaacaagtaggttgaactgcaacagcaaccgagctgtgcagcatagatgcaagccatggacgggggagtggagctaggagcagggaacccacgcacgagccatggatcgggggaaaattgaagaaagaagcagggcacgcaccgcttactcgaggaggagaaggacggcgaggagcccgcggcggccatcgtctttagatcggcgcctgtgcctcctccgcgctccggtggtcgccgaatccaagtgcgcgctgtcgttgcgggagcgagcaagttgggaaggcgttgtcaaaatctgggtggaggagctggcgcacgtgggccagtaaacgacagcgcaccgggcatttggcgtttcgtgtgttgaataattgggttaagacccattgactaattaataaaataaaccacaaggtacattagcggtgaaagttacaattagttaattggttcttgatgaccttttatcttgatgaccctcttttagggcatgtataacctagacactgctgcacggtactctatatacaagacacaactaaaacacaaccgtggtcatgtctaaaacatgtgttttaccatatttattgtaccaatcagagcattcaataaattaaagtgac

SEQ ID NO: 47373 - DNA, 4913 bp, Zea Mays
cccgtttcatcgtcgtcctcttctggaactagaaaaggcgaggagcgatccgtttctccccttctcgcgcagccattattgcccgcccagtctgacgccgccgtatcctcgcggcgccatggttttatcattgcgtccactcctcgcctcaccttccttccacgctgagggttttcctttttttgtctcattctaacatcacagttctacacgatctctgatcgattgattcggccaagataatctgagtcttgtgcttatctactacacctcttcccattttcttcatttccagttttttcgggggcttcatatctcccacggcacgcgtcacatcttcttcatgcgttgtgtgccgagtcgaggcagacatcggaggcgcgcgactgactggttggtttagctcgcgttttctttatccggtaccctgcgctactcaatttcgattcttttagctcggatttgagtagctgaaggccttcggcggcgatgacttgattgatgcgaattggggatttcttaccgtttcctctattgatgtcggtgctgaagagctcaaaccaatttgggttttgagggttttttttcccttctgctgctgatcaagctcacaaagatcgctagctccatctaccaatggacgagtccggggaagcgagcgtcggctccttcaggatcgggccgtcgacgctgctgggccgcggggtggcgctccgcgtgctcctcttcagctcgctgtggcgcctgcgggcgtgcgcgtacgccgccatctcgcgcgtgcgcggcgcggcgctgccggtggcggcgtcctggctgcacctcaggaacacccacggcgtcctcctcatggtcgtcctcttcgccctcttcttgcggaagctctccggcgcgcggtcgcgggcggcgctcgcgcgccggcgcaggcagtacgagaaagccatgctgcgtgccggtacgtacgaggtctgggcgcgcgccgccaaggtgctcgacaggatgtctgagcaggtgaggcggatttctacgacgaggagctcatcagggacaggcttgaggagatccggagacggagggaggacgggtcgctccgggacgtggtattctgcatgcgtggcgatcttgttaggaacttggggaacatgtgcaaccctgaacttcacaagggcaggctagagtgcaggttcctaagcttataaaggaatacattgaagaggtttctactcaactaagaatggtgtgcgaatctgacaccgacgagatactattggaagagaagcttgcctttgtccaggagacctgacatgcctttgggaggacagcgctgctcttgagtgggggtgcttcactagggtctttccatgtaggtgtaggtgtagtgaaaacattggtcgagcataagcttctgcctcggattatagcaggatcaagcgttggttctattatatgttcgattgttgctactcgaacatggcctgagattgagagcttcttcacagactcatcacagaccttgcagttctttgatgggatcggtggattttttgcagtgatgaggcgtgtcaccacttacggcgcactgcatgacattagccagatgcaaaggcttctgagggatctcacgagtaacttaacatttcaagaggcttatgacatgactggccgtgtccttgggatcaccgtttgctctcctaggaaaaatgagccaccccgctgcctcaactacccgacgtcaccgcacgttgttatttggagtgcagtaactgcctcttgtgcatttcctggactttttgaagctcaagaactgatggcaaaggatagattcggcaacatagttcccttccatgcaccctttgccacagatccggaacaaggtcctggagcatcgaagcgccggtggagagatgggagcttggaaatggatttgcccatgatcagactcaaggagttgtttaatgtaaaccatttcattgtgagccaaactaatcctcacatttctccactactccgaatgaaagaacttgttagagtctgcggagggcgctttgctggaaagcttgctcgtcttgctgagatggaggttaagtatcgatgtaaccaaatcctagagattggtcttccaatgggagggcttgcaaaattgtttgctcaggactgggagagggtgatgtcaccatggttatgccagcaacagtagctcagtatttgaagatcattcagaatccaacatacgctgaactccaaatggctgccaaccaaggccgcaggtgcacatgggagaagctctctgcaatcagagcaaactgtgccattgaacttgtattggatgaatccatagcagttttaaaccacaaacggaggctaaaaagaagcatggaaatgacagcggctgcttcgcaggtccattctaactatgttcggctcaaaactccaaggaggataccatcatggagctgcatcagtcgagagaattcttcagaatctctctcggaagagattgttagcacaccaacacttgctcaccatgctcagcgcaattcttatgatggaagtaagagtgaatcagaaaccatcgaccttaattcctggaccaggagtggtgggcctctaatgaggacatcatctgctgacaagttcatcagtttcattcataaccttgagatcgacacggaattaactagggcatgcactgtggagggtaatgctgcaggtatttggtcagagcctaccttcccaagcgatccaccgccgaacaatagctcaagtgttactatgccaggtagatgcacagaaaattctgagactgaggcatgcaacactgccaacaccagagccagtcaggcttctactcccacgagcatggctgtttgcgaaggggatttgctgcagcctgagagcactagtaacggtatcctacttaacattgtgaaaagaaaagggatgccctacgggctagtgtaactgaattggccgaaagctcctgctcacttgataatgatgcttttgtagcttcgcatcaacctcgagctggtgattagattcttcttgattttggaaggtcattatatagccacagcagcaacgctgtaggacgaaattgtacttgatctatttgaagagcaactatatgcgtgaattcagcaatgatacttggaatgttcaatcatctgttggctacatgaacatgctgcggtttattagtcttgcacacacttgtcacaacagcagaagaaatagcggtagagcaccgcctgggcgacgtcctcgggcatggcgtcgacgcccttgaggttggcctcgccgccgacaaaggccaggaagtccttgagcgcgtcatctgcgcgcgcgccctggggcaggtgcggcatcgacagcgccgtgggcacggcatagggggacacgcagttgacgcgcaccccgtggcggccgagctccgcggcgacgctcttggtgagcccgaccacggcgtgcttggacgccgtgtagacgtgcgggcccgtcccgccgatggcgctggccacgctggccagcgacacgatggagccccgcttccgcgggatcatagcgcgcgccgcgtgcttcatccccaggaacacgccgtgcacgttgacgtcgagcaccctgcgcgcctccgcgaagtccacgttgcggatgtccgtcaccttggtgcccgtcacgccggcgttgttcaccatcacgtccagcgcgccgaaccgctccgccgcagcgtccacggcgcggctcacgtcctcctccgacgtcacgtcgcagtggacgaacatggcgccctgcgcgtcacctcccagggcgtcgcgcagctgctgcccagcctcatcctggatgtccgcgatgcagaccttggcgccgtgctccatgaagaggcgaacgatggcctcaccgatgccggtggcgccaccagtgacgagggccaccttcccttccagcctgtgtttggggcaagaaacgcaagatcaaatctgaaggacaaaaacacaggcacagctactggatggagatggagcagcaccgtactatggtgttgcaactggatcgactgtatgccgatgtatactgcacgtttggaacagtagaatggttgaggatacacttggcacaccatttcctattttcctcccataaagaagagagggggaaatgaccacttcgctcgctaaaagataagcacagagcaccagtgcttggcctgggtggatccttcaattcatcgcccttcgacgcgaaaaggtggaaattttgatcaatatcttggataagcccgccttctttttggagtaacaagtaggttgaactgcaacagcaaccgagctgtgcagcatagatgcaagccatggacgggggagtggagctaggagcagggaacccacgcacgagccatggatcgggggaaaattgaagaaagaagcagggcacgcaccgcttactcgaggaggagaaggacggcgaggagcccgcggcggccatcgtctttagatcggcgcctgtgcctcctccgcgctccggtggtcgccgaatccaagtgcgcgctgtcgttgcgggagcgagcaagttgggaaggcgttgtcaaaatctgggtggaggagctggcgcacgtgggccagtaaacgacagcgcaccgggcatttggcgtttcgtgtgttgaataattgggttaagacccattgactaattaataaaataaaccacaaggtacattagcggtgaaagttacaattagttaattggttcttgatgaccttttatcttgatgaccctcttttagggcatgtataacctagacactgctgcacggtactctatatacaagacacaactaaaacacaaccgtggtcatgtctaaaacatgtgttttaccatatttattgtaccaatcagagcattcaataaattaaagtgac

SEQ ID NO: 47374 - DNA, 5331 bp, Zea Mays
cccgtttcatcgtcgtcctcttctggaactagaaaaggcgaggagcgatccgtttctccccttctcgcgcagccattattgcccgcccagtctgacgccgccgtatcctcgcggcgccatggttttatcattgcgtccactcctcgcctcaccttccttccacgctgagggttttcctttttttgtctcattctaacatcacagttctacacgatctctgatcgattgattcggccaagataatctgagtcttgtgcttatctactacacctcttcccattttcttcatttccagttttttcgggggcttcatatctcccacggcacgcgtcacatcttcttcatgcgttgtgtgccgagtcgaggcagacatcggaggcgcgcgactgactggttggtttagctcgcgttttctttatccggtaccctgcgctactcaatttcgattcttttagctcggatttgagtagctgaaggccttcggcggcgatgacttgattgatgcgaattggggatttcttaccgtttcctctattgatgtcggtgctgaagagctcaaaccaatttgggttttgagggttttttttcccttctgctgctgatcaagctcacaaagatcgctagctccatctaccaatggacgagtccggggaagcgagcgtcggctccttcaggatcgggccgtcgacgctgctgggccgcggggtggcgctccgcgtgctcctcttcagctcgctgtggcgcctgcgggcgtgcgcgtacgccgccatctcgcgcgtgcgcggcgcggcgctgccggtggcggcgtcctggctgcacctcaggaacacccacggcgtcctcctcatggtcgtcctcttcgccctcttcttgcggaagctctccggcgcgcggtcgcgggcggcgctcgcgcgccggcgcaggcagtacgagaaagccatgctgcgtgccggtacgtacgaggtctgggcgcgcgccgccaaggtgctcgacaggatgtctgagcaggtgaggcggatttctacgacgaggagctcatcagggacaggcttgaggagatccggagacggagggaggacgggtcgctccgggacgtggtattctgcatgcgtggcgatcttgttaggaacttggggaacatgtgcaaccctgaacttcacaagggcaggctagaggttcctaagcttataaaggaatacattgaagaggtttctactcaactaagaatggtgtgcgaatctgacaccgacgagatactattggaagagaagcttgcctttgtccaggagacctgacatgcctttgggaggacagcgctgctcttgagtgggggtgcttcactagggtctttccatgtaggtgtaggtgtagtgaaaacattggtcgagcataagcttctgcctcggattatagcaggatcaagcgttggttctattatatgttcgattgttgctactcgaacatggcctgagattgagagcttcttcacagactcatcacagaccttgcagttctttgatgggatcggtggattttttgcagtgatgaggcgtgtcaccacttacggcgcactgcatgacattagccagatgcaaaggcttctgagggatctcacgagtaacttaacatttcaagaggcttatgacatgactggccgtgtccttgggatcaccgtttgctctcctaggaaaaatgagccaccccgctgcctcaactacccgacgtcaccgcacgttgttatttggagtgcagtaactgcctcttgtgcatttcctggactttttgaagctcaagaactgatggcaaaggatagattcggcaacatagttcccttccatgcaccctttgccacagatccggaacaaggtcctggagcatcgaagcgccggtggagagatgggagcttggaaatggatttgcccatgatcagactcaaggagttgtttaatgtaaaccatttcattgtgagccaaactaatcctcacatttctccactactccgaatgaaagaacttgttagagtctgcggagggcgctttgctggaaaggtatgtctgtgacaatattttgagtagggactagggacctttaattatgttagtctcatagcctatgattgtggttgaacttaaaatgcaggcccatagttcatgttgcaaatagttgttttattttctccagtagtggtttgtcttcaacaactccgcacatgccgttagactattgatggttatcacctcctgcatatgcatgtagtatctagtgggattgaagagtttattcagtgctatgaatatgataggacttagtgagaataatttgttgcggatatccaagcagtgctctgtatttatgttgaaaacatttgtgcatgttgtttaatgctgctggttttatacatttcttgaacaatgtgtttgttatctttcaaaatcagtttaccaggcataactttgatctgatatgtgtagcttgctcgtcttgctgagatggaggttaagtatcgatgtaaccaaatcctagagattggtcttccaatgggagggcttgcaaaattgtttgctcaggactgggagagggtgatgtcaccatggttatgccagcaacagtagctcagtatttgaagatcattcagaatccaacatacgctgaactccaaatggctgccaaccaaggccgcaggtgcacatgggagaagctctctgcaatcagagcaaactgtgccattgaacttgtattggatgaatccatagcagttttaaaccacaaacggaggctaaaaagaagcatggaaatgacagcggctgcttcgcaggtccattctaactatgttcggctcaaaactccaaggaggataccatcatggagctgcatcagtcgagagaattcttcagaatctctctcggaagagattgttagcacaccaacacttgctcaccatgctcagcgcaattcttatgatggaagtaagagtgaatcagaaaccatcgaccttaattcctggaccaggagtggtgggcctctaatgaggacatcatctgctgacaagttcatcagtttcattcataaccttgagatcgacacggaattaactagggcatgcactgtggagggtaatgctgcaggtatttggtcagagcctaccttcccaagcgatccaccgccgaacaatagctcaagtgttactatgccaggtagatgcacagaaaattctgagactgaggcatgcaacactgccaacaccagagccagtcaggcttctactcccacgagcatggctgtttgcgaaggggatttgctgcagcctgagagcactagtaacggtatcctacttaacattgtgaaaagaaaagggatgccctacgggctagtgtaactgaattggccgaaagctcctgctcacttgataatgatgcttttgtagcttcgcatcaacctcgagctggtgattagattcttcttgattttggaaggtcattatatagccacagcagcaacgctgtaggacgaaattgtacttgatctatttgaagagcaactatatgcgtgaattcagcaatgatacttggaatgttcaatcatctgttggctacatgaacatgctgcggtttattagtcttgcacacacttgtcacaacagcagaagaaatagcggtagagcaccgcctgggcgacgtcctcgggcatggcgtcgacgcccttgaggttggcctcgccgccgacaaaggccaggaagtccttgagcgcgtcatctgcgcgcgcgccctggggcaggtgcggcatcgacagcgccgtgggcacggcatagggggacacgcagttgacgcgcaccccgtggcggccgagctccgcggcgacgctcttggtgagcccgaccacggcgtgcttggacgccgtgtagacgtgcgggcccgtcccgccgatggcgctggccacgctggccagcgacacgatggagccccgcttccgcgggatcatagcgcgcgccgcgtgcttcatccccaggaacacgccgtgcacgttgacgtcgagcaccctgcgcgcctccgcgaagtccacgttgcggatgtccgtcaccttggtgcccgtcacgccggcgttgttcaccatcacgtccagcgcgccgaaccgctccgccgcagcgtccacggcgcggctcacgtcctcctccgacgtcacgtcgcagtggacgaacatggcgccctgcgcgtcacctcccagggcgtcgcgcagctgctgcccagcctcatcctggatgtccgcgatgcagaccttggcgccgtgctccatgaagaggcgaacgatggcctcaccgatgccggtggcgccaccagtgacgagggccaccttcccttccagcctgtgtttggggcaagaaacgcaagatcaaatctgaaggacaaaaacacaggcacagctactggatggagatggagcagcaccgtactatggtgttgcaactggatcgactgtatgccgatgtatactgcacgtttggaacagtagaatggttgaggatacacttggcacaccatttcctattttcctcccataaagaagagagggggaaatgaccacttcgctcgctaaaagataagcacagagcaccagtgcttggcctgggtggatccttcaattcatcgcccttcgacgcgaaaaggtggaaattttgatcaatatcttggataagcccgccttctttttggagtaacaagtaggttgaactgcaacagcaaccgagctgtgcagcatagatgcaagccatggacgggggagtggagctaggagcagggaacccacgcacgagccatggatcgggggaaaattgaagaaagaagcagggcacgcaccgcttactcgaggaggagaaggacggcgaggagcccgcggcggccatcgtctttagatcggcgcctgtgcctcctccgcgctccggtggtcgccgaatccaagtgcgcgctgtcgttgcgggagcgagcaagttgggaaggcgttgtcaaaatctgggtggaggagctggcgcacgtgggccagtaaacgacagcgcaccgggcatttggcgtttcgtgtgttgaataattgggttaagacccattgactaattaataaaataaaccacaaggtacattagcggtgaaagttacaattagttaattggttcttgatgaccttttatcttgatgaccctcttttagggcatgtataacctagacactgctgcacggtactctatatacaagacacaactaaaacacaaccgtggtcatgtctaaaacatgtgttttaccatatttattgtaccaatcagagcattcaataaattaaagtgac

SEQ ID NO: 47375 - DNA, 2539 bp, Zea Mays
ttattttccgactatgttttgattgttttcttttcgtccactccaagacgaagcaaccggaccagccaacccttccgaccccacccgctgacatccgacgccgacgccggcgcagacagccgcaccagcgccacccaaatcccgcaaaaccctagagacagaagacgcgaggggagagagagaggcgcccggcatggcgagcgcgacgtccccagcgatggccgcgaatctggcgggcaagtcgggcgtgcgggtcgtcgtgatcggcgaccccggcaccggcaagtccagcctcatcgtcgccctcgccaccgagcagtttcccgagaacgtgcctcgcgtcatgccccccacccgcctccccgccgattatttccccgaccgcgtccccatcaccatcatcgacacgtcgtccagcccggagcagaagccgaagttgatcgccgagtgtcaggccgccgatgcggtcgtgctcacctacgcctgcgaccggcccgccacgctggagcggctcagttcgttctggcttcccgagctccggcgactccagctgaaggccccagttatcgtggtggggtgcaagctggacctgagggacgaacaacaagttagccttgagcaggttatggcgcccatcatgcagtccttccgcgagattgagacctgcattgagtgctccgctcttcgccagatacaggtgcctgaggttttctactatgcccagaaggcagtacttcaccctactgcccccctttttgatcaagaattacaatctctgaagcctcgatgtgtgagagcgttgaagcggatattcattatatgtgataatgacaaggatggtgctctcagtgacgtggagctcaatgaattccaggtccggtgttttagtgctcctctccagcctactgaaatttcaggagttaagagagttgttcaggagaagatgcctgaaggcgtaaatgaaactggccttactttgactgggttcctttttctgcatgccctatttattgaaaaaggtcgtttggaaactacatggactgtattgaggaaatttggttacgacaatgacatcaagcttagggatgatctcattgcagtgccaattaaaagagctcctgatcaaactctggaattgacaagtgaagtggtcgatttcttgagagggatattcaacatgtttgacattgataacgatggagctttactacctgctgagctggaggacctattctcaacagcacctgaaaacccatggtcttgcgatccatataaagactgtgctgaaaagaatgtgttgggtggtctgtcacttgaagggtttctctcaaagtgggctcttatgacactgctagacccgacaaatagttatgccaaccttgtatacgttggctatcctggcgagttcagttctgcatttactgtcacaaggaaaagacgtgtggatcgtaaaaagcaacagacacagagaaacattttccagtgttttgttttcggtgccagaggctctggaaagacatcgttgctacaatcattcatcggaaggcaaccttctgatgccctgccatctaacagcgaacgctttgcaacaaattctgtcgaaatggctgatctgtgatgaatattcatggcaaagagctagagacttgcttgtgcaagtggctacacatggagaaaatactggctacgaagttccgtgcttgatagttgctgcgaaagatgatcttgaccaatcttcacaagctctacaagaatcaactagagtgagccaagacatgggaattgaaacaccaattccgatcagtgtgaagctgagagatttgaacaacattttctgcagaatagtacatgctgcgcaactgccccatttgagcattccagagactgaagctggaaaaacacgccggcaatatcggcaacttctaaaccgttcgctaatggttgtctctgttggagctgctgttgcagttgttggactagctgcttaccgggtttatgcagctcggaaaaactcttcctcttgaagcctcctggacaagtgggaaaataagttgctttcttcctggagattactttgcaacatcagctggatccatgctggctgattttcgcagctggggtttttacccggaaggaaaccaacgtttttgtacagacatgtcatcagccataatttatccggtcaattggtgtttcagattctatataaatggcagacaccactcggctccattaaatgccgtatctgataatctgttgcctaaattagctcagctaaatattgtcgttactaccctatgtttttgctctcttggagtcttggcccttgcagtagtttggtattggaatttcttttcgttagcaaacatgctgagacatttagttgaacgaacctgagttgttccgagatttctgtcgggattattcaattggaattttgaagcttggtattctattggatctgagaaaagtgcatgctagctcgctatctttgcgtgttattgtcactgaggcctcgtgcatatgtttatatactttg

SEQ ID NO: 47376 - DNA, 1513 bp, Zea Mays
gggttacattcaaccgcagatgattgatccgatagacaaagatttgatgttagcatgatggagctttactacctgctgagctggaggacctattctcaacagcacctgaaaacccatggtcttgcgatccatataaagactgtgctgaaaagaatgtgttgggtggtctgtcacttgaagggtttctctcaaagtgggctcttatgacactgctagacccgacaaatagttatgccaaccttgtatacgttggctatcctggcgagttcagttctgcatttactgtcacaaggaaaagacgtgtggatcgtaaaaagcaacagacacagagaaacattttccagtgttttgttttcggtgccagaggctctggaaagacatcgttgctacaatcattcatcggaaggcaaccttctgatgccctgccatctaacagcgaacgctttgcaacaaattctgtcgaaatggctgatggaactagaaagacactaatattgcgagagattcctgaaggtgatgtgagatcgatactttctgacagagaatcattggcgccgtgtgatgtagcagtatttgtttacgatagctgtgatgaatattcatggcaaagagctagagacttgcttgtgcaagtggctacacatggagaaaatactggctacgaagttccgtgcttgatagttgctgcgaaagatgatcttgaccaatcttcacaagctctacaagaatcaactagagtgagccaagacatgggaattgaaacaccaattccgatcagtgtgaagctgagagatttgaacaacattttctgcagaatagtacatgctgcgcaactgccccatttgagcattccagagactgaagctggaaaaacacgccggcaatatcggcaacttctaaaccgttcgctaatggttgtctctgttggagctgctgttgcagttgttggactagctgcttaccgggtttatgcagctcggaaaaactcttcctcttgaagcctcctggacaagtgggaaaataagttgctttcttcctggagattactttgcaacatcagctggatccatgctggctgattttcgcagctggggtttttacccggaaggaaaccaacgtttttgtacagacatgtcatcagccataatttatccggtcaattggtgtttcagattctatataaatggcagacaccactcggctccattaaatgccgtatctgataatctgttgcctaaattagctcagctaaatattgtcgttactaccctatgtttttgctctcttggagtcttggcccttgcagtagtttggtattggaatttcttttcgttagcaaacatgctgagacatttagttgaacgaacctgagttgttccgagatttctgtcgggattattcaattggaattttgaagcttggtattctattggatctgagaaaagtgcatgctagctcgctatctttgcgtgttattgtcactgaggcctcgtgcatatgtttatatactttg

SEQ ID NO: 47377 - DNA, 1419 bp, Zea Mays
gattgatccgatagacaaagatttgatgttagcatgatggagctttactacctgctgagctggaggacctattctcaacagcacctgaaaacccatggtcttgcgatccatataaagactgtgctgaaaagaatgtgttgggtggtctgtcacttgaagggtttctctcaaagtgggctcttatgacactgctagacccgacaaatagttatgccaaccttgtatacgttggctatcctggcgagttcagttctgcatttactgtcacaaggaaaagacgtgtggatcgtaaaaagcaacagacacagagaaacattttccagtgttttgttttcggtgccagaggctctggaaagacatcgttgctacaatcattcatcggaaggcaaccttctgatgccctgccatctaacagcgaacgctttgcaacaaattctgtcgaaatggctgatggaactagaaagacactaatattgcgagagattcctgaagctgtgatgaatattcatggcaaagagctagagacttgcttgtgcaagtggctacacatggagaaaatactggctacgaagttccgtgcttgatagttgctgcgaaagatgatcttgaccaatcttcacaagctctacaagaatcaactagagtgagccaagacatgggaattgaaacaccaattccgatcagtgtgaagctgagagatttgaacaacattttctgcagaatagtacatgctgcgcaactgccccatttgagcattccagagactgaagctggaaaaacacgccggcaatatcggcaacttctaaaccgttcgctaatggttgtctctgttggagctgctgttgcagttgttggactagctgcttaccgggtttatgcagctcggaaaaactcttcctcttgaagcctcctggacaagtgggaaaataagttgctttcttcctggagattactttgcaacatcagctggatccatgctggctgattttcgcagctggggtttttacccggaaggaaaccaacgtttttgtacagacatgtcatcagccataatttatccggtcaattggtgtttcagattctatataaatggcagacaccactcggctccattaaatgccgtatctgataatctgttgcctaaattagctcagctaaatattgtcgttactaccctatgtttttgctctcttggagtcttggcccttgcagtagtttggtattggaatttcttttcgttagcaaacatgctgagacatttagttgaacgaacctgagttgttccgagatttctgtcgggattattcaattggaattttgaagcttggtattctattggatctgagaaaagtgcatgctagctcgctatctttgcgtgttattgtcactgaggcctcgtgcatatgtttatatactttg

SEQ ID NO: 47378 - DNA, 1271 bp, Zea Mays
gtctttatgatatgttgaatgcatgttctgattgcagtagtattgtctccttgatataaatccagtgttttcaagtcggatgacttgctggtctttatggctgatcgacttgggcgataatcacgattagtcggacgacttggcgattaattgtgattggttcaaaccgacttggatgattaatcggacgacttgaaaaatctataacatttgatgggttatttatctgtgggaactagaaagacactaatattgcgagagattcctgaaggtgatgtgagatcgatactttctgacagagaatcattggcgccgtgtgatgtagcagtatttgtttacgatagctgtgatgaatattcatggcaaagagctagagacttgcttgtgcaagtggctacacatggagaaaatactggctacgaagttccgtgcttgatagttgctgcgaaagatgatcttgaccaatcttcacaagctctacaagaatcaactagagtgagccaagacatgggaattgaaacaccaattccgatcagtgtgaagctgagagatttgaacaacattttctgcagaatagtacatgctgcgcaactgccccatttgagcattccagagactgaagctggaaaaacacgccggcaatatcggcaacttctaaaccgttcgctaatggttgtctctgttggagctgctgttgcagttgttggactagctgcttaccgggtttatgcagctcggaaaaactcttcctcttgaagcctcctggacaagtgggaaaataagttgctttcttcctggagattactttgcaacatcagctggatccatgctggctgattttcgcagctggggtttttacccggaaggaaaccaacgtttttgtacagacatgtcatcagccataatttatccggtcaattggtgtttcagattctatataaatggcagacaccactcggctccattaaatgccgtatctgataatctgttgcctaaattagctcagctaaatattgtcgttactaccctatgtttttgctctcttggagtcttggcccttgcagtagtttggtattggaatttcttttcgttagcaaacatgctgagacatttagttgaacgaacctgagttgttccgagatttctgtcgggattattcaattggaattttgaagcttggtattctattggatctgagaaaagtgcatgctagctcgctatctttgcgtgttattgtcactgaggcctcgtgcatatgtttatatactttg

SEQ ID NO: 47379 - DNA, 1017 bp, Zea Mays
gttaaatccctggtcatgtgaaccacacttcggatagttggtagttggtgatggagatcacaattgacaagcattgaaactcttttcacactgtgatgaatattcatggcaaagagctagagacttgcttgtgcaagtggctacacatggagaaaatactggctacgaagttccgtgcttgatagttgctgcgaaagatgatcttgaccaatcttcacaagctctacaagaatcaactagagtgagccaagacatgggaattgaaacaccaattccgatcagtgtgaagctgagagatttgaacaacattttctgcagaatagtacatgctgcgcaactgccccatttgagcattccagagactgaagctggaaaaacacgccggcaatatcggcaacttctaaaccgttcgctaatggttgtctctgttggagctgctgttgcagttgttggactagctgcttaccgggtttatgcagctcggaaaaactcttcctcttgaagcctcctggacaagtgggaaaataagttgctttcttcctggagattactttgcaacatcagctggatccatgctggctgattttcgcagctggggtttttacccggaaggaaaccaacgtttttgtacagacatgtcatcagccataatttatccggtcaattggtgtttcagattctatataaatggcagacaccactcggctccattaaatgccgtatctgataatctgttgcctaaattagctcagctaaatattgtcgttactaccctatgtttttgctctcttggagtcttggcccttgcagtagtttggtattggaatttcttttcgttagcaaacatgctgagacatttagttgaacgaacctgagttgttccgagatttctgtcgggattattcaattggaattttgaagcttggtattctattggatctgagaaaagtgcatgctagctcgctatctttgcgtgttattgtcactgaggcctcgtgcatatgtttatatactttg

SEQ ID NO: 47380 - DNA, 1513 bp, Zea Mays
agaatgaaaagggggaaaaaaacagggcaccctcacggcgaactccccacctcctatcgcccccctctctctagcgccgcacaaatctctcctcccccgctcgccctcgctgcattgggcgccgccaagcccccgccggatagagaggacgagaagcggcgtggctgcgggaggagcgggcggcatgtgcgacctggtggcccgcacgggccggcaccagcagcgatgcataccatttaggtatagagctaacaatgatgaaacctctggtgacaaaactaagaaagtcgtggaagttctcatgataaattcccagagcggacctggtcttttgtttccaaaggtactgtactgtaaacatctccatctgaaatacacatgcaacaattagaaagtggacatagccttttgtttccaaaggtattactgttaacatcttcctctgaaatccattgctagttgtttacatggatgacaacttttattgcatacttattctgtttctgtgttttcacataactacatcggaaccattatataccctatagcagtgcatattattatttcaattagttcccaagtgccagtgtgtcttaagtcagcaatccaggaaatccagatgaagtaactggaatgtctgagttgccgatctggattccttgggctgtttatgggcttgtttgcaagcttagttattttcataaacctgttgtaaatgtcactgggatgccatgtagagatttttttatgtttgttttcttgttgcagggaggatgggaaaatgatgaaactgttgaagaggcagcagctcgagaagctatagaagaagccggagttcgaggtgatatagtgcattttctggggtcgtatgacttcaaaagcaagacacatcaagatgcgtgctgccctgagggtatgtgcagggctgcagtgtttgcgctgcatgtaaaggaagagctgaactcatggcctgagcagagcacccggcagaggacctggctcacggttcctgaagctgcatccaggtgccggtaccagtggatggaagaggccttgctcacaggcttctctgactggcacgacaagtggagcataggtgacggcggtggcggcggtgccaactgtgtgacccggcctaactgctgatgaacccatctgcagtcgtccaatttgtccatcctcccccatttcccctaggctccgacattgcgtaacgcaataaatacagtgtacttctctcgatgctgggttggtcattgacccttggatggttatcttagttattagtgggacgaggtatatagtatttatatctgatgaagacgagaattctcacaacttttaagtgtcgattctcgtgcctgtttatttctcggtttcaggtcagctgcagcctgcaggcaggcacgcaccctgcgcactttgtaactctgctcctgattctggagatgcacatcctgtgtatgaactgaactggtataacttgaaaataactgttaagtcaaccatgcat

SEQ ID NO: 47381 - DNA, 995 bp, Zea Mays
agaatgaaaagggggaaaaaaacagggcaccctcacggcgaactccccacctcctatcgcccccctctctctagcgccgcacaaatctctcctcccccgctcgccctcgctgcattgggcgccgccaagcccccgccggatagagaggacgagaagcggcgtggctgcgggaggagcgggcggcatgtgcgacctggtggcccgcacgggccggcaccagcagcgatgcataccatttaggtatagagctaacaatgatgaaacctctggtgacaaaactaagaaagtcgtggaagttctcatgataaattcccagagcggacctggtcttttgtttccaaagggaggatgggaaaatgatgaaactgttgaagaggcagcagctcgagaagctatagaagaagccggagttcgaggtgatatagtgcattttctggggtcgtatgacttcaaaagcaagacacatcaagatgcgtgctgccctgagggtatgtgcagggctgcagtgtttgcgctgcatgtaaaggaagaggccttgctcacaggcttctctgactggcacgacaagtggagcataggtgacggcggtggcggcggtgccaactgtgtgacccggcctaactgctgatgaacccatctgcagtcgtccaatttgtccatcctcccccatttcccctaggctccgacattgcgtaacgcaataaatacagtgtacttctctcgatgctgggttggtcattgacccttggatggttatcttagttattagtgggacgaggtatatagtatttatatctgatgaagacgagaattctcacaacttttaagtgtcgattctcgtgcctgtttatttctcggtttcaggtcagctgcagcctgcaggcaggcacgcaccctgcgcactttgtaactctgctcctgattctggagatgcacatcctgtgtatgaactgaactggtataacttgaaaataactgttaagtcaaccatgcat

SEQ ID NO: 47382 - DNA, 1090 bp, Zea Mays
agaatgaaaagggggaaaaaaacagggcaccctcacggcgaactccccacctcctatcgcccccctctctctagcgccgcacaaatctctcctcccccgctcgccctcgctgcattgggcgccgccaagcccccgccggatagagaggacgagaagcggcgtggctgcgggaggagcgggcggcatgtgcgacctggtggcccgcacgggccggcaccagcagcggtatgcataccatttaggtatagagctaacaatgatgaaacctctggtgacaaaactaagaaagtcgtggaagttctcatgataaattcccagagcggacctggtcttttgtttccaaagggaggatgggaaaatgatgaaactgttgaagaggcagcagctcgagaagctatagaagaagccggagttcgaggtgatatagtgcattttctggggtcgtatgacttcaaaagcaagacacatcaagatgcgtgctgccctgagggtatgtgcagggctgcagtgtttgcgctgcatgtaaaggaagagctgaactcatggcctgagcagagcacccggcagaggacctggctcacggttcctgaagctgcatccaggtgccggtaccagtggatggaagaggccttgctcacaggcttctctgactggcacgacaagtggagcataggtgacggcggtggcggcggtgccaactgtgtgacccggcctaactgctgatgaacccatctgcagtcgtccaatttgtccatcctcccccatttcccctaggctccgacattgcgtaacgcaataaatacagtgtacttctctcgatgctgggttggtcattgacccttggatggttatcttagttattagtgggacgaggtatatagtatttatatctgatgaagacgagaattctcacaacttttaagtgtcgattctcgtgcctgtttatttctcggtttcaggtcagctgcagcctgcaggcaggcacgcaccctgcgcactttgtaactctgctcctgattctggagatgcacatcctgtgtatgaactgaactggtataacttgaaaataactgttaagtcaaccatgcat

SEQ ID NO: 47383 - DNA, 1229 bp, Zea Mays
ttctcttgccaatcattgctcctagtgcttcaagatgcataccatttaggtatagagctaacaatgatgaaacctctggtgacaaaactaagaaagtcgtggaagttctcatgataaattcccagagcggacctggtcttttgtttccaaaggtactgtactgtaaacatctccatctgaaatacacatgcaacaattagaaagtggacatagccttttgtttccaaaggtattactgttaacatcttcctctgaaatccattgctagttgtttacatggatgacaacttttattgcatacttattctgtttctgtgttttcacataactacatcggaaccattatataccctatagcagtgcatattattatttcaattagttcccaagtgccagtgtgtcttaagtcagcaatccaggaaatccagatgaagtaactggaatgtctgagttgccgatctggattccttgggctgtttatgggcttgtttgcaagcttagttattttcataaacctgttgtaaatgtcactgggatgccatgtagagatttttttatgtttgttttcttgttgcagggaggatgggaaaatgatgaaactgttgaagaggcagcagctcgagaagctatagaagaagccggagttcgaggtgatatagtgcattttctggggtcgtatgacttcaaaagcaagacacatcaagatgcgtgctgccctgagggtatgtgcagggctgcagtgtttgcgctgcatgtaaaggaagaggccttgctcacaggcttctctgactggcacgacaagtggagcataggtgacggcggtggcggcggtgccaactgtgtgacccggcctaactgctgatgaacccatctgcagtcgtccaatttgtccatcctcccccatttcccctaggctccgacattgcgtaacgcaataaatacagtgtacttctctcgatgctgggttggtcattgacccttggatggttatcttagttattagtgggacgaggtatatagtatttatatctgatgaagacgagaattctcacaacttttaagtgtcgattctcgtgcctgtttatttctcggtttcaggtcagctgcagcctgcaggcaggcacgcaccctgcgcactttgtaactctgctcctgattctggagatgcacatcctgtgtatgaactgaactggtataacttgaaaataactgttaagtcaaccatgcat

SEQ ID NO: 47384 - DNA, 904 bp, Zea Mays
cgtgctcattgccgtcttgacctaaatgcggcgccgtggcgatgcataccatttaggtatagagctaacaatgatgaaacctctggtgacaaaactaagaaagtcgtggaagttctcatgataaattcccagagcggacctggtcttttgtttccaaagggaggatgggaaaatgatgaaactgttgaagaggcagcagctcgagaagctatagaagaagccggagttcgaggtgatatagtgcattttctggggtcgtatgacttcaaaagcaagacacatcaagatgcgtgctgccctgagggtatgtgcagggctgcagtgtttgcgctgcatgtaaaggaagagctgaactcatggcctgagcagagcacccggcagaggacctggctcacggttcctgaagctgcatccaggtgccggtaccagtggatggaagaggccttgctcacaggcttctctgactggcacgacaagtggagcataggtgacggcggtggcggcggtgccaactgtgtgacccggcctaactgctgatgaacccatctgcagtcgtccaatttgtccatcctcccccatttcccctaggctccgacattgcgtaacgcaataaatacagtgtacttctctcgatgctgggttggtcattgacccttggatggttatcttagttattagtgggacgaggtatatagtatttatatctgatgaagacgagaattctcacaacttttaagtgtcgattctcgtgcctgtttatttctcggtttcaggtcagctgcagcctgcaggcaggcacgcaccctgcgcactttgtaactctgctcctgattctggagatgcacatcctgtgtatgaactgaactggtataacttgaaaataactgttaagtcaaccatgcat

SEQ ID NO: 47385 - DNA, 827 bp, Zea Mays
aattgatgcatatgtacagtgggcaggaggtcttgatcaatgcacagtatctagcttatgcataccatttaggtatagagctaacaatgatgaaacctctggtgacaaaactaagaaagtcgtggaagttctcatgataaattcccagagcggacctggtcttttgtttccaaagggaggatgggaaaatgatgaaactgttgaagaggcagcagctcgagaagctatagaagaagccggagttcgaggtgatatagtgcattttctggggtcgtatgacttcaaaagcaagacacatcaagatgcgtgctgccctgagggtatgtgcagggctgcagtgtttgcgctgcatgtaaaggaagaggccttgctcacaggcttctctgactggcacgacaagtggagcataggtgacggcggtggcggcggtgccaactgtgtgacccggcctaactgctgatgaacccatctgcagtcgtccaatttgtccatcctcccccatttcccctaggctccgacattgcgtaacgcaataaatacagtgtacttctctcgatgctgggttggtcattgacccttggatggttatcttagttattagtgggacgaggtatatagtatttatatctgatgaagacgagaattctcacaacttttaagtgtcgattctcgtgcctgtttatttctcggtttcaggtcagctgcagcctgcaggcaggcacgcaccctgcgcactttgtaactctgctcctgattctggagatgcacatcctgtgtatgaactgaactggtataacttgaaaataactgttaagtcaaccatgcat

SEQ ID NO: 47386 - DNA, 1092 bp, Zea Mays
gatgcacattgtgtagtgttctcggtggttcatgacgctgatgttgaactagttacttcgactggatttattgtttgttgcttggtcaggcatgtccttcatctgccacaagtgggaactcttttggccaatcttaaggttgtaactgacattctagtctgaatgttggatagcacaatcgagattgccatttgttcctgcttgttgctcctataacacttttgtggctgtagcatgcaggatgtttacatagtgtaagacccatgaggtcaatgattatctttttctagaagggtctggtatctcgatgaacacatgtggtgccaatgaaggcagcatttactcttttttcccctcctcttgtacttagtgctgcatcatgatgaaacagtgtccagtgcttgaccttgatgacaatagatgcttatatgctgctagcttttatctgtcattcaatttcgcgaaagtgcctgttgcaacacattgttcttgcttgtataatgctgtttgctttcggatttcagcattttctggggtcgtatgacttcaaaagcaagacacatcaagatgcgtgctgccctgagggtatgtgcagggctgcagtgtttgcgctgcatgtaaaggaagaggccttgctcacaggcttctctgactggcacgacaagtggagcataggtgacggcggtggcggcggtgccaactgtgtgacccggcctaactgctgatgaacccatctgcagtcgtccaatttgtccatcctcccccatttcccctaggctccgacattgcgtaacgcaataaatacagtgtacttctctcgatgctgggttggtcattgacccttggatggttatcttagttattagtgggacgaggtatatagtatttatatctgatgaagacgagaattctcacaacttttaagtgtcgattctcgtgcctgtttatttctcggtttcaggtcagctgcagcctgcaggcaggcacgcaccctgcgcactttgtaactctgctcctgattctggagatgcacatcctgtgtatgaactgaactggtataacttgaaaataactgttaagtcaaccatgcat

SEQ ID NO: 47387 - DNA, 1124 bp, Zea Mays
cgttcatgtataaaccatttgtttctttggcacatgaagacagaactaccctactgcttcgtgaagacgatggagtggccaccgccgtcgacgtcaccatcgccgtcgctggtggtgcgcagccccaggcagacagtcagcctgatccgcaaccggcgaccccatcgtgactgggccccctcatcgaggtctccctctttcgccgcccgtgaccatggccccaagccgtcggaggtgtacggattcgttggatccatcaccaccgtcattgccaccgccgtgtacctcgcctgggcatacacgcccgagcccgtcctccggtcactcggcatcacctactaccctagtactgggcactggcggtgccatcgttcgtggttgtgaccgtggtgccgtccatgggcatctacatgggcctcaacttcgctgccactcctcctccgacttccttcagcactatcttcgatgaaaagagtagggagcacacagccttttctcctgcaactgaggatgagaggcccatcgaacccatctcagacatcggtattgatcggatcaacagtcttatgtatggtgatagatgatttcccccggtggaatatgagtttaccatggatcgtcggattggaaacagatgcaaacgcgaaggaagatttccatgtcagttgaactttgtttggcagtccagctaagagttatcggtactcgctatgtcgcgcgcgttcgacgactactatattaaggattatgctgtcatctcgcgccggatgtgacgtagaggaggatcgacatcaatgaccacttgtcatcgtcgggtagcttttatgtcggtctgtctttaattctcttcgcaaacacacacttgtctttttgtttaagcaaacatgtatggtggtgcgtgtctgatgactgacgatgtacgagcgaacttctaccggcaggtgtcacacgtgctctccaatgatgagaccatacaaattgtggtatatatcaaagtctacatgatacagatggttgtattgtagtagtgaaacagctaaattaaaataacaaaatttatgtatgaccaggatcacaaatggattatgaaacattttcttataacaatataagatgaattttat

SEQ ID NO: 47388 - DNA, 2648 bp, Zea Mays
cacgtacggacggacgggagcaacagagcgccagaccatcacacactacgcacggacgacatcgaggaaccctagactagagcacattgcacgggcgacggcgcgccaccggtgactggcgtcccctcctcggtcctcactccccagcatggcgacgccctgccgcagcagaaacgatcaaccgatcggaaaacattaatttgtattcgatttgaaagcgcacccggcacctgctccgttcctgcgctgcttggcttccggtctgtgtcaaagcttgcatctcacgcgagtcgcacaaggacgaaccctatacagctccaggaggtcggtgccctagccacctaggccaccttcctggagaccgggcggcgacgacggggacgaacgaccgcgatgggcttcgagcgtgtggagctgcggtgtcccagggagctggacccacggccgagctggacgctcggcgatgtgctcgctgagcttgacgcgctggatgccacccgccgcgctgcgccacccacgcccctgaagcagccgccggattgggctaacggtggtggtgagaaggcctttgtgatgcgggttgatgacgacgacgaagacgacacagaagatgaagacgatggtacaagtggtgggaagtcccgggctctggtggccaaaggagcaaggttctcgtgtaatgatcttgcatcaagtgattcagaggatgaattagatggtcaggttgccccataccacttaatggagaaaagggacctagcgaagagcattcttcttgagctggaacacgagcatcatctaaaagttcaagaagaagttagaagtaagctagcttcattggaggtatgccaccaaaatgaaattcggagaacgatctctgcatttgcccgacttcagaaatatgcagaatcaagaaaggagatagacagaagacttgatgtacacttccagagaagaattgcagaagtactcgataaacacttatctatggtccaaagggatcatgaacaaaaatcccagattgttgaacgccgaataagagatgatgcagctcttgaagaagctaaaagaaaagagcaagctgtcaaggaagaaaagttaaggcaggaaagagcccagcaagaagcagaggctagacagaaggaagctgcaaaattagcagctgaagcacgaaaaacagcatttgaggctgctaaaaaggaagcagcagaaaaggaagcagcagaaaaggaggctgctaaattgagagatgcagcagcttctcaacctagtccgaattcccagaataatactgcagaaggcattaaagtttttggcgataaatacgcactagaagcagagtcacggaggcatgcattagtacagaatcaagtgccagaaaacattcatcacagcaaggaattcagcaaatatgaccgacaaattgccaaatccataagtaaacttatgccaactactgacagtgtcagaacaagggctagtgagcttgttaaagctttaaatggacaggattgtccccgtccaatctcttgttgtctatttgctaacaagattatttccattgtcaagagtagaaatacaaaggacaagacctttggaaatttggcctttgcgtgtggatatgtcatgctattagttacaaatcagacgcaatggattatcttttagctgagttcaacagagtttgcatatacacggttccaaagcatatgcatgctttgaatgcacaagcacgaaatagagattattacagactgataggttaccaggaagaaaatggacagctcgagagcactgaaagttatctaacatacgtcgttgcatatgttaaactctacgcagcaatgattcagacggaaatcaaaggtgttcgtcatcctcatggtttagctgagggatggaagtggcttgccatgttcctcaattctctcccagctactacagccactgcatgtgcccttcacgctttcctcaagatggctggttttgcacttcacaagaaatatgggtcacagttcatgaaaatcctggatgtaatatcacggtgctttttaccagctttgaaggaacaaggcaacaagatgcaggctgaggctgtcaacaatctacagaattacctgaacgacaagatctacctggaggaaccagaagggcagtacctcgtccagcaactactatccaaggagttgttcatgtaaagatcaaaacaccagatcggtatgagacatcgtgtgtgatcgtctgaagggcggtacctcgtccaagctaccactatcgcaagaggggcctcatgtagagatgaaagcaccagatcgatatggagctgttcgtgtttcagaaacacgatcgagcctttcaaatctcacgaacattatttatgggacagtcccccagatcatttcccccctctgcacgggatcctgacgatgtatttgtttatgtgacttgtatccggccaaggacaggtatgataggttgaggttttatgtttgttgtagttgtacatgtactactagaatcgtgaccagaacaaaataatactcgaccacttcggcgtgggcccagcggtggccaaagtcaaggtcaacttgacacgcgacactttgtctactctgtttgcaatgaaatctaatgtttgtgcttcaaac

SEQ ID NO: 47389 - DNA, 2635 bp, Zea Mays
caacagagcgccagaccatcacacactacgcacggacgacatcgaggaaccctagactagagcacattgcacgggcgacggcgcgccaccggtgactggcgtcccctcctcggtcctcactccccagcatggcgacgccctgccgcagcagaaacgatcaaccgatcggaaaacattaatttgtattcgatttgaaagcgcacccggcacctgctccgttcctgcgctgcttggcttccggtctgtgtcaaagcttgcatctcacgcgagtcgcacaaggacgaaccctatacagctccaggaggtcggtgccctagccacctaggccaccttcctggagaccgggcggcgacgacggggacgaacgaccgcgatgggcttcgagcgtgtggagctgcggtgtcccagggagctggacccacggccgagctggacgctcggcgatgtgctcgctgagcttgacgcgctggatgccacccgccgcgctgcgccacccacgcccctgaagcagccgccggattgggctaacggtggtggtgagaaggcctttgtgatgcgggttgatgacgacgacgaagacgacacagaagatgaagacgatggtacaagtggtgggaagtcccgggctctggtggccaaaggagcaaggttctcgtgtaatgatcttgcatcaagtgattcagaggatgaattagatggtcaggttgccccataccacttaatggagaaaagggacctagcgaagagcattcttcttgagctggaacacgagcatcatctaaaagttcaagaagaagttagaagtaagctagcttcattggaggtatgccaccaaaatgaaattcggagaacgatctctgcatttgcccgacttcagaaatatgcagaatcaagaaaggagatagacagaagacttgatgtacacttccagagaagaattgcagaagtactcgataaacacttatctatggtccaaagggatcatgaacaaaaatcccagattgttgaacgccgaataagagatgatgcagctcttgaagaagctaaaagaaaagagcaagctgtcaaggaagaaaagttaaggcaggaaagagcccagcaagaagcagaggctagacagaaggaagctgcaaaattagcagctgaagcacgaaaaacagcatttgaggctgctaaaaaggaagcagcagaaaaggaagcagcagaaaaggaggctgctaaattgagagatgcagcagcttctcaacctagtccgaattcccagaataatactgcagaaggcattaaagtttttggcgataaatacgcactagaagcagagtcacggaggcatgcattagtacagaatcaagtgccagaaaacattcatcacagcaaggaattcagcaaatatgaccgacaaattgccaaatccataagtaaacttatgccaactactgacagtgtcagaacaagggctagtgagcttgttaaagctttaaatggacaggattgtccccgtccaatctcttgttgtctatttgctaacaagattatttccattgtcaagagtagaaatacaaaggacaagacctttggaaatttggcctttgcgtgtggatatgtcatgctattagttacaaatcaggtaccagacgcaatggattatcttttagctgagttcaacagagtttgcatatacacggttccaaagcatatgcatgctttgaatgcacaagcacgaaatagagattattacagactgataggttaccaggaagaaaatggacagctcgagagcactgaaagttatctaacatacgtcgttgcatatgttaaactctacgcagcaatgattcagacggaaatcaaaggtgttcgtcatcctcatggtttagctgagggatggaagtggcttgccatgttcctcaattctctcccagctactacagccactgcatgtgcccttcacgctttcctcaagatggctggttttgcacttcacaagaaatatgggtcacagttcatgaaaatcctggatgtaatatcacggtgctttttaccagctttgaaggaacaaggcaacaagatgcaggctgaggctgtcaacaatctacagaattacctgaacgacaagatctacctggaggaaccagaagggcagtacctcgtccagcaactactatccaaggagttgttcatgtaaagatcaaaacaccagatcggtatgagacatcgtgtgtgatcgtctgaagggcggtacctcgtccaagctaccactatcgcaagaggggcctcatgtagagatgaaagcaccagatcgatatggagctgttcgtgtttcagaaacacgatcgagcctttcaaatctcacgaacattatttatgggacagtcccccagatcatttcccccctctgcacgggatcctgacgatgtatttgtttatgtgacttgtatccggccaaggacaggtatgataggttgaggttttatgtttgttgtagttgtacatgtactactagaatcgtgaccagaacaaaataatactcgaccacttcggcgtgggcccagcggtggccaaagtcaaggtcaacttgacacgcgacactttgtctactctgtttgcaatgaaatctaatgtttgtgcttcaaac

SEQ ID NO: 47390 - DNA, 2630 bp, Zea Mays
caacagagcgccagaccatcacacactacgcacggacgacatcgaggaaccctagactagagcacattgcacgggcgacggcgcgccaccggtgactggcgtcccctcctcggtcctcactccccagcatggcgacgccctgccgcagcagaaacgatcaaccgatcggaaaacattaatttgtattcgatttgaaagcgcacccggcacctgctccgttcctgcgctgcttggcttccggtctgtgtcaaagcttgcatctcacgcgagtcgcacaaggacgaaccctatacagctccaggaggtcggtgccctagccacctaggccaccttcctggagaccgggcggcgacgacggggacgaacgaccgcgatgggcttcgagcgtgtggagctgcggtgtcccagggagctggacccacggccgagctggacgctcggcgatgtgctcgctgagcttgacgcgctggatgccacccgccgcgctgcgccacccacgcccctgaagcagccgccggattgggctaacggtggtggtgagaaggcctttgtgatgcgggttgatgacgacgacgaagacgacacagaagatgaagacgatggtacaagtggtgggaagtcccgggctctggtggccaaaggagcaaggttctcgtgtaatgatcttgcatcaagtgattcagaggatgaattagatggtcaggttgccccataccacttaatggagaaaagggacctagcgaagagcattcttcttgagctggaacacgagcatcatctaaaagttcaagaagaagttagaagtaagctagcttcattggaggtatgccaccaaaatgaaattcggagaacgatctctgcatttgcccgacttcagaaatatgcagaatcaagaaaggagatagacagaagacttgatgtacacttccagagaagaataagtactcgataaacacttatctatggtccaaagggatcatgaacaaaaatcccagattgttgaacgccgaataagagatgatgcagctcttgaagaagctaaaagaaaagagcaagctgtcaaggaagaaaagttaaggcaggaaagagcccagcaagaagcagaggctagacagaaggaagctgcaaaattagcagctgaagcacgaaaaacagcatttgaggctgctaaaaaggaagcagcagaaaaggaagcagcagaaaaggaggctgctaaattgagagatgcagcagcttctcaacctagtccgaattcccagaataatactgcagaaggcattaaagtttttggcgataaatacgcactagaagcagagtcacggaggcatgcattagtacagaatcaagtgccagaaaacattcatcacagcaaggaattcagcaaatatgaccgacaaattgccaaatccataagtaaacttatgccaactactgacagtgtcagaacaagggctagtgagcttgttaaagctttaaatggacaggattgtccccgtccaatctcttgttgtctatttgctaacaagattatttccattgtcaagagtagaaatacaaaggacaagacctttggaaatttggcctttgcgtgtggatatgtcatgctattagttacaaatcaggtaccagacgcaatggattatcttttagctgagttcaacagagtttgcatatacacggttccaaagcatatgcatgctttgaatgcacaagcacgaaatagagattattacagactgataggttaccaggaagaaaatggacagctcgagagcactgaaagttatctaacatacgtcgttgcatatgttaaactctacgcagcaatgattcagacggaaatcaaaggtgttcgtcatcctcatggtttagctgagggatggaagtggcttgccatgttcctcaattctctcccagctactacagccactgcatgtgcccttcacgctttcctcaagatggctggttttgcacttcacaagaaatatgggtcacagttcatgaaaatcctggatgtaatatcacggtgctttttaccagctttgaaggaacaaggcaacaagatgcaggctgaggctgtcaacaatctacagaattacctgaacgacaagatctacctggaggaaccagaagggcagtacctcgtccagcaactactatccaaggagttgttcatgtaaagatcaaaacaccagatcggtatgagacatcgtgtgtgatcgtctgaagggcggtacctcgtccaagctaccactatcgcaagaggggcctcatgtagagatgaaagcaccagatcgatatggagctgttcgtgtttcagaaacacgatcgagcctttcaaatctcacgaacattatttatgggacagtcccccagatcatttcccccctctgcacgggatcctgacgatgtatttgtttatgtgacttgtatccggccaaggacaggtatgataggttgaggttttatgtttgttgtagttgtacatgtactactagaatcgtgaccagaacaaaataatactcgaccacttcggcgtgggcccagcggtggccaaagtcaaggtcaacttgacacgcgacactttgtctactctgtttgcaatgaaatctaatgtttgtgcttcaaac

SEQ ID NO: 47391 - DNA, 2619 bp, Zea Mays
cgccagaccatcacacactacgcacggacgacatcgaggaaccctagactagagcacattgcacgggcgacggcgcgccaccggtgactggcgtcccctcctcggtcctcactccccagcatggcgacgccctgccgcagcagaaacgatcaaccgatcggaaaacattaatttgtattcgatttgaaagcgcacccggcacctgctccgttcctgcgctgcttggcttccggtctgtgtcaaagcttgcatctcacgcgagtcgcacaaggacgaaccctatacagctccaggaggtcggtgccctagccacctaggccaccttcctggagaccgggcggcgacgacggggacgaacgaccgcgatgggcttcgagcgtgtggagctgcggtgtcccagggagctggacccacggccgagctggacgctcggcgatgtgctcgctgagcttgacgcgctggatgccacccgccgcgctgcgccacccacgcccctgaagcagccgccggattgggctaacggtggtggtgagaaggcctttgtgatgcgggttgatgacgacgacgaagacgacacagaagatgaagacgatggtacaagtggtgggaagtcccgggctctggtggccaaaggagcaaggttctcgtgtaatgatcttgcatcaagtgattcagaggatgaattagatggtcaggttgccccataccacttaatggagaaaagggacctagcgaagagcattcttcttgagctggaacacgagcatcatctaaaagttcaagaagaagttagaagtaagctagcttcattggaggtatgccaccaaaatgaaattcggagaacgatctctgcatttgcccgacttcagaaatatgcagaatcaagaaaggagatagacagaagacttgatgtacacttccagagaagaataagtactcgataaacacttatctatggtccaaagggatcatgaacaaaaatcccagattgttgaacgccgaataagagatgatgcagctcttgaagaagctaaaagaaaagagcaagctgtcaaggaagaaaagttaaggcaggaaagagcccagcaagaagcagaggctagacagaaggaagctgcaaaattagcagctgaagcacgaaaaacagcatttgaggctgctaaaaaggaagcagcagaaaaggaagcagcagaaaaggaggctgctaaattgagagatgcagcagcttctcaacctagtccgaattcccagaataatactgcaggcattaaagtttttggcgataaatacgcactagaagcagagtcacggaggcatgcattagtacagaatcaagtgccagaaaacattcatcacagcaaggaattcagcaaatatgaccgacaaattgccaaatccataagtaaacttatgccaactactgacagtgtcagaacaagggctagtgagcttgttaaagctttaaatggacaggattgtccccgtccaatctcttgttgtctatttgctaacaagattatttccattgtcaagagtagaaatacaaaggacaagacctttggaaatttggcctttgcgtgtggatatgtcatgctattagttacaaatcaggtaccagacgcaatggattatcttttagctgagttcaacagagtttgcatatacacggttccaaagcatatgcatgctttgaatgcacaagcacgaaatagagattattacagactgataggttaccaggaagaaaatggacagctcgagagcactgaaagttatctaacatacgtcgttgcatatgttaaactctacgcagcaatgattcagacggaaatcaaaggtgttcgtcatcctcatggtttagctgagggatggaagtggcttgccatgttcctcaattctctcccagctactacagccactgcatgtgcccttcacgctttcctcaagatggctggttttgcacttcacaagaaatatgggtcacagttcatgaaaatcctggatgtaatatcacggtgctttttaccagctttgaaggaacaaggcaacaagatgcaggctgaggctgtcaacaatctacagaattacctgaacgacaagatctacctggaggaaccagaagggcagtacctcgtccagcaactactatccaaggagttgttcatgtaaagatcaaaacaccagatcggtatgagacatcgtgtgtgatcgtctgaagggcggtacctcgtccaagctaccactatcgcaagaggggcctcatgtagagatgaaagcaccagatcgatatggagctgttcgtgtttcagaaacacgatcgagcctttcaaatctcacgaacattatttatgggacagtcccccagatcatttcccccctctgcacgggatcctgacgatgtatttgtttatgtgacttgtatccggccaaggacaggtatgataggttgaggttttatgtttgttgtagttgtacatgtactactagaatcgtgaccagaacaaaataatactcgaccacttcggcgtgggcccagcggtggccaaagtcaaggtcaacttgacacgcgacactttgtctactctgtttgcaatgaaatctaatgtttgtgcttcaaac

SEQ ID NO: 47392 - DNA, 2394 bp, Zea Mays
agaccatcacacactacgcacggacgacatcgaggaaccctagactagagcacattgcacgggcgacggcgcgccaccggtgactggcgtcccctcctcggtcctcactccccagcatggcgacgccctgccgcagcaggggcttcgagcgtgtggagctgcggtgtcccagggagctggacccacggccgagctggacgctcggcgatgtgctcgctgagcttgacgcgctggatgccacccgccgcgctgcgccacccacgcccctgaagcagccgccggattgggctaacggtggtggtgagaaggcctttgtgatgcgggttgatgacgacgacgaagacgacacagaagatgaagacgatggtacaagtggtgggaagtcccgggctctggtggccaaaggagcaaggttctcgtgtaatgatcttgcatcaagtgattcagaggatgaattagatggtcaggttgccccataccacttaatggagaaaagggacctagcgaagagcattcttcttgagctggaacacgagcatcatctaaaagttcaagaagaagttagaagtaagctagcttcattggaggtatgccaccaaaatgaaattcggagaacgatctctgcatttgcccgacttcagaaatatgcagaatcaagaaaggagatagacagaagacttgatgtacacttccagagaagaataagtactcgataaacacttatctatggtccaaagggatcatgaacaaaaatcccagattgttgaacgccgaataagagatgatgcagctcttgaagaagctaaaagaaaagagcaagctgtcaaggaagaaaagttaaggcaggaaagagcccagcaagaagcagaggctagacagaaggaagctgcaaaattagcagctgaagcacgaaaaacagcatttgaggctgctaaaaaggaagcagcagaaaaggaagcagcagaaaaggaggctgctaaattgagagatgcagcagcttctcaacctagtccgaattcccagaataatactgcagaaggcattaaagtttttggcgataaatacgcactagaagcagagtcacggaggcatgcattagtacagaatcaagtgccagaaaacattcatcacagcaaggaattcagcaaatatgaccgacaaattgccaaatccataagtaaacttatgccaactactgacagtgtcagaacaagggctagtgagcttgttaaagctttaaatggacaggattgtccccgtccaatctcttgttgtctatttgctaacaagattatttccattgtcaagagtagaaatacaaaggacaagacctttggaaatttggcctttgcgtgtggatatgtcatgctattagttacaaatcaggtaccagacgcaatggattatcttttagctgagttcaacagagtttgcatatacacggttccaaagcatatgcatgctttgaatgcacaagcacgaaatagagattattacagactgataggttaccaggaagaaaatggacagctcgagagcactgaaagttatctaacatacgtcgttgcatatgttaaactctacgcagcaatgattcagacggaaatcaaaggtgttcgtcatcctcatggtttagctgagggatggaagtggcttgccatgttcctcaattctctcccagctactacagccactgcatgtgcccttcacgctttcctcaagatggctggttttgcacttcacaagaaatatgggtcacagttcatgaaaatcctggatgtaatatcacggtgctttttaccagctttgaaggaacaaggcaacaagatgcaggctgaggctgtcaacaatctacagaattacctgaacgacaagatctacctggaggaaccagaagggcagtacctcgtccagcaactactatccaaggagttgttcatgtaaagatcaaaacaccagatcggtatgagacatcgtgtgtgatcgtctgaagggcggtacctcgtccaagctaccactatcgcaagaggggcctcatgtagagatgaaagcaccagatcgatatggagctgttcgtgtttcagaaacacgatcgagcctttcaaatctcacgaacattatttatgggacagtcccccagatcatttcccccctctgcacgggatcctgacgatgtatttgtttatgtgacttgtatccggccaaggacaggtatgataggttgaggttttatgtttgttgtagttgtacatgtactactagaatcgtgaccagaacaaaataatactcgaccacttcggcgtgggcccagcggtggccaaagtcaaggtcaacttgacacgcgacactttgtctactctgtttgcaatgaaatctaatgtttgtgcttcaaac

SEQ ID NO: 47393 - DNA, 2399 bp, Zea Mays
agaccatcacacactacgcacggacgacatcgaggaaccctagactagagcacattgcacgggcgacggcgcgccaccggtgactggcgtcccctcctcggtcctcactccccagcatggcgacgccctgccgcagcaggggcttcgagcgtgtggagctgcggtgtcccagggagctggacccacggccgagctggacgctcggcgatgtgctcgctgagcttgacgcgctggatgccacccgccgcgctgcgccacccacgcccctgaagcagccgccggattgggctaacggtggtggtgagaaggcctttgtgatgcgggttgatgacgacgacgaagacgacacagaagatgaagacgatggtacaagtggtgggaagtcccgggctctggtggccaaaggagcaaggttctcgtgtaatgatcttgcatcaagtgattcagaggatgaattagatggtcaggttgccccataccacttaatggagaaaagggacctagcgaagagcattcttcttgagctggaacacgagcatcatctaaaagttcaagaagaagttagaagtaagctagcttcattggaggtatgccaccaaaatgaaattcggagaacgatctctgcatttgcccgacttcagaaatatgcagaatcaagaaaggagatagacagaagacttgatgtacacttccagagaagaattgcagaagtactcgataaacacttatctatggtccaaagggatcatgaacaaaaatcccagattgttgaacgccgaataagagatgatgcagctcttgaagaagctaaaagaaaagagcaagctgtcaaggaagaaaagttaaggcaggaaagagcccagcaagaagcagaggctagacagaaggaagctgcaaaattagcagctgaagcacgaaaaacagcatttgaggctgctaaaaaggaagcagcagaaaaggaagcagcagaaaaggaggctgctaaattgagagatgcagcagcttctcaacctagtccgaattcccagaataatactgcagaaggcattaaagtttttggcgataaatacgcactagaagcagagtcacggaggcatgcattagtacagaatcaagtgccagaaaacattcatcacagcaaggaattcagcaaatatgaccgacaaattgccaaatccataagtaaacttatgccaactactgacagtgtcagaacaagggctagtgagcttgttaaagctttaaatggacaggattgtccccgtccaatctcttgttgtctatttgctaacaagattatttccattgtcaagagtagaaatacaaaggacaagacctttggaaatttggcctttgcgtgtggatatgtcatgctattagttacaaatcaggtaccagacgcaatggattatcttttagctgagttcaacagagtttgcatatacacggttccaaagcatatgcatgctttgaatgcacaagcacgaaatagagattattacagactgataggttaccaggaagaaaatggacagctcgagagcactgaaagttatctaacatacgtcgttgcatatgttaaactctacgcagcaatgattcagacggaaatcaaaggtgttcgtcatcctcatggtttagctgagggatggaagtggcttgccatgttcctcaattctctcccagctactacagccactgcatgtgcccttcacgctttcctcaagatggctggttttgcacttcacaagaaatatgggtcacagttcatgaaaatcctggatgtaatatcacggtgctttttaccagctttgaaggaacaaggcaacaagatgcaggctgaggctgtcaacaatctacagaattacctgaacgacaagatctacctggaggaaccagaagggcagtacctcgtccagcaactactatccaaggagttgttcatgtaaagatcaaaacaccagatcggtatgagacatcgtgtgtgatcgtctgaagggcggtacctcgtccaagctaccactatcgcaagaggggcctcatgtagagatgaaagcaccagatcgatatggagctgttcgtgtttcagaaacacgatcgagcctttcaaatctcacgaacattatttatgggacagtcccccagatcatttcccccctctgcacgggatcctgacgatgtatttgtttatgtgacttgtatccggccaaggacaggtatgataggttgaggttttatgtttgttgtagttgtacatgtactactagaatcgtgaccagaacaaaataatactcgaccacttcggcgtgggcccagcggtggccaaagtcaaggtcaacttgacacgcgacactttgtctactctgtttgcaatgaaatctaatgtttgtgcttcaaac

SEQ ID NO: 47394 - DNA, 2531 bp, Zea Mays
atcacacactacgcacggacgacatcgaggaaccctagactagagcacattgcacgggcgacggcgcgccaccggtgactggcgtcccctcctcggtcctcactccccagcatggcgacgccctgccgcagcagaaacgatcaaccgatcggaaaacattaatttgtattcgatttgaaagcgcacccggcacctgctccgttcctgcgctgcttggcttccggtctgtgtcaaagcttgcatctcacgcgagtcgcacaaggacgaaccctatacagctccaggaggtcggtgccctagccacctaggccaccttcctggagaccgggcggcgacgacggggacgaacgaccgcgatgggcttcgagcgtgtggagctgcggtgtcccagggagctggacccacggccgagctggacgctcggcgatgtgctcgctgagcttgacgcgctggatgccacccgccgcgctgcgccacccacgcccctgaagcagccgccggattgggctaacggtggtggtgagaaggcctttgtgatgcgggttgatgacgacgacgaagacgacacagaagatgaagacgatggtacaagtggtgggaagtcccgggctctggtggccaaaggagcaaggttctcgtgtaatgatcttgcatcaagtgattcagaggatgaattagatggtcaggttgccccataccacttaatggagaaaagggacctagcgaagagcattcttcttgagctggaacacgagcatcatctaaaagttcaagaagaagttagaagtaagctagcttcattggaggtatgccaccaaaatgaaattcggagaacgatctctgcatttgcccgacttcagaaatatgcagaatcaagaaaggagatagacagaagacttgatgtacacttccagagaagaataagtactcgataaacacttatctatggtccaaagggatcatgaacaaaaatcccagattgttgaacgccgaataagagatgatgcagctcttgaagaagctaaaagaaaagagcaagctgtcaaggaagaaaagttaaggcaggaaagagcccagcaagaagcagaggctagacagaaggaagctgcaaaattagcagctgaagcacgaaaaacagcatttgaggctgctaaaaaggaagcagcagaaaaggaagcagcagaaaaggaggctgctaaattgagagatgcagcagcttctcaacctagtccgaattcccagaataatactgcagaaggcattaaagtttttggcgataaatacgcactagaagcagagtcacggaggcatgcattagtacagaatcaagtgccagaaaacattcatcacagcaaggaattcagcaaatatgaccgacaaattgccaaatccataagtaaacttatgccaactactgacagtgtcagaacaagggctagtgagcttgttaaagctttaaatggacaggattgtccccgtccaatctcttgttgtctatttgctaacaagattatttccattgtcaagagtagaaatacaaaggacaagacctttggaaatttggcctttgcgtgtggatatgtcatgctattagttacaaatcaggtaccagacgcaatggattatcttttagctgagttcaacagagtttgcatatacacggttccaaagcatatgcatgctttgaatgcacaagcacgaaatagagattattacagactgataggttaccaggaagaaaatggacagctcgagagcactgaaagttatctaacatacgtcgttgcatatgttaaactctacgcagcaatgattcagacggaaatcaaaggtgttcgtcatcctcatggtttagctgagggatggaagtggcttgccatgttcctcaattctctcccagctactacagccactgcatgtgcccttcacgctttcctcaagctttgaaggaacaaggcaacaagatgcaggctgaggctgtcaacaatctacagaattacctgaacgacaagatctacctggaggaaccagaagggcagtacctcgtccagcaactactatccaaggagttgttcatgtaaagatcaaaacaccagatcggtatgagacatcgtgtgtgatcgtctgaagggcggtacctcgtccaagctaccactatcgcaagaggggcctcatgtagagatgaaagcaccagatcgatatggagctgttcgtgtttcagaaacacgatcgagcctttcaaatctcacgaacattatttatgggacagtcccccagatcatttcccccctctgcacgggatcctgacgatgtatttgtttatgtgacttgtatccggccaaggacaggtatgataggttgaggttttatgtttgttgtagttgtacatgtactactagaatcgtgaccagaacaaaataatactcgaccacttcggcgtgggcccagcggtggccaaagtcaaggtcaacttgacacgcgacactttgtctactctgtttgcaatgaaatctaatgtttgtgcttcaaac

SEQ ID NO: 47395 - DNA, 1872 bp, Zea Mays
cacacactacgcacggacgacatcgaggaaccctagactagagcacattgcacgggcgacggcgcgccaccggtgactggcgtcccctcctcggtcctcactccccagcatggcgacgccctgccgcagcagaaacgatcaaccgatcggaaaacattaatttgtattcgatttgaaagcgcacccggcacctgctccgttcctgcgctgcttggcttccggtctgtgtcaaagcttgcatctcacgcgagtcgcacaaggacgaaccctatacagctccaggaggtcggtgccctagccacctaggccaccttcctggagaccgggcggcgacgacggggacgaacgaccgcgatgggcttcgagcgtgtggagctgcggtgtcccagggagctggacccacggccgagctggacgctcggcgatgtgctcgctgagcttgacgcgctggatgccacccgccgcgctgcgccacccacgcccctgaagcagccgccggattgggctaacggtggtggtgagaaggcctttgtgatgcgggttgatgacgacgacgaagacgacacagaagatgaagacgatggtacaagtggtgggaagtcccgggctctggtggccaaaggagcaaggttctcgtgtaatgatcttgcatcaagtgattcagaggatgaattagatggtcaggttgccccataccacttaatggagaaaagggacctagcgaagagcattcttcttgagctggaacacgagcatcatctaaaagttcaagaagaagttagaagtaagctagcttcattggaggtatgccaccaaaatgaaattcggagaacgatctctgcatttgcccgacttcagaaatatgcagaatcaagaaaggagatagacagaagacttgatgtacacttccagagaagaataagtactcgataaacacttatctatggtccaaagggatcatgaacaaaaatcccagattgttgaacgccgaataagagatgatgcagctcttgaagaagctaaaagaaaagagcaagctgtcaaggaagaaaagttaaggcaggaaagagcccagcaagaagcagaggctagacagaaggaagctgcaaaattagcagctgaagcacgaaaaacagcatttgaggctgctaaaaaggaagcagcagaaaaggaagcagcagaaaaggaggctgctaaattgagagatgcagcagcttctcaacctagtccgaattcccagaataatactgcaggcattaaagtttttggcgataaatacgcactagaagcagagtcacggaggcatgcattagtacagaatcaagtgccagaaaacattcatcacagcaaggaattcagcaaatatgaccgacaaattgccaaatccataagtaaacttatgccaactactgacagtgtcagaacaagggctagtgagcttgttaaagctttaaatggacaggattgtccccgtccaatctcttgttgtctatttgctaacaagattatttccattgtcaagagtagaaatacaaaggacaagacctttggaaatttggcctttgcgtgtggatatgtcatgctattagttacaaatcaggtaccagacgcaatggattatcttttagctgagttcaacagagtttgcatatacacggttccaaagcatatgcatgctttgaatgcacaagcacgaaatagagattattacagactgataggttaccaggaagaaaatggacagctcgagagcactgaaagttatctaacatacgtcgttgcatatgttaaactctacgcagcaatgattcagatataaggctatgtccagtagactggccttttgcagtggaacataaaggtgactcccta

SEQ ID NO: 47396 - DNA, 1651 bp, Zea Mays
cacacactacgcacggacgacatcgaggaaccctagactagagcacattgcacgggcgacggcgcgccaccggtgactggcgtcccctcctcggtcctcactccccagcatggcgacgccctgccgcagcaggggcttcgagcgtgtggagctgcggtgtcccagggagctggacccacggccgagctggacgctcggcgatgtgctcgctgagcttgacgcgctggatgccacccgccgcgctgcgccacccacgcccctgaagcagccgccggattgggctaacggtggtggtgagaaggcctttgtgatgcgggttgatgacgacgacgaagacgacacagaagatgaagacgatggtacaagtggtgggaagtcccgggctctggtggccaaaggagcaaggttctcgtgtaatgatcttgcatcaagtgattcagaggatgaattagatggtcaggttgccccataccacttaatggagaaaagggacctagcgaagagcattcttcttgagctggaacacgagcatcatctaaaagttcaagaagaagttagaagtaagctagcttcattggaggtatgccaccaaaatgaaattcggagaacgatctctgcatttgcccgacttcagaaatatgcagaatcaagaaaggagatagacagaagacttgatgtacacttccagagaagaataagtactcgataaacacttatctatggtccaaagggatcatgaacaaaaatcccagattgttgaacgccgaataagagatgatgcagctcttgaagaagctaaaagaaaagagcaagctgtcaaggaagaaaagttaaggcaggaaagagcccagcaagaagcagaggctagacagaaggaagctgcaaaattagcagctgaagcacgaaaaacagcatttgaggctgctaaaaaggaagcagcagaaaaggaagcagcagaaaaggaggctgctaaattgagagatgcagcagcttctcaacctagtccgaattcccagaataatactgcagaaggcattaaagtttttggcgataaatacgcactagaagcagagtcacggaggcatgcattagtacagaatcaagtgccagaaaacattcatcacagcaaggaattcagcaaatatgaccgacaaattgccaaatccataagtaaacttatgccaactactgacagtgtcagaacaagggctagtgagcttgttaaagctttaaatggacaggattgtccccgtccaatctcttgttgtctatttgctaacaagattatttccattgtcaagagtagaaatacaaaggacaagacctttggaaatttggcctttgcgtgtggatatgtcatgctattagttacaaatcaggtaccagacgcaatggattatcttttagctgagttcaacagagtttgcatatacacggttccaaagcatatgcatgctttgaatgcacaagcacgaaatagagattattacagactgataggttaccaggaagaaaatggacagctcgagagcactgaaagttatctaacatacgtcgttgcatatgttaaactctacgcagcaatgattcagatataaggctatgtccagtagactggccttttgcagtggaacataaaggtgactcccta

SEQ ID NO: 47397 - DNA, 2389 bp, Zea Mays
cacacactacgcacggacgacatcgaggaaccctagactagagcacattgcacgggcgacggcgcgccaccggtgactggcgtcccctcctcggtcctcactccccagcatggcgacgccctgccgcagcaggggcttcgagcgtgtggagctgcggtgtcccagggagctggacccacggccgagctggacgctcggcgatgtgctcgctgagcttgacgcgctggatgccacccgccgcgctgcgccacccacgcccctgaagcagccgccggattgggctaacggtggtggtgagaaggcctttgtgatgcgggttgatgacgacgacgaagacgacacagaagatgaagacgatggtacaagtggtgggaagtcccgggctctggtggccaaaggagcaaggttctcgtgtaatgatcttgcatcaagtgattcagaggatgaattagatggtcaggttgccccataccacttaatggagaaaagggacctagcgaagagcattcttcttgagctggaacacgagcatcatctaaaagttcaagaagaagttagaagtaagctagcttcattggaggtatgccaccaaaatgaaattcggagaacgatctctgcatttgcccgacttcagaaatatgcagaatcaagaaaggagatagacagaagacttgatgtacacttccagagaagaattgcagaagtactcgataaacacttatctatggtccaaagggatcatgaacaaaaatcccagattgttgaacgccgaataagagatgatgcagctcttgaagaagctaaaagaaaagagcaagctgtcaaggaagaaaagttaaggcaggaaagagcccagcaagaagcagaggctagacagaaggaagctgcaaaattagcagctgaagcacgaaaaacagcatttgaggctgctaaaaaggaagcagcagaaaaggaagcagcagaaaaggaggctgctaaattgagagatgcagcagcttctcaacctagtccgaattcccagaataatactgcaggcattaaagtttttggcgataaatacgcactagaagcagagtcacggaggcatgcattagtacagaatcaagtgccagaaaacattcatcacagcaaggaattcagcaaatatgaccgacaaattgccaaatccataagtaaacttatgccaactactgacagtgtcagaacaagggctagtgagcttgttaaagctttaaatggacaggattgtccccgtccaatctcttgttgtctatttgctaacaagattatttccattgtcaagagtagaaatacaaaggacaagacctttggaaatttggcctttgcgtgtggatatgtcatgctattagttacaaatcaggtaccagacgcaatggattatcttttagctgagttcaacagagtttgcatatacacggttccaaagcatatgcatgctttgaatgcacaagcacgaaatagagattattacagactgataggttaccaggaagaaaatggacagctcgagagcactgaaagttatctaacatacgtcgttgcatatgttaaactctacgcagcaatgattcagacggaaatcaaaggtgttcgtcatcctcatggtttagctgagggatggaagtggcttgccatgttcctcaattctctcccagctactacagccactgcatgtgcccttcacgctttcctcaagatggctggttttgcacttcacaagaaatatgggtcacagttcatgaaaatcctggatgtaatatcacggtgctttttaccagctttgaaggaacaaggcaacaagatgcaggctgaggctgtcaacaatctacagaattacctgaacgacaagatctacctggaggaaccagaagggcagtacctcgtccagcaactactatccaaggagttgttcatgtaaagatcaaaacaccagatcggtatgagacatcgtgtgtgatcgtctgaagggcggtacctcgtccaagctaccactatcgcaagaggggcctcatgtagagatgaaagcaccagatcgatatggagctgttcgtgtttcagaaacacgatcgagcctttcaaatctcacgaacattatttatgggacagtcccccagatcatttcccccctctgcacgggatcctgacgatgtatttgtttatgtgacttgtatccggccaaggacaggtatgataggttgaggttttatgtttgttgtagttgtacatgtactactagaatcgtgaccagaacaaaataatactcgaccacttcggcgtgggcccagcggtggccaaagtcaaggtcaacttgacacgcgacactttgtctactctgtttgcaatgaaatctaatgtttgtgcttcaaac

SEQ ID NO: 47398 - DNA, 2613 bp, Zea Mays
cacacactacgcacggacgacatcgaggaaccctagactagagcacattgcacgggcgacggcgcgccaccggtgactggcgtcccctcctcggtcctcactccccagcatggcgacgccctgccgcagcagaaacgatcaaccgatcggaaaacattaatttgtattcgatttgaaagcgcacccggcacctgctccgttcctgcgctgcttggcttccggtctgtgtcaaagcttgcatctcacgcgagtcgcacaaggacgaaccctatacagctccaggaggtcggtgccctagccacctaggccaccttcctggagaccgggcggcgacgacggggacgaacgaccgcgatgggcttcgagcgtgtggagctgcggtgtcccagggagctggacccacggccgagctggacgctcggcgatgtgctcgctgagcttgacgcgctggatgccacccgccgcgctgcgccacccacgcccctgaagcagccgccggattgggctaacggtggtggtgagaaggcctttgtgatgcgggttgatgacgacgacgaagacgacacagaagatgaagacgatggtacaagtggtgggaagtcccgggctctggtggccaaaggagcaaggttctcgtgtaatgatcttgcatcaagtgattcagaggatgaattagatggtcaggttgccccataccacttaatggagaaaagggacctagcgaagagcattcttcttgagctggaacacgagcatcatctaaaagttcaagaagaagttagaagtaagctagcttcattggaggtatgccaccaaaatgaaattcggagaacgatctctgcatttgcccgacttcagaaatatgcagaatcaagaaaggagatagacagaagacttgatgtacacttccagagaagaattgcagaagtactcgataaacacttatctatggtccaaagggatcatgaacaaaaatcccagattgttgaacgccgaataagagatgatgcagctcttgaagaagctaaaagaaaagagcaagctgtcaaggaagaaaagttaaggcaggaaagagcccagcaagaagcagaggctagacagaaggaagctgcaaaattagcagctgaagcacgaaaaacagcatttgaggctgctaaaaaggaagcagcagaaaaggaagcagcagaaaaggaggctgctaaattgagagatgcagcagcttctcaacctagtccgaattcccagaataatactgcaggcattaaagtttttggcgataaatacgcactagaagcagagtcacggaggcatgcattagtacagaatcaagtgccagaaaacattcatcacagcaaggaattcagcaaatatgaccgacaaattgccaaatccataagtaaacttatgccaactactgacagtgtcagaacaagggctagtgagcttgttaaagctttaaatggacaggattgtccccgtccaatctcttgttgtctatttgctaacaagattatttccattgtcaagagtagaaatacaaaggacaagacctttggaaatttggcctttgcgtgtggatatgtcatgctattagttacaaatcaggtaccagacgcaatggattatcttttagctgagttcaacagagtttgcatatacacggttccaaagcatatgcatgctttgaatgcacaagcacgaaatagagattattacagactgataggttaccaggaagaaaatggacagctcgagagcactgaaagttatctaacatacgtcgttgcatatgttaaactctacgcagcaatgattcagacggaaatcaaaggtgttcgtcatcctcatggtttagctgagggatggaagtggcttgccatgttcctcaattctctcccagctactacagccactgcatgtgcccttcacgctttcctcaagatggctggttttgcacttcacaagaaatatgggtcacagttcatgaaaatcctggatgtaatatcacggtgctttttaccagctttgaaggaacaaggcaacaagatgcaggctgaggctgtcaacaatctacagaattacctgaacgacaagatctacctggaggaaccagaagggcagtacctcgtccagcaactactatccaaggagttgttcatgtaaagatcaaaacaccagatcggtatgagacatcgtgtgtgatcgtctgaagggcggtacctcgtccaagctaccactatcgcaagaggggcctcatgtagagatgaaagcaccagatcgatatggagctgttcgtgtttcagaaacacgatcgagcctttcaaatctcacgaacattatttatgggacagtcccccagatcatttcccccctctgcacgggatcctgacgatgtatttgtttatgtgacttgtatccggccaaggacaggtatgataggttgaggttttatgtttgttgtagttgtacatgtactactagaatcgtgaccagaacaaaataatactcgaccacttcggcgtgggcccagcggtggccaaagtcaaggtcaacttgacacgcgacactttgtctactctgtttgcaatgaaatctaatgtttgtgcttcaaac

SEQ ID NO: 47399 - DNA, 2384 bp, Zea Mays
cacacactacgcacggacgacatcgaggaaccctagactagagcacattgcacgggcgacggcgcgccaccggtgactggcgtcccctcctcggtcctcactccccagcatggcgacgccctgccgcagcaggggcttcgagcgtgtggagctgcggtgtcccagggagctggacccacggccgagctggacgctcggcgatgtgctcgctgagcttgacgcgctggatgccacccgccgcgctgcgccacccacgcccctgaagcagccgccggattgggctaacggtggtggtgagaaggcctttgtgatgcgggttgatgacgacgacgaagacgacacagaagatgaagacgatggtacaagtggtgggaagtcccgggctctggtggccaaaggagcaaggttctcgtgtaatgatcttgcatcaagtgattcagaggatgaattagatggtcaggttgccccataccacttaatggagaaaagggacctagcgaagagcattcttcttgagctggaacacgagcatcatctaaaagttcaagaagaagttagaagtaagctagcttcattggaggtatgccaccaaaatgaaattcggagaacgatctctgcatttgcccgacttcagaaatatgcagaatcaagaaaggagatagacagaagacttgatgtacacttccagagaagaataagtactcgataaacacttatctatggtccaaagggatcatgaacaaaaatcccagattgttgaacgccgaataagagatgatgcagctcttgaagaagctaaaagaaaagagcaagctgtcaaggaagaaaagttaaggcaggaaagagcccagcaagaagcagaggctagacagaaggaagctgcaaaattagcagctgaagcacgaaaaacagcatttgaggctgctaaaaaggaagcagcagaaaaggaagcagcagaaaaggaggctgctaaattgagagatgcagcagcttctcaacctagtccgaattcccagaataatactgcaggcattaaagtttttggcgataaatacgcactagaagcagagtcacggaggcatgcattagtacagaatcaagtgccagaaaacattcatcacagcaaggaattcagcaaatatgaccgacaaattgccaaatccataagtaaacttatgccaactactgacagtgtcagaacaagggctagtgagcttgttaaagctttaaatggacaggattgtccccgtccaatctcttgttgtctatttgctaacaagattatttccattgtcaagagtagaaatacaaaggacaagacctttggaaatttggcctttgcgtgtggatatgtcatgctattagttacaaatcaggtaccagacgcaatggattatcttttagctgagttcaacagagtttgcatatacacggttccaaagcatatgcatgctttgaatgcacaagcacgaaatagagattattacagactgataggttaccaggaagaaaatggacagctcgagagcactgaaagttatctaacatacgtcgttgcatatgttaaactctacgcagcaatgattcagacggaaatcaaaggtgttcgtcatcctcatggtttagctgagggatggaagtggcttgccatgttcctcaattctctcccagctactacagccactgcatgtgcccttcacgctttcctcaagatggctggttttgcacttcacaagaaatatgggtcacagttcatgaaaatcctggatgtaatatcacggtgctttttaccagctttgaaggaacaaggcaacaagatgcaggctgaggctgtcaacaatctacagaattacctgaacgacaagatctacctggaggaaccagaagggcagtacctcgtccagcaactactatccaaggagttgttcatgtaaagatcaaaacaccagatcggtatgagacatcgtgtgtgatcgtctgaagggcggtacctcgtccaagctaccactatcgcaagaggggcctcatgtagagatgaaagcaccagatcgatatggagctgttcgtgtttcagaaacacgatcgagcctttcaaatctcacgaacattatttatgggacagtcccccagatcatttcccccctctgcacgggatcctgacgatgtatttgtttatgtgacttgtatccggccaaggacaggtatgataggttgaggttttatgtttgttgtagttgtacatgtactactagaatcgtgaccagaacaaaataatactcgaccacttcggcgtgggcccagcggtggccaaagtcaaggtcaacttgacacgcgacactttgtctactctgtttgcaatgaaatctaatgtttgtgcttcaaac

SEQ ID NO: 47400 - DNA, 2673 bp, Zea Mays
cacacactacgcacggacgacatcgaggaaccctagactagagcacattgcacgggcgacggcgcgccaccggtgactggcgtcccctcctcggtcctcactccccagcatggcgacgccctgccgcagcagaaacgatcaaccgatcggaaaacattaatttgtattcgatttgaaagcgcacccggcacctgctccgttcctgcgctgcttggcttccggtctgtgtcaaagcttgcatctcacgcgagtcgcacaaggacgaaccctatacagctccaggaggtcggtgccctagccacctaggccaccttcctggagaccgggcggcgacgacggggacgaacgaccgcgatgggcttcgagcgtgtggagctgcggtgtcccagggagctggacccacggccgagctggacgctcggcgatgtgctcgctgagcttgacgcgctggatgccacccgccgcgctgcgccacccacgcccctgaagcagccgccggattgggctaacggtggtggtgagaaggcctttgtgatgcgggttgatgacgacgacgaagacgacacagaagatgaagacgatggtacaagtggtgggaagtcccgggctctggtggccaaaggagcaaggttctcgtgtaatgatcttgcatcaagtgattcagaggatgaattagatggtcaggttgccccataccacttaatggagaaaagggacctagcgaagagcattcttcttgagctggaacacgagcatcatctaaaagttcaagaagaagttagaagtaagctagcttcattggaggtatgccaccaaaatgaaattcggagaacgatctctgcatttgcccgacttcagaaatatgcagaatcaagaaaggagatagacagaagacttgatgtacacttccagagaagaattgagcagcatttaaggcatcaagcatttcttatactattccaatatttgtatccaaatgcagaagtactcgataaacacttatctatggtccaaagggatcatgaacaaaaatcccagattgttgaacgccgaataagagatgatgcagctcttgaagaagctaaaagaaaagagcaagctgtcaaggaagaaaagttaaggcaggaaagagcccagcaagaagcagaggctagacagaaggaagctgcaaaattagcagctgaagcacgaaaaacagcatttgaggctgctaaaaaggaagcagcagaaaaggaagcagcagaaaaggaggctgctaaattgagagatgcagcagcttctcaacctagtccgaattcccagaataatactgcagaaggcattaaagtttttggcgataaatacgcactagaagcagagtcacggaggcatgcattagtacagaatcaagtgccagaaaacattcatcacagcaaggaattcagcaaatatgaccgacaaattgccaaatccataagtaaacttatgccaactactgacagtgtcagaacaagggctagtgagcttgttaaagctttaaatggacaggattgtccccgtccaatctcttgttgtctatttgctaacaagattatttccattgtcaagagtagaaatacaaaggacaagacctttggaaatttggcctttgcgtgtggatatgtcatgctattagttacaaatcaggtaccagacgcaatggattatcttttagctgagttcaacagagtttgcatatacacggttccaaagcatatgcatgctttgaatgcacaagcacgaaatagagattattacagactgataggttaccaggaagaaaatggacagctcgagagcactgaaagttatctaacatacgtcgttgcatatgttaaactctacgcagcaatgattcagacggaaatcaaaggtgttcgtcatcctcatggtttagctgagggatggaagtggcttgccatgttcctcaattctctcccagctactacagccactgcatgtgcccttcacgctttcctcaagatggctggttttgcacttcacaagaaatatgggtcacagttcatgaaaatcctggatgtaatatcacggtgctttttaccagctttgaaggaacaaggcaacaagatgcaggctgaggctgtcaacaatctacagaattacctgaacgacaagatctacctggaggaaccagaagggcagtacctcgtccagcaactactatccaaggagttgttcatgtaaagatcaaaacaccagatcggtatgagacatcgtgtgtgatcgtctgaagggcggtacctcgtccaagctaccactatcgcaagaggggcctcatgtagagatgaaagcaccagatcgatatggagctgttcgtgtttcagaaacacgatcgagcctttcaaatctcacgaacattatttatgggacagtcccccagatcatttcccccctctgcacgggatcctgacgatgtatttgtttatgtgacttgtatccggccaaggacaggtatgataggttgaggttttatgtttgttgtagttgtacatgtactactagaatcgtgaccagaacaaaataatactcgaccacttcggcgtgggcccagcggtggccaaagtcaaggtcaacttgacacgcgacactttgtctactctgtttgcaatgaaatctaatgtttgtgcttcaaac

SEQ ID NO: 47401 - DNA, 2305 bp, Zea Mays
cacacactacgcacggacgacatcgaggaaccctagactagagcacattgcacgggcgacggcgcgccaccggtgactggcgtcccctcctcggtcctcactccccagcatggcgacgccctgccgcagcaggggcttcgagcgtgtggagctgcggtgtcccagggagctggacccacggccgagctggacgctcggcgatgtgctcgctgagcttgacgcgctggatgccacccgccgcgctgcgccacccacgcccctgaagcagccgccggattgggctaacggtggtggtgagaaggcctttgtgatgcgggttgatgacgacgacgaagacgacacagaagatgaagacgatggtacaagtggtgggaagtcccgggctctggtggccaaaggagcaaggttctcgtgtaatgatcttgcatcaagtgattcagaggatgaattagatggtcaggttgccccataccacttaatggagaaaagggacctagcgaagagcattcttcttgagctggaacacgagcatcatctaaaagttcaagaagaagttagaagtaagctagcttcattggaggtatgccaccaaaatgaaattcggagaacgatctctgcatttgcccgacttcagaaatatgcagaatcaagaaaggagatagacagaagacttgatgtacacttccagagaagaataagtactcgataaacacttatctatggtccaaagggatcatgaacaaaaatcccagattgttgaacgccgaataagagatgatgcagctcttgaagaagctaaaagaaaagagcaagctgtcaaggaagaaaagttaaggcaggaaagagcccagcaagaagcagaggctagacagaaggaagctgcaaaattagcagctgaagcacgaaaaacagcatttgaggctgctaaaaaggaagcagcagaaaaggaagcagcagaaaaggaggctgctaaattgagagatgcagcagcttctcaacctagtccgaattcccagaataatactgcagaaggcattaaagtttttggcgataaatacgcactagaagcagagtcacggaggcatgcattagtacagaatcaagtgccagaaaacattcatcacagcaaggaattcagcaaatatgaccgacaaattgccaaatccataagtaaacttatgccaactactgacagtgtcagaacaagggctagtgagcttgttaaagctttaaatggacaggattgtccccgtccaatctcttgttgtctatttgctaacaagattatttccattgtcaagagtagaaatacaaaggacaagacctttggaaatttggcctttgcgtgtggatatgtcatgctattagttacaaatcaggtaccagacgcaatggattatcttttagctgagttcaacagagtttgcatatacacggttccaaagcatatgcatgctttgaatgcacaagcacgaaatagagattattacagactgataggttaccaggaagaaaatggacagctcgagagcactgaaagttatctaacatacgtcgttgcatatgttaaactctacgcagcaatgattcagacggaaatcaaaggtgttcgtcatcctcatggtttagctgagggatggaagtggcttgccatgttcctcaattctctcccagctactacagccactgcatgtgcccttcacgctttcctcaagctttgaaggaacaaggcaacaagatgcaggctgaggctgtcaacaatctacagaattacctgaacgacaagatctacctggaggaaccagaagggcagtacctcgtccagcaactactatccaaggagttgttcatgtaaagatcaaaacaccagatcggtatgagacatcgtgtgtgatcgtctgaagggcggtacctcgtccaagctaccactatcgcaagaggggcctcatgtagagatgaaagcaccagatcgatatggagctgttcgtgtttcagaaacacgatcgagcctttcaaatctcacgaacattatttatgggacagtcccccagatcatttcccccctctgcacgggatcctgacgatgtatttgtttatgtgacttgtatccggccaaggacaggtatgataggttgaggttttatgtttgttgtagttgtacatgtactactagaatcgtgaccagaacaaaataatactcgaccacttcggcgtgggcccagcggtggccaaagtcaaggtcaacttgacacgcgacactttgtctactctgtttgcaatgaaatctaatgtttgtgcttcaaac

SEQ ID NO: 47402 - DNA, 1805 bp, Zea Mays
aaacgatcaaccgatcggaaaacattaatttgtattcgatttgaaagcgcacccggcacctgctccgttcctgcgctgcttggcttccggtctgtgtcaaagcttgcatctcacgcgagtcgcacaaggacgaaccctatacagctccaggaggtcggtgccctagccacctaggccaccttcctggagaccgggcggcgacgacggggacgaacgaccgcgatgggcttcgagcgtgtggagctgcggtgtcccagggagctggacccacggccgagctggacgctcggcgatgtgctcgctgagcttgacgcgctggatgccacccgccgcgctgcgccacccacgcccctgaagcagccgccggattgggctaacggtggtggtgagaaggcctttgtgatgcgggttgatgacgacgacgaagacgacacagaagatgaagacgatggtacaagtggtgggaagtcccgggctctggtggccaaaggagcaaggttctcgtgtaatgatcttgcatcaagtgattcagaggatgaattagatggtcaggttgccccataccacttaatggagaaaagggacctagcgaagagcattcttcttgagctggaacacgagcatcatctaaaagttcaagaagaagttagaagtaagctagcttcattggaggtatgccaccaaaatgaaattcggagaacgatctctgcatttgcccgacttcagaaatatgcagaatcaagaaaggagatagacagaagacttgatgtacacttccagagaagaattgagcagcatttaaggcatcaagcatttcttatactattccaatatttgtatccaaatgcagaagtactcgataaacacttatctatggtccaaagggatcatgaacaaaaatcccagattgttgaacgccgaataagagatgatgcagctcttgaagaagctaaaagaaaagagcaagctgtcaaggaagaaaagttaaggcaggaaagagcccagcaagaagcagaggctagacagaaggaagctgcaaaattagcagctgaagcacgaaaaacagcatttgaggctgctaaaaaggaagcagcagaaaaggaagcagcagaaaaggaggctgctaaattgagagatgcagcagcttctcaacctagtccgaattcccagaataatactgcagaaggcattaaagtttttggcgataaatacgcactagaagcagagtcacggaggcatgcattagtacagaatcaagtgccagaaaacattcatcacagcaaggaattcagcaaatatgaccgacaaattgccaaatccataagtaaacttatgccaactactgacagtgtcagaacaagggctagtgagcttgttaaagctttaaatggacaggattgtccccgtccaatctcttgttgtctatttgctaacaagattatttccattgtcaagagtagaaatacaaaggacaagacctttggaaatttggcctttgcgtgtggatatgtcatgctattagttacaaatcaggtaccagacgcaatggattatcttttagctgagttcaacagagtttgcatatacacggttccaaagcatatgcatgctttgaatgcacaagcacgaaatagagattattacagactgataggttaccaggaagaaaatggacagctcgagagcactgaaagttatctaacatacgtcgttgcatatgttaaactctacgcagcaatgattcagatataaggctatgtccagtagactggccttttgcagtggaacataaaggtgactcccta

SEQ ID NO: 47403 - DNA, 1339 bp, Zea Mays
atttttgggtgttacactccataattttggatgttacaaacacctaaattctaaccactccacaactactattgccaaacacctcgatagattttctctgtaatcaacttcaccttacagccatcagaaaaaagctataccaaaaggctggcatagcacgtggagatccacacaacgtcgtcctgcacatcgcagccgtccagccagatgccccgccgccgtcggtccatagcatcgattcactccgcgcgcgccgctgtctcctcgtcgtcgccgcgttcctcgattatctctccatggcggccgcctcatcccccgctgcatccgccgcctcccccggtaggggtgccggcgaccctcccgcggcagccgcggcggcgacggcgaggacggctgggtgcccctgccccatatgcctcgaagccttcaaagacgaggcctacctcgacacttgcttccattccttttgctacaggtgtatatgccagtgggtaaggatagtagcgagcaagcacgcagaacctttgtcttcagttagatgtccactttgtaagactgagaatctatccgtcatacatgcttttgatggcgaatcatttgagcggtggtacataaatcaggaacctaggaagaggcgtctttcagatgcacacgagttggtgtcacaattctataacatgaaagagaccacaagcaacatttctggggtgcagcaatactgggagcaacaaagatatctccgtaagaaaatttggcttcaaacctggctaagacgggaaattcaggcccttactcgggacgagaacgttgaggtcatagtccaccacattcacggtgtcatgggatccttcatgaagaggctcgaaaaggagcacacgtcgtcaaggtggacgacttcaccggagaaaaggagggaagagttcaggagattggtttccgatgctgctaggccgttcctcctcggccgaacggagcgattcgtcgccgaggtggagctcttcctggcatcggatctcaacatggaagcctacaacaaactgcgcgtccagaggtttagggagtccagctctcatctaacgagagagcaagatgcactgcctcgtgatcggtcgcttgaggagcactacatgtatttcctgtgtaacgacacggactgtgatgagatgtagtgatctgtgatccctggtactatgatgcctttttttagcctggccccgattactagagagttcacggtacaacctaatgctgatacatggaacatacatagcagtggcgaacttgtttgatttttttaataaaatagaaaagaaaaactaagggatgaacttcggatttg

SEQ ID NO: 47404 - DNA, 1364 bp, Zea Mays
atttttgggtgttacactccataattttggatgttacaaacacctaaattctaaccactccacaactactattgccaaacacctcgatagattttctctgtaatcaacttcaccttacagccatcagaaaaaagctataccaaaaggctggcatagcacgtggagatccacacaacgtcgtcctgcacatcgcagccgtccagccagatgccccgccgccgtcggtccatagcatcgattcactccgcgcgcgccgctgtctcctcgtcgtcgccgcgttcctcgattatctctccatggcggccgcctcatcccccgctgcatccgccgcctcccccggtaggggtgccggcgaccctcccgcggcagccgcggcggcgacggcgaggacggctgggtgcccctgccccatatgcctcgaagccttcaaagacgaggcctacctcgacacttgcttccattccttttgctacaggtgtatatgccagtgggtaaggatagtagcgagcaagcacgcagaacctttgtcttcagttagatgtccactttgtaagactgagaatctatccgtcatacatgcttttgatggcgaatcatttgagcggtggtacataaatcaggaacctaggaagaggcgtctttcagatgcacacgagttggtgtcacaattctataacatgaaaggacttatgcttgctgaattaagcagagaccacaagcaacatttctggggtgcagcaatactgggagcaacaaagatatctccgtaagaaaatttggcttcaaacctggctaagacgggaaattcaggcccttactcgggacgagaacgttgaggtcatagtccaccacattcacggtgtcatgggatccttcatgaagaggctcgaaaaggagcacacgtcgtcaaggtggacgacttcaccggagaaaaggagggaagagttcaggagattggtttccgatgctgctaggccgttcctcctcggccgaacggagcgattcgtcgccgaggtggagctcttcctggcatcggatctcaacatggaagcctacaacaaactgcgcgtccagaggtttagggagtccagctctcatctaacgagagagcaagatgcactgcctcgtgatcggtcgcttgaggagcactacatgtatttcctgtgtaacgacacggactgtgatgagatgtagtgatctgtgatccctggtactatgatgcctttttttagcctggccccgattactagagagttcacggtacaacctaatgctgatacatggaacatacatagcagtggcgaacttgtttgatttttttaataaaatagaaaagaaaaactaagggatgaacttcggatttg

SEQ ID NO: 47405 - DNA, 1231 bp, Zea Mays
cttcaccttacagccatcagaaaaaagctataccaaaaggctggcatagcacgtggagatccacacaacgtcgtcctgcacatcgcagccgtccagccagatgccccgccgccgtcggtccatagcatcgattcactccgcgcgcgccgctgtctcctcgtcgtcgccgcgttcctcgattatctctccatggcggccgcctcatcccccgctgcatccgccgcctcccccggtaggggtgccggcgaccctcccgcggcagccgcggcggcgacggcgaggacggctgggtgcccctgccccatatgcctcgaagccttcaaagacgaggcctacctcgacacttgcttccattccttttgctacaggtgtatatgccagtgggtaaggatagtagcgagcaagcacgcagaacctttgtcttcagttagatgtccactttgtaagactgagaatctatccgtcatacatgcttttgatggcgaatcatttgagcggtggtacataaatcaggaacctaggaagaggcgtctttcagatgcacacgagttggtgtcacaattctataacatgaaaggaccacaagcaacatttctggggtgcagcaatactgggagcaacaaagatatctccgtaagaaaatttggcttcaaacctggctaagacgggaaattcaggcccttactcgggacgagaacgttgaggtcatagtccaccacattcacggtgtcatgggatccttcatgaagaggctcgaaaaggagcacacgtcgtcaaggtggacgacttcaccggagaaaaggagggaagagttcaggagattggtttccgatgctgctaggccgttcctcctcggccgaacggagcgattcgtcgccgaggtggagctcttcctggcatcggatctcaacatggaagcctacaacaaactgcgcgtccagaggtttagggagtccagctctcatctaacgagagagcaagatgcactgcctcgtgatcggtcgcttgaggagcactacatgtatttcctgtgtaacgacacggactgtgatgagatgtagtgatctgtgatccctggtactatgatgcctttttttagcctggccccgattactagagagttcacggtacaacctaatgctgatacatggaacatacatagcagtggcgaacttgtttgatttttttaataaaatagaaaagaaaaactaagggatgaacttcggatttg

SEQ ID NO: 47406 - DNA, 994 bp, Zea Mays
gcgccgctgtctcctcgtcgtcgccgcgttcctcgattatctctccatggcggccgcctcatcccccgctgcatccgccgcctcccccggtaggggtgccggcgaccctcccgcggcagccgcggcggcgacggcgaggacggctgggtgcccctgccccatatgcctcgaagccttcaaagacgaggcctacctcgacacttgcttccactgagaatctatccgtcatacatgcttttgatggcgaatcatttgagcggtggtacataaatcaggaacctaggaagaggcgtctttcagatgcacacgagttggtgtcacaattctataacatgaaagagaccacaagcaacatttctggggtgcagcaatactgggagcaacaaagatatctccgtaagaaaatttggcttcaaacctggctaagacgggaaattcaggcccttactcgggacgagaacgttgaggtcatagtccaccacattcacggtgtcatgggatccttcatgaagaggctcgaaaaggagcacacgtcgtcaaggtggacgacttcaccggagaaaaggagggaagagttcaggagattggtttccgatgctgctaggccgttcctcctcggccgaacggagcgattcgtcgccgaggtggagctcttcctggcatcggatctcaacatggaagcctacaacaaactgcgcgtccagaggtttagggagtccagctctcatctaacgagagagcaagatgcactgcctcgtgatcggtcgcttgaggagcactacatgtatttcctgtgtaacgacacggactgtgatgagatgtagtgatctgtgatccctggtactatgatgcctttttttagcctggccccgattactagagagttcacggtacaacctaatgctgatacatggaacatacatagcagtggcgaacttgtttgatttttttaataaaatagaaaagaaaaactaagggatgaacttcggatttg

SEQ ID NO: 47407 - DNA, 1101 bp, Zea Mays
ggagcgcaggccaaggggggaagaggaggaacacgaagatggaggaggaggcgccgcccatggagttggtccgggagaagaagctctctgagaagatcacatacctctgttgaagacagtgatcacatatttctagagtcctctggcttgcaggatggtttgagttgcaagaaggatctccatagttgcggcaccaaagcttcagatgaggaaatttctgatcggttgcaagagaatcatgacaacacccagccaagtgataaccataactattcggtagatcaaactcaactgccctttcttcaagccctactgagagtacagatgaaacggagtcatcgtttcttggacaaactgccagtggttcactggcatcttctcacagataagtctatagatcctacgtatttggtagtgatgacagcaacagcagcagtaggagctgcaactctactgcagagagtaattcagatacggaccaagccaactcctcccaacccacgaaggccaagttcagttcaggcgtttcactcttcgacatcctgcgcaggacatcagagcagagcaatcaggaaagctgtagcacagtcagcggtgcatcggttctcggcattcaaattattaaagaggttttctagggtgagctcgaaaaattgacaactcccaggaggttcaagacagatcacagtctcacagatggtgcctgtatggttggagattctgaattctgaccactggcctggaagttcacgacgaaagctgtctagaaaaaggcttcaggcgaggctcgtgaaaaaggagaggcgaggatggctcctggttgccattcatcttcgtgctgttagtgccgtgagggtgtgctgttggagcttttttttttcttcacggctggggacggtggatagggatgaaaacggtcggaaacggtatttattcggtaatcagttttttctttgattatgaataaatagaatatagaatatataatacaaatttgtattcttgtttttaacatccagcttgttaagattcataaaaggtaaacctcaaattcatcctacattttttcaaataatagatataaacttcggtatggattcg

SEQ ID NO: 47408 - DNA, 2156 bp, Zea Mays
cgaagatggaggaggaggcgccgcccatggagttggtccgggagaagaagctctctgagaagatcacatacctctgttgaagacagtgatcacatatttctagagtcctctggcttgcaggatggtttgagttgcaagaaggatctccatagttgcggcaccaaagcttcagatgaggaaatttctgatcggttgcaagagaatcatgacaacacccagccaagtgataaccataactattcggtagatcaaactcaactgccctttcttcaagccctactgagagtacagatgaaacggaggtgtgtatactcttctatcacccatctcaattttccacaacaaccattgtagttgttgcctatatgccttggttccagcaccataattcccccctagtcatttgacctttttaggatgaaaagtcccctgccctgcccttcattgatctgaaacatggtcggtatccctgttaggggcattgaatttgagtggctaaatgaaaacattatgttaatattatcaactttgcctacacaaaccagttctagagccctgttagctctgtacataaaacatgcagtgacttcttactttgttttgattttttggcaaacttgcacacttatccagaggatagttatgtattactccctccgtaccaaaatagtattcgttttaggttgttaatggattcatacaatatttgatgtatgtgttttatatatgtgtctagattcattgtcatccatttgaatatggacacaaaaataaacaagtaaaataaacagtattgtggaacagagggagtatttttttactgacatggacgtatgggagggcagatttgctcccggctttaatagtacgaattgtttagtagttgaatttttctgaccttcattcattactgacgtgcatctattgttcaccgttaaaacgatcagaggacaccaaacctacagaagcatgaattaatacaagccctcatgttctccaggttgtaccataccattcatacttgtgcgttcacttttgcattgttgtatgggttataaacaaccacctaccaaccatctggtgttgggtttggatcactatggtgaaacatttacagttaatcggagctaattcgtatagcgactttgaaatcttacaaccacaaactggagaacggatgagactgctgtaacaccttatgataagcacaccttttggttctttgtgactgcaacttttggttctctattgactatatactgtacttctgcccacaatgcttccattccattcactcctgataattttatgaccttcattcattgcatctattgtcatcagagattttggatggttctatccacaatggcatcatgtgtattccttgcagtcatcgtttcttggacaaactgccagtggttcactggcatcttctcacagataagtctatagatcctacgtatttggtagtgatgacagcaacagcagcagtaggagctgcaactctactgcagagagtaattcagatacggaccaagccaactcctcccaacccacgaaggccaagttcagttcaggcgtttcactcttcgacatcctgcgcaggacatcagagcagagcaatcaggaaagctgtagcacagtcagcggtgcatcggttctcggcattcaaattattaaagaggttttctagggtgagctcgaaaaattgacaactcccaggaggttcaagacagatcacagtctcacagatggtgcctgtatggttggagattctgaattctgaccactggcctggaagttcacgacgaaagctgtctagaaaaaggcttcaggcgaggctcgtgaaaaaggagaggcgaggatggctcctggttgccattcatcttcgtgctgttagtgccgtgagggtgtgctgttggagcttttttttttcttcacggctggggacggtggatagggatgaaaacggtcggaaacggtatttattcggtaatcagttttttctttgattatgaataaatagaatatagaatatataatacaaatttgtattcttgtttttaacatccagcttgttaagattcataaaaggtaaacctcaaattcatcctacattttttcaaataatagatataaacttcggtatggattcg

SEQ ID NO: 47409 - DNA, 2188 bp, Zea Mays
cgaagatggaggaggaggcgccgcccatggagttggtccgggagaagaagctctctgagaagatccgcctttgtaagatggaggttctgaagaaatcacatacctctgttgaagacagtgatcacatatttctagagtcctctggcttgcaggatggtttgagttgcaagaaggatctccatagttgcggcaccaaagcttcagatgaggaaatttctgatcggttgcaagagaatcatgacaacacccagccaagtgataaccataactattcggtagatcaaactcaactgccctttcttcaagccctactgagagtacagatgaaacggaggtgtgtatactcttctatcacccatctcaattttccacaacaaccattgtagttgttgcctatatgccttggttccagcaccataattcccccctagtcatttgacctttttaggatgaaaagtcccctgccctgcccttcattgatctgaaacatggtcggtatccctgttaggggcattgaatttgagtggctaaatgaaaacattatgttaatattatcaactttgcctacacaaaccagttctagagccctgttagctctgtacataaaacatgcagtgacttcttactttgttttgattttttggcaaacttgcacacttatccagaggatagttatgtattactccctccgtaccaaaatagtattcgttttaggttgttaatggattcatacaatatttgatgtatgtgttttatatatgtgtctagattcattgtcatccatttgaatatggacacaaaaataaacaagtaaaataaacagtattgtggaacagagggagtatttttttactgacatggacgtatgggagggcagatttgctcccggctttaatagtacgaattgtttagtagttgaatttttctgaccttcattcattactgacgtgcatctattgttcaccgttaaaacgatcagaggacaccaaacctacagaagcatgaattaatacaagccctcatgttctccaggttgtaccataccattcatacttgtgcgttcacttttgcattgttgtatgggttataaacaaccacctaccaaccatctggtgttgggtttggatcactatggtgaaacatttacagttaatcggagctaattcgtatagcgactttgaaatcttacaaccacaaactggagaacggatgagactgctgtaacaccttatgataagcacaccttttggttctttgtgactgcaacttttggttctctattgactatatactgtacttctgcccacaatgcttccattccattcactcctgataattttatgaccttcattcattgcatctattgtcatcagagattttggatggttctatccacaatggcatcatgtgtattccttgcagtcatcgtttcttggacaaactgccagtggttcactggcatcttctcacagataagtctatagatcctacgtatttggtagtgatgacagcaacagcagcagtaggagctgcaactctactgcagagagtaattcagatacggaccaagccaactcctcccaacccacgaaggccaagttcagttcaggcgtttcactcttcgacatcctgcgcaggacatcagagcagagcaatcaggaaagctgtagcacagtcagcggtgcatcggttctcggcattcaaattattaaagaggttttctagggtgagctcgaaaaattgacaactcccaggaggttcaagacagatcacagtctcacagatggtgcctgtatggttggagattctgaattctgaccactggcctggaagttcacgacgaaagctgtctagaaaaaggcttcaggcgaggctcgtgaaaaaggagaggcgaggatggctcctggttgccattcatcttcgtgctgttagtgccgtgagggtgtgctgttggagcttttttttttcttcacggctggggacggtggatagggatgaaaacggtcggaaacggtatttattcggtaatcagttttttctttgattatgaataaatagaatatagaatatataatacaaatttgtattcttgtttttaacatccagcttgttaagattcataaaaggtaaacctcaaattcatcctacattttttcaaataatagatataaacttcggtatggattcg

SEQ ID NO: 47410 - DNA, 2125 bp, Zea Mays
atggaggaggaggcgccgcccatggagttggtccgggagaagaagctctctgagaagatccgcctttgtaagatggaggttctgaagaagatggtttgagttgcaagaaggatctccatagttgcggcaccaaagcttcagatgaggaaatttctgatcggttgcaagagaatcatgacaacacccagccaagtgataaccataactattcggtagatcaaactcaactgccctttcttcaagccctactgagagtacagatgaaacggaggtgtgtatactcttctatcacccatctcaattttccacaacaaccattgtagttgttgcctatatgccttggttccagcaccataattcccccctagtcatttgacctttttaggatgaaaagtcccctgccctgcccttcattgatctgaaacatggtcggtatccctgttaggggcattgaatttgagtggctaaatgaaaacattatgttaatattatcaactttgcctacacaaaccagttctagagccctgttagctctgtacataaaacatgcagtgacttcttactttgttttgattttttggcaaacttgcacacttatccagaggatagttatgtattactccctccgtaccaaaatagtattcgttttaggttgttaatggattcatacaatatttgatgtatgtgttttatatatgtgtctagattcattgtcatccatttgaatatggacacaaaaataaacaagtaaaataaacagtattgtggaacagagggagtatttttttactgacatggacgtatgggagggcagatttgctcccggctttaatagtacgaattgtttagtagttgaatttttctgaccttcattcattactgacgtgcatctattgttcaccgttaaaacgatcagaggacaccaaacctacagaagcatgaattaatacaagccctcatgttctccaggttgtaccataccattcatacttgtgcgttcacttttgcattgttgtatgggttataaacaaccacctaccaaccatctggtgttgggtttggatcactatggtgaaacatttacagttaatcggagctaattcgtatagcgactttgaaatcttacaaccacaaactggagaacggatgagactgctgtaacaccttatgataagcacaccttttggttctttgtgactgcaacttttggttctctattgactatatactgtacttctgcccacaatgcttccattccattcactcctgataattttatgaccttcattcattgcatctattgtcatcagagattttggatggttctatccacaatggcatcatgtgtattccttgcagtcatcgtttcttggacaaactgccagtggttcactggcatcttctcacagataagtctatagatcctacgtatttggtagtgatgacagcaacagcagcagtaggagctgcaactctactgcagagagtaattcagatacggaccaagccaactcctcccaacccacgaaggccaagttcagttcaggcgtttcactcttcgacatcctgcgcaggacatcagagcagagcaatcaggaaagctgtagcacagtcagcggtgcatcggttctcggcattcaaattattaaagaggttttctagggtgagctcgaaaaattgacaactcccaggaggttcaagacagatcacagtctcacagatggtgcctgtatggttggagattctgaattctgaccactggcctggaagttcacgacgaaagctgtctagaaaaaggcttcaggcgaggctcgtgaaaaaggagaggcgaggatggctcctggttgccattcatcttcgtgctgttagtgccgtgagggtgtgctgttggagcttttttttttcttcacggctggggacggtggatagggatgaaaacggtcggaaacggtatttattcggtaatcagttttttctttgattatgaataaatagaatatagaatatataatacaaatttgtattcttgtttttaacatccagcttgttaagattcataaaaggtaaacctcaaattcatcctacattttttcaaataatagatataaacttcggtatggattcg

SEQ ID NO: 47411 - DNA, 491 bp, Zea Mays
cgcagcttcattcgatccatgctgagtcacagaggctgctgcgagatccgcctttgtaagatggaggttctgaagaaatcacatacctctgttgaagacagtgatcacatatttctagagtcctctggcttgcaggatggtttgagttgcaagaaggatctccatagttgcggcaccaaagcttcagatgaggaaatttctgatcggttgcaagagaatcatgacaacacccagccaagtgataaccataactattcggtagatcaaactcaactgccctttcttcaagccctactgagagtacagatgaaacggagtcatcgtttcttggacaaactgccagtggttcactggcatcttctcacagataagtctatagatcctacgtatttggtagtgatgacagcaacagcagcagtaggagctgcaactctactgcagagagtaattcagatacgaatgtgcttggctatttttttatttccatcctg

SEQ ID NO: 47412 - DNA, 1526 bp, Zea Mays
cgcagcttcattcgatccatgctgagtcacagaggctgctgcgagatccgcctttgtaagatggaggttctgaagaaatcacatacctctgttgaagacagtgatcacatatttctagagtcctctggcttgcaggatggtttgagttgcaagaaggatctccatagttgcggcaccaaagcttcagatgaggaaatttctgatcggttgcaagagaatcatgacaacacccagccaagtgataaccataactattcggtagatcaaactcaactgccctttcttcaagccctactgagagtacagatgaaacggagaggacaccaaacctacagaagcatgaattaatacaagccctcatgttctccaggttgtaccataccattcatacttgtgcgttcacttttgcattgttgtatgggttataaacaaccacctaccaaccatctggtgttgggtttggatcactatggtgaaacatttacagttaatcggagctaattcgtatagcgactttgaaatcttacaaccacaaactggagaacggatgagactgctgtaacaccttatgataagcacaccttttggttctttgtgactgcaacttttggttctctattgactatatactgtacttctgcccacaatgcttccattccattcactcctgataattttatgaccttcattcattgcatctattgtcatcagagattttggatggttctatccacaatggcatcatgtgtattccttgcagtcatcgtttcttggacaaactgccagtggttcactggcatcttctcacagataagtctatagatcctacgtatttggtagtgatgacagcaacagcagcagtaggagctgcaactctactgcagagagtaattcagatacggaccaagccaactcctcccaacccacgaaggccaagttcagttcaggcgtttcactcttcgacatcctgcgcaggacatcagagcagagcaatcaggaaagctgtagcacagtcagcggtgcatcggttctcggcattcaaattattaaagaggttttctagggtgagctcgaaaaattgacaactcccaggaggttcaagacagatcacagtctcacagatggtgcctgtatggttggagattctgaattctgaccactggcctggaagttcacgacgaaagctgtctagaaaaaggcttcaggcgaggctcgtgaaaaaggagaggcgaggatggctcctggttgccattcatcttcgtgctgttagtgccgtgagggtgtgctgttggagcttttttttttcttcacggctggggacggtggatagggatgaaaacggtcggaaacggtatttattcggtaatcagttttttctttgattatgaataaatagaatatagaatatataatacaaatttgtattcttgtttttaacatccagcttgttaagattcataaaaggtaaacctcaaattcatcctacattttttcaaataatagatataaacttcggtatggattcg

SEQ ID NO: 47413 - DNA, 2171 bp, Zea Mays
cgcagcttcattcgatccatgctgagtcacagaggctgctgcgagatccgcctttgtaagatggaggttctgaagaaatcacatacctctgttgaagacagtgatcacatatttctagagtcctctggcttgcaggatggtttgagttgcaagaaggatctccatagttgcggcaccaaagcttcagatgaggaaatttctgatcggttgcaagagaatcatgacaacacccagccaagtgataaccataactattcggtagatcaaactcaactgccctttcttcaagccctactgagagtacagatgaaacggaggtgtgtatactcttctatcacccatctcaattttccacaacaaccattgtagttgttgcctatatgccttggttccagcaccataattcccccctagtcatttgacctttttaggatgaaaagtcccctgccctgcccttcattgatctgaaacatggtcggtatccctgttaggggcattgaatttgagtggctaaatgaaaacattatgttaatattatcaactttgcctacacaaaccagttctagagccctgttagctctgtacataaaacatgcagtgacttcttactttgttttgattttttggcaaacttgcacacttatccagaggatagttatgtattactccctccgtaccaaaatagtattcgttttaggttgttaatggattcatacaatatttgatgtatgtgttttatatatgtgtctagattcattgtcatccatttgaatatggacacaaaaataaacaagtaaaataaacagtattgtggaacagagggagtatttttttactgacatggacgtatgggagggcagatttgctcccggctttaatagtacgaattgtttagtagttgaatttttctgaccttcattcattactgacgtgcatctattgttcaccgttaaaacgatcagaggacaccaaacctacagaagcatgaattaatacaagccctcatgttctccaggttgtaccataccattcatacttgtgcgttcacttttgcattgttgtatgggttataaacaaccacctaccaaccatctggtgttgggtttggatcactatggtgaaacatttacagttaatcggagctaattcgtatagcgactttgaaatcttacaaccacaaactggagaacggatgagactgctgtaacaccttatgataagcacaccttttggttctttgtgactgcaacttttggttctctattgactatatactgtacttctgcccacaatgcttccattccattcactcctgataattttatgaccttcattcattgcatctattgtcatcagagattttggatggttctatccacaatggcatcatgtgtattccttgcagtcatcgtttcttggacaaactgccagtggttcactggcatcttctcacagataagtctatagatcctacgtatttggtagtgatgacagcaacagcagcagtaggagctgcaactctactgcagagagtaattcagatacggaccaagccaactcctcccaacccacgaaggccaagttcagttcaggcgtttcactcttcgacatcctgcgcaggacatcagagcagagcaatcaggaaagctgtagcacagtcagcggtgcatcggttctcggcattcaaattattaaagaggttttctagggtgagctcgaaaaattgacaactcccaggaggttcaagacagatcacagtctcacagatggtgcctgtatggttggagattctgaattctgaccactggcctggaagttcacgacgaaagctgtctagaaaaaggcttcaggcgaggctcgtgaaaaaggagaggcgaggatggctcctggttgccattcatcttcgtgctgttagtgccgtgagggtgtgctgttggagcttttttttttcttcacggctggggacggtggatagggatgaaaacggtcggaaacggtatttattcggtaatcagttttttctttgattatgaataaatagaatatagaatatataatacaaatttgtattcttgtttttaacatccagcttgttaagattcataaaaggtaaacctcaaattcatcctacattttttcaaataatagatataaacttcggtatggattcg

SEQ ID NO: 47414 - DNA, 2068 bp, Zea Mays
atcacattgtcctcgtcgtcgtcctatcttctcttgctcttctcctccggcctcctcggtccttgctcacccgaaccagcaaccctaatccgtggccgcggacccgccgcaagctccatcgcgcgaatagattggggattcagtcgaggctacgcgggaactggtcgcgctcgagatcttagcctccgcacctgaaaccattggctccattgctattgctgtcgtggttcaggtgatgaaatcttggggagcgcgcctcgctcggtcctaagatgctggcgagctacggaggtggtggccgcggtgtccatctctcctcccacaaggacatcctcctcggccgcggcggccggagcttcctcttgggcaacacgtggtttctcctctccacctacccggcgcgcctcctgcacaccacggaccgccgcgcgcccgccgctttcttggccgtgatcaaccggcccccctgcatgcggccgcaccgcgctgggcagggcctgctgcagaggggtggtattgtcatggctgcttgcggctatgctcttgggcgagctgagctgggtgctgccaagcgccagcagccggataaggatccatctgcagggacgcgctcctcgaatgttgcagccacgggatcactgggcagtgcagcacggccagacgtctcttttaggtacagaggggcggattcttgtaagaaggtagctgcaagcttgaagtcgtctgagccatgggggaacagggcattctggacaaacgccgctgggccaggttggaagttgagctttgctgttgagccatggaccaagggctttagcacgtcgtgtgcggcgccatattctgctggagccacagagcatcaattatcgctcgatgagaaggtggataactccaccgttgcatctgattctgatgggaagtcaccagtttctgaaaaattgaagtttctctctggttcatgttacttgcctcaccctgataaggaggctactggtggtgaggatgcacatttcattagcattgatgagcatgtgattggtgtagcagatggtgttggtggttgggcagatgttggtatcgatgctggactatatgccaaggagctaatgagaaattcaatgagtgcaatcaaagatgagccagaagggaccatcgatccaaccagagttttggaaaaggcttatatgagcaccaaagcaaggggatcatccactgcatgtatcatcactcttaaagatcagggtatccatgctgtaaatcttggggacagtggtttcgtagtagtccgagacggtcgaactgttctcaggtcaccctcacagcagcatgatttcaacctcacttatcagcttgagagtggaggtggcagtgatcttcctagttctgcacaagtatttcacttcccggttgcccccggtgatgttattgttgctggcacggacggactttttgacaatctatacaacaatgagataagtggtgttatcgttgaagcgctcagggttggacttgaacctcaagttgcggcacaaaaaattgctgccctggctcgacaaagagccacagacaaaaataggcagtcaccatttgcatcggccgcccaagaagctgggtaccggtactacggtgggaagctcgacgacataacggttgtggtgtcgtatgtgaaaagcgcttgattcgagcctttctttttattagatgtaatgtcaaaatcttagtcccgaatttaatggcacatgtgttctcaaggtgtgaaatcccctgagatactagaagcactcctgctgggtttagccctggaatacgttagcaaaccattacaccattttacttgtttgccactgtgagtaatcttctttttatatataattctctaaaaccagggcggtcgtttcgcccttggagttggagggggaggataatgacctgctggaaccaaattttgttgtaaatattgtcgattgccgaatgataacatgttggactcaatggtggattgttgatgctgtttgaaatgtttctcttgaccccggagaacggcttctcaatatattgtcagtatgag

SEQ ID NO: 47415 - DNA, 2022 bp, Zea Mays
tctcctccggcctcctcggtccttgctcacccgaaccagcaaccctaatccgtggccgcggacccgccgcaagctccatcgcgcgaatagattggggattcagtcgaggctacgcgggaactggtcgcgctcgagatcttagcctccgcacctgaaaccattggctccattgctattgctgtcgtggtgatgaaatcttggggagcgcgcctcgctcggtcctaagatgctggcgagctacggaggtggtggccgcggtgtccatctctcctcccacaaggacatcctcctcggccgcggcggccggagcttcctcttgggcaacacgtggtttctcctctccacctacccggcgcgcctcctgcacaccacggaccgccgcgcgcccgccgctttcttggccgtgatcaaccggcccccctgcatgcggccgcaccgcgctgggcagggcctgctgcagaggggtggtattgtcatggctgcttgcggctatgctcttgggcgagctgagctgggtgctgccaagcgccagcagccggataaggatccatctgcagggacgcgctcctcgaatgttgcagccacgggatcactgggcagtgcagcacggccagacgtctcttttaggtacagaggggcggattcttgtaagaaggtagctgcaagcttgaagtcgtctgagccatgggggaacagggcattctggacaaacgccgctgggccaggttggaagttgagctttgctgttgagccatggaccaagggctttagcacgtcgtgtgcggcgccatattctgctggagccacagagcatcaattatcgctcgatgagaaggtggataactccaccgttgcatctgattctgatgggaagtcaccagtttctgaaaaattgaagtttctctctggttcatgttacttgcctcaccctgataaggaggctactggtggtgaggatgcacatttcattagcattgatgagcatgtgattggtgtagcagatggtgttggtggttgggcagatgttggtatcgatgctggactatatgccaaggagctaatgagaaattcaatgagtgcaatcaaagatgagccagaagggaccatcgatccaaccagagttttggaaaaggcttatatgagcaccaaagcaaggggatcatccactgcatgtatcatcactcttaaagatcagggtatccatgctgtaaatcttggggacagtggtttcgtagtagtccgagacggtcgaactgttctcaggtcaccctcacagcagcatgatttcaacctcacttatcagcttgagagtggaggtggcagtgatcttcctagttctgcacaagtatttcacttcccggttgcccccggtgatgttattgttgctggcacggacggactttttgacaatctatacaacaatgagataagtggtgttatcgttgaagcgctcagggttggacttgaacctcaagttgcggcacaaaaaattgctgccctggctcgacaaagagccacagacaaaaataggcagtcaccatttgcatcggccgcccaagaagctgggtaccggtactacggtgggaagctcgacgacataacggttgtggtgtcgtatgtgaaaagcgcttgattcgagcctttctttttattagatgtaatgtcaaaatcttagtcccgaatttaatggcacatgtgttctcaaggtgtgaaatcccctgagatactagaagcactcctgctgggtttagccctggaatacgttagcaaaccattacaccattttacttgtttgccactgtgagtaatcttctttttatatataattctctaaaaccagggcggtcgtttcgcccttggagttggagggggaggataatgacctgctggaaccaaattttgttgtaaatattgtcgattgccgaatgataacatgttggactcaatggtggattgttgatgctgtttgaaatgtttctcttgaccccggagaacggcttctcaatatattgtcagtatgag

SEQ ID NO: 47416 - DNA, 2786 bp, Zea Mays
aaaatgcaaggtaccgagaaagtcaacactcaccagcatctaaagcagcactgacttccttgtaaacagaactcaagtttcagttgaaccaaccggaaccgtgagaaatcaaaacgtgtatgctgcgttttcgatattttcagcagaatatcgcgaacggttggagaaagccaactattctctctctatctttgttttggcgttattcctaaaaaaaaaaaaacagaacaaaaccccactccctcgcgctccctatccgcacatgaatcgtcctccctcccgtctcccgaaacctcgtccgccggttcccgtcgccatggtggtggtagtgtccacctccctatgctccttcctgcccgcgcacccgttcagcctcgcgcgccctcgccgtccccacccaacgaacccgaccgccaaacccctctcccgtaccctctccatccgctgcatcgccacaaccgcggcgggacccccgccgctcccaccgccgaagctggtccgctgcccagctctcgaccgccaggcggcgcgcgcaagccgactccgctttgcgcgcaagctcctcaccctcctcctctccaagccgcgccatttcctcccgctccgcgtgctcaaccgctgccgccgcttcctcggcctcccgcgccgcggccgcccgctcatccccatggtcctccgctacccgaccctcttccgcctcttccaggcccacacctccctcccgctctccccgtccctctccaccctcgcggtcgcgctcactcccgccgccgaggcgctcgccgccgatcttgcggcgctccgcgccaccggcacaggcgcaggcgcgctcgccgccaagatccaccgccttctcctcatgaccccgcgccgaaacattccggtgtccccgttcgagccactggatgagggcgctagtctggagatgttggagcggcgggcgtgtgctgtggtgcgggaggtgctggccatgacggtggagaagcggacgctggtggatcacctcacgcacttcaggaaagaccttggcttgccaaaccggctgcgcgccatgctggtgcgacatccagagctgttttatgtcagtgtgaagggggtgcgtcactcagtgttccttgtggaggcgtttgatgatgatgggaggctcctagtggaggatgagatgctggttgggagggataggctggaggagcttgttcgggagggaaagcggatgaggcgtgctcggaagaaaggtgttctcacgttcgatggtgacagtgatgaggatgaagatgatgatgcagcagaagaggaaggttcattaaaggtggatgatgaatttggggacttgtttgaggatggtgtcattggggaggactgggaggaggtaggcgatggaggtggaagtgatgcatatgaagagtacgatgctgaatcaggtgacatggaggagttttgggtcaagaaggctgtggctcaaggactggttggcaatggtaatgagcaggatgtttggtgagtgcatcagcttgtgggactgctcaggaagttaacgaagattgagaattcctcaagtgtgcttttctcagcaatgcacataaaccagtaagcatcagtacatatccgggtatcttggacctcttggtcccatttgccgcctgtctgttggtacttgcaagacagatgaagcggctccgttatccttttactttgttctggagaggagctatttggacagtcacgatgtccgtcctccagggcactgtttctgctttgatgcttatgaggcatgctctcttacttcccaagatctcttgcacggaaacacatccaaagatagcacagcttctagaacatcacaaacctaatgtgtcacttcttatgctaaagtgtgcagagtgcgatagcttctctgctacagaaaactttgaaaaagatggcgtttcatctcttaaggaggcagccactgtatccgtgttagagttgaatgtgccctcctgtcagaagcgtttatgtattataggaggtactgctctaaggtgaaagagcaatgctcagcagatatgatacatgctgaggatgcattcaaaagctcttggatttatcatgctgaggtgatgatggctgagttttgtactgtctgcattgaaaagaatttaattgataaaatgattgatctgccctgggattccgaggaagacaaacatcttcacaagttcctcttcaactctgctcgagaagtgcgcatgaaaccaaatgatagtctgcttgttgtctactaccttgggatacaggtctctggatatgctgagaaacctttcatcttaaatggaactggtgtagcccaaaatggccctgctaaaaggtctgtctctggatatgctggctaccagccaaggataacatcttgattctgcacgctggtttgtggcgatatgtttcgtcgtggtcctggttttaatttgggagttcaaaatgtaatatcagtggaatgaaattcgtgcgttttgagtagctcggggtatagaatttgaatctgactacgtttcaaatactagagttagatgactgcagtggctggcttccagcttctttattatttttgtctattattctcctatctgtcaatgtggccggtttacagtcaattagcgctaacagaggctacatcattcagtgacaaaaaaaaatagtgaatggtgaaggtatacaaactgagctgtgtgttgtgataatattcgtcagtattctcaacgggtatctaaaccattttgtttcgtcgtcactaatacgctgtggcgggt

SEQ ID NO: 47417 - DNA, 2681 bp, Zea Mays
aaaatgcaaggtaccgagaaagtcaacactcaccagcatctaaagcagcactgacttccttgtaaacagaactcaagtttcagttgaaccaaccggaaccgtgagaaatcaaaacgtgtatgctgcgttttcgatattttcagcagaatatcgcgaacggttggagaaagccaactattctctctctatctttgttttggcgttattcctaaaaaaaaaaaaacagaacaaaaccccactccctcgcgctccctatccgcacatgaatcgtcctccctcccgtctcccgaaacctcgtccgccggttcccgtcgccatggtggtggtagtgtccacctccctatgctccttcctgcccgcgcacccgttcagcctcgcgcgccctcgccgtccccacccaacgaacccgaccgccaaacccctctcccgtaccctctccatccgctgcatcgccacaaccgcggcgggacccccgccgctcccaccgccgaagctggtccgctgcccagctctcgaccgccaggcggcgcgcgcaagccgactccgctttgcgcgcaagctcctcaccctcctcctctccaagccgcgccatttcctcccgctccgcgtgctcaaccgctgccgccgcttcctcggcctcccgcgccgcggccgcccgctcatccccatggtcctccgctacccgaccctcttccgcctcttccaggcccacacctccctcccgctctccccgtccctctccaccctcgcggtcgcgctcactcccgccgccgaggcgctcgccgccgatcttgcggcgctccgcgccaccggcacaggcgcaggcgcgctcgccgccaagatccaccgccttctcctcatgaccccgcgccgaaacattccggtgtccccgttcgagccactggatgagggcgctagtctggagatgttggagcggcgggcgtgtgctgtggtgcgggaggtgctggccatgacggtggagaagcggacgctggtggatcacctcacgcacttcaggaaagaccttggcttgccaaaccggctgcgcgccatgctggtgcgacatccagagctgttttatgtcagtgtgaagggggtgcgtcactcagtgttccttgtggaggcgtttgatgatgatgggaggctcctagtggaggatgagatgctggttgggagggataggctggaggagcttgttcgggagggaaagcggatgaggcgtgctcggaagaaaggtgttctcacgttcgatggtgacagtgatgaggatgaagatgatgatgcagcagaagaggaaggttcattaaaggtggatgatgaatttggggacttgtttgaggatggtgtcattggggaggactgggaggaggtaggcgatggaggtggaagtgatgcatatgaagagtacgatgctgaatcaggtgacatggaggagttttgggtcaagaaggctgtggctcaaggactggttggcaatggtaatgagcaggatgtttggtgagtgcatcagcttgtgggactgctcaggaagttaacgaagattgagaattcctcaagtgtgcttttctcagcaatgcacataaaccagtaagcatcagtacatatccgggtatcttggacctcttggtcccatttgccgcctgtctgttggtacttgcaaggaggcatgctctcttacttcccaagatctcttgcacggaaacacatccaaagatagcacagcttctagaacatcacaaacctaatgtgtcacttcttatgctaaagtgtgcagagtgcgatagcttctctgctacagaaaactttgaaaaagatggcgtttcatctcttaaggaggcagccactgtatccgtgttagagttgaatgtgccctcctgtcagaagcgtttatgtattataggaggtactgctctaaggtgaaagagcaatgctcagcagatatgatacatgctgaggatgcattcaaaagctcttggatttatcatgctgaggtgatgatggctgagttttgtactgtctgcattgaaaagaatttaattgataaaatgattgatctgccctgggattccgaggaagacaaacatcttcacaagttcctcttcaactctgctcgagaagtgcgcatgaaaccaaatgatagtctgcttgttgtctactaccttgggatacaggtctctggatatgctgagaaacctttcatcttaaatggaactggtgtagcccaaaatggccctgctaaaaggtctgtctctggatatgctggctaccagccaaggataacatcttgattctgcacgctggtttgtggcgatatgtttcgtcgtggtcctggttttaatttgggagttcaaaatgtaatatcagtggaatgaaattcgtgcgttttgagtagctcggggtatagaatttgaatctgactacgtttcaaatactagagttagatgactgcagtggctggcttccagcttctttattatttttgtctattattctcctatctgtcaatgtggccggtttacagtcaattagcgctaacagaggctacatcattcagtgacaaaaaaaaatagtgaatggtgaaggtatacaaactgagctgtgtgttgtgataatattcgtcagtattctcaacgggtatctaaaccattttgtttcgtcgtcactaatacgctgtggcgggt

SEQ ID NO: 47418 - DNA, 2790 bp, Zea Mays
aaaatgcaaggtaccgagaaagtcaacactcaccagcatctaaagcagcactgacttccttgtaaacagaactcaagtttcagttgaaccaaccggaaccgtgagaaatcaaaacgtgtatgctgcgttttcgatattttcagcagaatatcgcgaacggttggagaaagccaactattctctctctatctttgttttggcgttattcctaaaaaaaaaaaaacagaacaaaaccccactccctcgcgctccctatccgcacatgaatcgtcctccctcccgtctcccgaaacctcgtccgccggttcccgtcgccatggtggtggtagtgtccacctccctatgctccttcctgcccgcgcacccgttcagcctcgcgcgccctcgccgtccccacccaacgaacccgaccgccaaacccctctcccgtaccctctccatccgctgcatcgccacaaccgcggcgggacccccgccgctcccaccgccgaagctggtccgctgcccagctctcgaccgccaggcggcgcgcgcaagccgactccgctttgcgcgcaagctcctcaccctcctcctctccaagccgcgccatttcctcccgctccgcgtgctcaaccgctgccgccgcttcctcggcctcccgcgccgcggccgcccgctcatccccatggtcctccgctacccgaccctcttccgcctcttccaggcccacacctccctcccgctctccccgtccctctccaccctcgcggtcgcgctcactcccgccgccgaggcgctcgccgccgatcttgcggcgctccgcgccaccggcacaggcgcaggcgcgctcgccgccaagatccaccgccttctcctcatgaccccgcgccgaaacattccggtgtccccgttcgagccactggatgagggcgctagtctggagatgttggagcggcgggcgtgtgctgtggtgcgggaggtgctggccatgacggtggagaagcggacgctggtggatcacctcacgcacttcaggaaagaccttggcttgccaaaccggctgcgcgccatgctggtgcgacatccagagctgttttatgtcagtgtgaagggggtgcgtcactcagtgttccttgtggaggcgtttgatgatgatgggaggctcctagtggaggatgagatgctggttgggagggataggctggaggagcttgttcgggagggaaagcggatgaggcgtgctcggaagaaaggtgttctcacgttcgatggtgacagtgatgaggatgaagatgatgatgcagcagaagaggaaggttcattaaaggtggatgatgaatttggggacttgtttgaggatggtgtcattggggaggactgggaggaggtaggcgatggaggtggaagtgatgcatatgaagagtacgatgctgaatcaggtgacatggaggagttttgggtcaagaaggctgtggctcaaggactggttggcaatggtaatgagcaggatgtttggtgagtgcatcagcttgtgggactgctcaggaagttaacgaagattgagaattcctcaagtgtgcttttctcagcaatgcacataaaccagtaagcatcagtacatatccgggtatcttggacctcttggtcccatttgccgcctgtctgttggtacttgcaagacagacagatgaagcggctccgttatccttttactttgttctggagaggagctatttggacagtcacgatgtccgtcctccagggcactgtttctgctttgatgcttatgaggcatgctctcttacttcccaagatctcttgcacggaaacacatccaaagatagcacagcttctagaacatcacaaacctaatgtgtcacttcttatgctaaagtgtgcagagtgcgatagcttctctgctacagaaaactttgaaaaagatggcgtttcatctcttaaggaggcagccactgtatccgtgttagagttgaatgtgccctcctgtcagaagcgtttatgtattataggaggtactgctctaaggtgaaagagcaatgctcagcagatatgatacatgctgaggatgcattcaaaagctcttggatttatcatgctgaggtgatgatggctgagttttgtactgtctgcattgaaaagaatttaattgataaaatgattgatctgccctgggattccgaggaagacaaacatcttcacaagttcctcttcaactctgctcgagaagtgcgcatgaaaccaaatgatagtctgcttgttgtctactaccttgggatacaggtctctggatatgctgagaaacctttcatcttaaatggaactggtgtagcccaaaatggccctgctaaaaggtctgtctctggatatgctggctaccagccaaggataacatcttgattctgcacgctggtttgtggcgatatgtttcgtcgtggtcctggttttaatttgggagttcaaaatgtaatatcagtggaatgaaattcgtgcgttttgagtagctcggggtatagaatttgaatctgactacgtttcaaatactagagttagatgactgcagtggctggcttccagcttctttattatttttgtctattattctcctatctgtcaatgtggccggtttacagtcaattagcgctaacagaggctacatcattcagtgacaaaaaaaaatagtgaatggtgaaggtatacaaactgagctgtgtgttgtgataatattcgtcagtattctcaacgggtatctaaaccattttgtttcgtcgtcactaatacgctgtggcgggt

SEQ ID NO: 47419 - DNA, 2310 bp, Zea Mays
aatcgtcctccctcccgtctcccgaaacctcgtccgccggttcccgtcgccatggtggtggtagtgtccacctccctatgctccttcctgcccgcgcacccgttcagcctcgcgcgccctcgccgtccccacccaacgaacccgaccgccaaacccctctcccgtaccctctccatccgctgcatcgccacaaccgcggcgggacccccgccgctcccaccgccgaagctggtccgctgcccagctctcgaccgccaggcggcgcgcgcaagccgactccgctttgcgcgcaagctcctcaccctcctcctctccaagccgcgccatttcctcccgctccgcgtgctcaaccgctgccgccgcttcctcggcctcccgcgccgcggccgcccgctcatccccatggtcctccgctacccgaccctcttccgcctcttccaggcccacacctccctcccgctctccccgtccctctccaccctcgcggtcgcgctcactcccgccgccgaggcgctcgccgccgatcttgcggcgctccgcgccaccggcacaggcgcaggcgcgctcgccgccaagatccaccgccttctcctcatgaccccgcgccgaaacattccggtgaacaggctcgtccacctcgcccccgacctcggcttttccatggacttccgcgcgacgctttgcccccgccacccggacctcttcagactcgtgaacacctcccgcggccacgcactccagctcgctgatcccccgccaacgccccctccgccgcccctctctcttcgccccgccgcgccgcccgaccgcctcatggaccggccgcggaggtttccgcacctcccgctccgccgcgggcttaacctccgccgggtgcaccgggactacctcctgcggttccatagccttcccgaggtgtccccgttcgagccactggatgagggcgctagtctggagatgttggagcggcgggcgtgtgctgtggtgcgggaggtgctggccatgacggtggagaagcggacgctggtggatcacctcacgcacttcaggaaagaccttggcttgccaaaccggctgcgcgccatgctggtgcgacatccagagctgttttatgtcagtgtgaagggggtgcgtcactcagtgttccttgtggaggcgtttgatgatgatgggaggctcctagtggaggatgagatgctggttgggagggataggctggaggagcttgttcgggagggaaagcggatgaggcgtgctcggaagaaaggtgttctcacgttcgatggtgacagtgatgaggatgaagatgatgatgcagcagaagaggaaggttcattaaaggtggatgatgaatttggggacttgtttgaggatggtgtcattggggaggactgggaggaggtaggcgatggaggtggaagtgatgcatatgaagagtacgatgctgaatcaggtgacatggaggagttttgggtcaagaaggctgtggctcaaggactggttggcaatggtaatgagcaggatgtttggaggtactgctctaaggtgaaagagcaatgctcagcagatatgatacatgctgaggatgcattcaaaagctcttggatttatcatgctgaggtgatgatggctgagttttgtactgtctgcattgaaaagaatttaattgataaaatgattgatctgccctgggattccgaggaagacaaacatcttcacaagttcctcttcaactctgctcgagaagtgcgcatgaaaccaaatgatagtctgcttgttgtctactaccttgggatacaggtctctggatatgctgagaaacctttcatcttaaatggaactggtgtagcccaaaatggccctgctaaaaggtctgtctctggatatgctggctaccagccaaggataacatcttgattctgcacgctggtttgtggcgatatgtttcgtcgtggtcctggttttaatttgggagttcaaaatgtaatatcagtggaatgaaattcgtgcgttttgagtagctcggggtatagaatttgaatctgactacgtttcaaatactagagttagatgactgcagtggctggcttccagcttctttattatttttgtctattattctcctatctgtcaatgtggccggtttacagtcaattagcgctaacagaggctacatcattcagtgacaaaaaaaaatagtgaatggtgaaggtatacaaactgagctgtgtgttgtgataatattcgtcagtattctcaacgggtatctaaaccattttgtttcgtcgtcactaatacgctgtggcgggt

SEQ ID NO: 47420 - DNA, 3143 bp, Zea Mays
cctccctcccgtctcccgaaacctcgtccgccggttcccgtcgccatggtggtggtagtgtccacctccctatgctccttcctgcccgcgcacccgttcagcctcgcgcgccctcgccgtccccacccaacgaacccgaccgccaaacccctctcccgtaccctctccatccgctgcatcgccacaaccgcggcgggacccccgccgctcccaccgccgaagctggtccgctgcccagctctcgaccgccaggcggcgcgcgcaagccgactccgctttgcgcgcaagctcctcaccctcctcctctccaagccgcgccatttcctcccgctccgcgtgctcaaccgctgccgccgcttcctcggcctcccgcgccgcggccgcccgctcatccccatggtcctccgctacccgaccctcttccgcctcttccaggcccacacctccctcccgctctccccgtccctctccaccctcgcggtcgcgctcactcccgccgccgaggcgctcgccgccgatcttgcggcgctccgcgccaccggcacaggcgcaggcgcgctcgccgccaagatccaccgccttctcctcatgaccccgcgccgaaacattccggtgtccccgttcgagccactggatgagggcgctagtctggagatgttggagcggcgggcgtgtgctgtggtgcgggaggtgctggccatgacggtggagaagcggacgctggtggatcacctcacgcacttcaggaaagaccttggcttgccaaaccggctgcgcgccatgctggtgcgacatccagagctgttttatgtcagtgtgaagggggtgcgtcactcagtgttccttgtggaggcgtttgatgatgatgggaggctcctagtggaggatgagatgctggttgggagggataggctggaggagcttgttcgggagggaaagcggatgaggcgtgctcggaagaaaggtgttctcacgttcgatggtgacagtgatgaggatgaagatgatgatgcagcagaagaggaaggttcattaaaggtggatgatgaatttggggacttgtttgaggatggtgtcattggggaggactgggaggaggtaggcgatggaggtggaagtgatgcatatgaagagtacgatgctgaatcaggtgacatggaggagttttgggtcaagaaggctgtggctcaaggactggttggcaatggtaatgagcaggatgtttggtgagtgcatcagcttgtgggactgctcaggaagttaacgaagattgagaattcctcaagtgtgcttttctcagcaatgcacataaaccagtaagcatcagtacatatccgggtatcttggacctcttggtcccatttgccgcctgtctgttggtacttgcaaggtatgaatgtatataccgctcgtttgattctggctatgcacggttatttctacatgcatgataaacatgttgctaatcaataggattagggggatgcaaaggttgaaaagttttgttgcatagcatggtttgtaatcttaggccgctgctttataggagtaggttgaacatggatgtttgatttgctgttaaataacaaatatgacatctaaaaactctcaagtaactttatcatatttatgtgctgccttgtatgcttctcattgagcagagccaaaaggtcttgagttcgacgcaacctctctgggtaaggcttgccaccattattccttcctcagaggctcagaccccactcatgtgggagccgtcagcactgagtttgtcattgtattcttctcattaagcagacaatgattttgatctgccagccacccagcctgcctcgattgcatgggtagacaactcttgtttgtatcaaggctcccgattggcacttcctcatcttcctccagcaataaaataaataataaaaaccacaaatgctgaatcacgtttaatgtaccttaatcttcctaggctctagtcagtggcctaggtcctaacactttttggaactttgtgaagacagacagatgaagcggctccgttatccttttactttgttctggagaggagctatttggacagtcacgatgtccgtcctccagggcactgtttctgctttgatgcttatgaggcatgctctcttacttcccaagatctcttgcacggaaacacatccaaagatagcacagcttctagaacatcacaaacctaatgtgtcacttcttatgctaaagtgtgcagagtgcgatagcttctctgctacagaaaactttgaaaaagatggcgtttcatctcttaaggaggcagccactgtatccgtgttagagttgaatgtgccctcctgtcagaagcgtttatgtattataggaggtactgctctaaggtgaaagagcaatgctcagcagatatgatacatgctgaggatgcattcaaaagctcttggatttatcatgctgaggtgatgatggctgagttttgtactgtctgcattgaaaagaatttaattgataaaatgattgatctgccctgggattccgaggaagacaaacatcttcacaagttcctcttcaactctgctcgagaagtgcgcatgaaaccaaatgatagtctgcttgttgtctactaccttgggatacaggtctctggatatgctgagaaacctttcatcttaaatggaactggtgtagcccaaaatggccctgctaaaaggtctgtctctggatatgctggctaccagccaaggataacatcttgattctgcacgctggtttgtggcgatatgtttcgtcgtggtcctggttttaatttgggagttcaaaatgtaatatcagtggaatgaaattcgtgcgttttgagtagctcggggtatagaatttgaatctgactacgtttcaaatactagagttagatgactgcagtggctggcttccagcttctttattatttttgtctattattctcctatctgtcaatgtggccggtttacagtcaattagcgctaacagaggctacatcattcagtgacaaaaaaaaatagtgaatggtgaaggtatacaaactgagctgtgtgttgtgataatattcgtcagtattctcaacgggtatctaaaccattttgtttcgtcgtcactaatacgctgtggcgggt

SEQ ID NO: 47421 - DNA, 3137 bp, Zea Mays
cccgtctcccgaaacctcgtccgccggttcccgtcgccatggtggtggtagtgtccacctccctatgctccttcctgcccgcgcacccgttcagcctcgcgcgccctcgccgtccccacccaacgaacccgaccgccaaacccctctcccgtaccctctccatccgctgcatcgccacaaccgcggcgggacccccgccgctcccaccgccgaagctggtccgctgcccagctctcgaccgccaggcggcgcgcgcaagccgactccgctttgcgcgcaagctcctcaccctcctcctctccaagccgcgccatttcctcccgctccgcgtgctcaaccgctgccgccgcttcctcggcctcccgcgccgcggccgcccgctcatccccatggtcctccgctacccgaccctcttccgcctcttccaggcccacacctccctcccgctctccccgtccctctccaccctcgcggtcgcgctcactcccgccgccgaggcgctcgccgccgatcttgcggcgctccgcgccaccggcacaggcgcaggcgcgctcgccgccaagatccaccgccttctcctcatgaccccgcgccgaaacattccggtgtccccgttcgagccactggatgagggcgctagtctggagatgttggagcggcgggcgtgtgctgtggtgcgggaggtgctggccatgacggtggagaagcggacgctggtggatcacctcacgcacttcaggaaagaccttggcttgccaaaccggctgcgcgccatgctggtgcgacatccagagctgttttatgtcagtgtgaagggggtgcgtcactcagtgttccttgtggaggcgtttgatgatgatgggaggctcctagtggaggatgagatgctggttgggagggataggctggaggagcttgttcgggagggaaagcggatgaggcgtgctcggaagaaaggtgttctcacgttcgatggtgacagtgatgaggatgaagatgatgatgcagcagaagaggaaggttcattaaaggtggatgatgaatttggggacttgtttgaggatggtgtcattggggaggactgggaggaggtaggcgatggaggtggaagtgatgcatatgaagagtacgatgctgaatcaggtgacatggaggagttttgggtcaagaaggctgtggctcaaggactggttggcaatggtaatgagcaggatgtttggtgagtgcatcagcttgtgggactgctcaggaagttaacgaagattgagaattcctcaagtgtgcttttctcagcaatgcacataaaccagtaagcatcagtacatatccgggtatcttggacctcttggtcccatttgccgcctgtctgttggtacttgcaaggtatgaatgtatataccgctcgtttgattctggctatgcacggttatttctacatgcatgataaacatgttgctaatcaataggattagggggatgcaaaggttgaaaagttttgttgcatagcatggtttgtaatcttaggccgctgctttataggagtaggttgaacatggatgtttgatttgctgttaaataacaaatatgacatctaaaaactctcaagtaactttatcatatttatgtgctgccttgtatgcttctcattgagcagagccaaaaggtcttgagttcgacgcaacctctctgggtaaggcttgccaccattattccttcctcagaggctcagaccccactcatgtgggagccgtcagcactgagtttgtcattgtattcttctcattaagcagacaatgattttgatctgccagccacccagcctgcctcgattgcatgggtagacaactcttgtttgtatcaaggctcccgattggcacttcctcatcttcctccagcaataaaataaataataaaaaccacaaatgctgaatcacgtttaatgtaccttaatcttcctaggctctagtcagtggcctaggtcctaacactttttggaactttgtgaagacagacagatgaagcggctccgttatccttttactttgttctggagaggagctatttggacagtcacgatgtccgtcctccagggcactgtttctgctttgatgcttatggaggcatgctctcttacttcccaagatctcttgcacggaaacacatccaaagatagcacagcttctagaacatcacaaacctaatgtgtcacttcttatgctaaagtgtgcagagtgcgatagcttctctgctacagaaaactttgaaaaagatggcgtttcatctcttaaggaggcagccactgtatccgtgttagagttgaatgtgccctcctgtcagaagcgtttatgtattataggaggtactgctctaaggtgaaagagcaatgctcagcagatatgatacatgctgaggatgcattcaaaagctcttggatttatcatgctgaggtgatgatggctgagttttgtactgtctgcattgaaaagaatttaattgataaaatgattgatctgccctgggattccgaggaagacaaacatcttcacaagttcctcttcaactctgctcgagaagtgcgcatgaaaccaaatgatagtctgcttgttgtctactaccttgggatacaggtctctggatatgctgagaaacctttcatcttaaatggaactggtgtagcccaaaatggccctgctaaaaggtctgtctctggatatgctggctaccagccaaggataacatcttgattctgcacgctggtttgtggcgatatgtttcgtcgtggtcctggttttaatttgggagttcaaaatgtaatatcagtggaatgaaattcgtgcgttttgagtagctcggggtatagaatttgaatctgactacgtttcaaatactagagttagatgactgcagtggctggcttccagcttctttattatttttgtctattattctcctatctgtcaatgtggccggtttacagtcaattagcgctaacagaggctacatcattcagtgacaaaaaaaaatagtgaatggtgaaggtatacaaactgagctgtgtgttgtgataatattcgtcagtattctcaacgggtatctaaaccattttgtttcgtcgtcactaatacgctgtggcgggt

SEQ ID NO: 47422 - DNA, 2090 bp, Zea Mays
ccgaaacctcgtccgccggttcccgtcgccatggtggtggtagtgtccacctccctatgctccttcctgcccgcgcacccgttcagcctcgcgcgccctcgccgtccccacccaacgaacccgaccgccaaacccctctcccgtaccctctccatccgctgcatcgccacaaccgcggcgggacccccgccgctcccaccgccgaagctggtccgctgcccagctctcgaccgccaggcggcgcgcgcaagccgactccgctttgcgcgcaagctcctcaccctcctcctctccaagccgcgccatttcctcccgctccgcgtgctcaaccgctgccgccgcttcctcggcctcccgcgccgcggccgcccgctcatccccatggtcctccgctacccgaccctcttccgcctcttccaggcccacacctccctcccgctctccccgtccctctccaccctcgcggtcgcgctcactcccgccgccgaggcgctcgccgccgatcttgcggcgctccgcgccaccggcacaggcgcaggcgcgctcgccgccaagatccaccgccttctcctcatgaccccgcgccgaaacattccggtgtccccgttcgagccactggatgagggcgctagtctggagatgttggagcggcgggcgtgtgctgtggtgcgggaggtgctggccatgacggtggagaagcggacgctggtggatcacctcacgcacttcaggaaagaccttggcttgccaaaccggctgcgcgccatgctggtgcgacatccagagctgttttatgtcagtgtgaagggggtgcgtcactcagtgttccttgtggaggcgtttgatgatgatgggaggctcctagtggaggatgagatgctggttgggagggataggctggaggagcttgttcgggagggaaagcggatgaggcgtgctcggaagaaaggtgttctcacgttcgatggtgacagtgatgaggatgaagatgatgatgcagcagaagaggaaggttcattaaaggtggatgatgaatttggggacttgtttgaggatggtgtcattggggaggactgggaggaggtaggcgatggaggtggaagtgatgcatatgaagagtacgatgctgaatcaggtgacatggaggagttttgggtcaagaaggctgtggctcaaggactggttggcaatggtaatgagcaggatgtttggaggtactgctctaaggtgaaagagcaatgctcagcagatatgatacatgctgaggatgcattcaaaagctcttggatttatcatgctgaggtgatgatggctgagttttgtactgtctgcattgaaaagaatttaattgataaaatgattgatctgccctgggattccgaggaagacaaacatcttcacaagttcctcttcaactctgctcgagaagtgcgcatgaaaccaaatgatagtctgcttgttgtctactaccttggggtaaatattctgattttctttccttttctttgtatttgaaaccagattaagaggcatccaggaaattactagtggaactaaaactctaggatatcctgatacaggtctctggatatgctgagaaacctttcatcttaaatggaactggtgtagcccaaaatggccctgctaaaaggtctgtctctggatatgctggctaccagccaaggataacatcttgattctgcacgctggtttgtggcgatatgtttcgtcgtggtcctggttttaatttgggagttcaaaatgtaatatcagtggaatgaaattcgtgcgttttgagtagctcggggtatagaatttgaatctgactacgtttcaaatactagagttagatgactgcagtggctggcttccagcttctttattatttttgtctattattctcctatctgtcaatgtggccggtttacagtcaattagcgctaacagaggctacatcattcagtgacaaaaaaaaatagtgaatggtgaaggtatacaaactgagctgtgtgttgtgataatattcgtcagtattctcaacgggtatctaaaccattttgtttcgtcgtcactaatacgctgtggcgggt

SEQ ID NO: 47423 - DNA, 1259 bp, Zea Mays
ggatgtttggtgagtgcatcagcttgtgggactgctcaggaagttaacgaagattgagaattcctcaagtgtgcttttctcagcaatgcacataaaccagtaagcatcagtacatatccgggtatcttggacctcttggtcccatttgccgcctgtctgttggtacttgcaaggtatgaatgtatataccgctcgtttgattctggctatgcacggttatttctacatgcatgataaacatgttgctaatcaataggattagggggatgcaaaggttgaaaagttttgttgcatagcatggtttgtaatcttaggccgctgctttataggagtaggttgaacatggatgtttgatttgctgttaaataacaaatatgacatctaaaaactctcaagtaactttatcatatttatgtgctgccttgtatgcttctcattgagcagagccaaaaggtcttgagttcgacgcaacctctctgggtaaggcttgccaccattattccttcctcagaggctcagaccccactcatgtgggagccgtcagcactgagtttgtcattgtattcttctcattaagcagacaatgattttgatctgccagccacccagcctgcctcgattgcatgggtagacaactcttgtttgtatcaaggctcccgattggcacttcctcatcttcctccagcaataaaataaataataaaaaccacaaatgctgaatcacgtttaatgtaccttaatcttcctaggctctagtcagtggcctaggtcctaacactttttggaactttgtgaagacagacagatgaagcggctccgttatccttttactttgttctggagaggagctatttggacagtcacgatgtccgtcctccagggcactgtttctgctttgatgcttatgtgagacttttaaacccacttttgaactctaatcctttgataaacttagttcgcctctctaaccaaacatctcgggctgaatcagtctataacccaaaataatgcatgtgacaattttcatttaataactagccagttgcacgtgctttgctacggttgttatatatcatataaacatgtattgagatatttattcaaatataattattgtttatttctaaacactaaggtacgtgaggtctggtggtcagccccaaatttctggagtaggggggcataggttcgagtgctcgctctgcactattgttttgcgggttggagaaccagccggggcgagtggggcagacccagag

SEQ ID NO: 47424 - DNA, 523 bp, Zea Mays
gaactttttgcggttgcatccgttcttttggttgttacctgaagtcctgaacacatttgcattgttgtttttttgttgtggaatcgtattatagtttgtttcacgtactgcaatgtaacaatgatttattcctttttcttgttcatggttccgttggcttcaaagcttgtatgtcgtttgtatatctaagcacagtactgctcattgcatttgggtttcatggattttgtcttcattatcttatatttgttatgcaccctcattttttgtgcaggaggcatgctctcttacttcccaagatctcttgcacggaaacacatccaaagatagcacagcttctagaacatcacaaacctaatgtgtcacttcttatgctaaagtgtgcagagtgcgatagcttctctgctacagaaaactttgaaaaagatggcgtttcatctcttaaggaggcagccactgtatccgtgttagagttgaatgtgccctcctgtcagaagcgtttatgtattataggaggtactgc

SEQ ID NO: 47425 - DNA, 1752 bp, Zea Mays
caatattaaataattatttcaagacgacacgcatgtccttcatcacgtgtacgttgccgggtgggatgacatgacacccgtcgaaatcatatatatgcttgatgggtgtggtggcctcgtgccatcgtgtgtgcctgtctactgcgctagctagctgtcgtcttctccatcaagtagaaccagtagaggaagcaggagaatacaagctactgcccttagaaaaaaaaaaccctacgctagctagcatcctctttccattagccatcctagccttcgccccctcgacgagaagaaccacctcaaaaccgaacagccgcaaaagaaagctgctagctactctatacatgataactagaacaggaccgtgaagtaatatatatataatgacgaagtcaggggcgctacaacttgctcggagcaccggagggtcgcttagcaaggaccaagtcaaatccgccgttgatcagtatgtgaagtaccacgacctccacggaggcgaacaagaatcaagaaagtcaaattacgctgatttggcaaacaagtactatgatcttgtcactggcttctacgaatatggatggggcgactcattccattttgctggcggatatccgggtgaaacttcccgtgaagccattaagcggcaccagcattttatggcactacaattggggctcaagaagggtatgaaggttctggacgtgggatgtggaattgggggacctttaatagaaattgccagattcagctcaacttcaataactggattgaccaacaatgactaccatgtctcaaggggcaaggagcacatcttttcagcaggtttgagtgagcaatgctgctccttgaagggggacttcatgaatatgccaatagctgataacacctttgatgcggcctatgcaatacaggctacatgttacgcaccagaggcacaaggtgtctatagtgaggtctaccgtgtgctgaaacctgggcagtattttgcactggatgaatggtgcctgactgaccgatttgatcccaacaacgctaagcatttgaccgccaaggctgagattgagcttggcgatggcctgcctgacatccgtaccactcgccagtgtgtccaagctatgaaagatgcaggattcgaggtcatttttgcaaaggatcttgctcaagattttccttgcccatggtaccagacgatggatcctaactacttttcatgggctaacttccaatgcacacgcccaggacggataatcacccgtgcaattgtcaatacactagagttcctccgtattgccccagcaggcagcgtgggagcctacaacgtcctaacgagtgcctctgatggccttctaaaaggtggtcgggaaggtatcttcacagcgtccttcttcgtcctgggccgcaagcctctcaaggaaagtgaaatagtgaacggcggcaacctttgagctgcaacatgagtatggggtcgtacttataagagctatgaatcatggccaacgtgttacgtgctgaagtgtgtttaccggtttgtcttatggctcttgcgcgtgtggtgggtcatgttcacgcagtagcatactagcatgtatctgcttgttgtgtgttgtactatgaactatctgaataaaaatgctgtttacgcgttgtattaatcgcaccatttcttggcaacacggctttgatcggaccaatgtattgtctggatctatcatacgagaattcatctataaagtattcttcatgttaggactt

SEQ ID NO: 47426 - DNA, 1155 bp, Zea Mays
gtgccatcgtgtgtgcctgtctactgcgctagctagctgtcgtcttctccatcaagtagaaccagtagaggaagcaggagaatacaagctactgcccttagaaaaaaaaaaccctacgctagctagcatcctctttccattagccatcctagccttcgccccctcgacgagaagaaccacctcaaaaccgaacagccgcaaaagaaagctgctagctactctatacatgataactagaacaggaccgtgaagtaatatatatataatgacgaagtcaggggcgctacaacttgctcggagcaccggagggtcgcttagcaaggaccaagtcaaatccgccgttgatcagtatgtgaagtaccacgacctccacggaggcgaacaagaatcaagaaagtcaaattacgctgatttggcaaacaagtactatgatcttgtcactggcttctacgaatatggatggggcgactcattccattttgctggcggatatccgggtgaaacttcccgtgaagccattaagcggcaccagcattttatggcactacaattggggctcaagaagggtatgaaggttctggacgtgggatgtggaattgggggacctttaatagaaattgccagattcagctcaacttcaataactggattgaccaacaatgactaccatgtctcaaggggcaaggagcacatcttttcagcaggtttgagtgagcaatgctgctccttgaagggggacttcatgaatatgccaatagctgataacacctttgatgcggcctatgcaatacaggctacatgttacgcaccagaggcacaaggtgtctatagtgaggtctaccgtgtgctgaaacctgggcagtattttgcactggatgaatggtgcctgactgaccgatttgatcccaacaacgctaagcatttgaccgccaaggctgagattgagcttggcgatggcctgcctgacatccgtaccactcgccagtgtgtccaagctatgaaagatgcaggattcgaggtcatttttgcaaaggatcttgctcaagattttccttgcccatggtaccagacgatggatcctaactacttttcatgggctaacttccaatgcacacgcccaggacggataatcacccgtgcaattttaattctttt

SEQ ID NO: 47427 - DNA, 1613 bp, Zea Mays
ctgtctactgcgctagctagctgtcgtcttctccatcaagtagaaccagtagaggaagcaggagaatacaagctactgcccttagaaaaaaaaaaccctacgctagctagcatcctctttccattagccatcctagccttcgccccctcgacgagaagaaccacctcaaaaccgaacagccgcaaaagaaagctgctagctactctatacatgataactaggaccgtgaagtaatatatatataatgacgaagtcaggggcgctacaacttgctcggagcaccggagggtcgcttagcaaggaccaagtcaaatccgccgttgatcagtatgtgaagtaccacgacctccacggaggcgaacaagaatcaagaaagtcaaattacgctgatttggcaaacaagtactatgatcttgtcactggcttctacgaatatggatggggcgactcattccattttgctggcggatatccgggtgaaacttcccgtgaagccattaagcggcaccagcattttatggcactacaattggggctcaagaagggtatgaaggttctggacgtgggatgtggaattgggggacctttaatagaaattgccagattcagctcaacttcaataactggattgaccaacaatgactaccatgtctcaaggggcaaggagcacatcttttcagcaggtttgagtgagcaatgctgctccttgaagggggacttcatgaatatgccaatagctgataacacctttgatgcggcctatgcaatacaggctacatgttacgcaccagaggcacaaggtgtctatagtgaggtctaccgtgtgctgaaacctgggcagtattttgcactggatgaatggtgcctgactgaccgatttgatcccaacaacgctaagcatttgaccgccaaggctgagattgagcttggcgatggcctgcctgacatccgtaccactcgccagtgtgtccaagctatgaaagatgcaggattcgaggtcatttttgcaaaggatcttgctcaagattttccttgcccatggtaccagacgatggatcctaactacttttcatgggctaacttccaatgcacacgcccaggacggataatcacccgtgcaattgtcaatacactagagttcctccgtattgccccagcaggcagcgtgggagcctacaacgtcctaacgagtgcctctgatggccttctaaaaggtggtcgggaaggtatcttcacagcgtccttcttcgtcctgggccgcaagcctctcaaggaaagtgaaatagtgaacggcggcaacctttgagctgcaacatgagtatggggtcgtacttataagagctatgaatcatggccaacgtgttacgtgctgaagtgtgtttaccggtttgtcttatggctcttgcgcgtgtggtgggtcatgttcacgcagtagcatactagcatgtatctgcttgttgtgtgttgtactatgaactatctgaataaaaatgctgtttacgcgttgtattaatcgcaccatttcttggcaacacggctttgatcggaccaatgtattgtctggatctatcatacgagaattcatctataaagtattcttcatgttaggactt

SEQ ID NO: 47428 - DNA, 1632 bp, Zea Mays
tactgcgctagctagctgtcgtcttctccatcaagtagaaccagtagaggaagcaggagaatacaagctactgcccttagaaaaaaaaaaccctacgctagctagcatcctctttccattagccatcctagccttcgccccctcgacgagaagaaccacctcaaaaccgaacagccgcaaaagaaagctgctagctactctatacatgataactagaacaggaccgtgaagtaatatatatataatgacgaagtcaggggcgctacaacttgctcggagcaccggagggtcgcttagcaaggaccaagtcaaatccgccgttgatcagtatgtgaagtaccacgacctccacggaggcgaacaagaatcaagaaagtcaaattacgctgatttggcaaacaagtactatgatcttgtcactggcttctacgaatatggatggggcgactcattccattttgctggcggatatccgggtgaaacttcccgtgaagccattaagcggcaccagcattttatggcactacaattggggctcaagaagggtatgaaggttctggacgtgggatgtggaattgggggacctttaatagaaattgccagattcagctcaacttcaataactggattgaccaacaatgactaccatgtctcaaggggcaaggagcacatcttttcagcaggtttgagtgagcaatgctgctccttgaagggggacttcatgaatatgccaatagctgataacacctttgatgcggcctatgcaatacaggctacatgttacgcaccagaggcacaaggtgtctatagtgaggtctaccgtgtgctgaaacctgggcagtattttgcactggatgaatggtgcctgactgaccgatttgatcccaacaacgctaagcatttgaccgccaaggctgagattgagcttggcgatggcctgcctgacatccgtaccactcgccagtgtgtccaagctatgaaagatgcaggattcgaggtcatttttgcaaaggatcttgctcaagattttccttgcccatggtaccagacgatggatcctaactacttttcatgggctaacttccaatgcacacgcccaggacggataatcacccgtgcaattttaattctttttttgtcaggtcaatacactagagttcctccgtattgccccagcaggcagcgtgggagcctacaacgtcctaacgagtgcctctgatggccttctaaaaggtggtcgggaaggtatcttcacagcgtccttcttcgtcctgggccgcaagcctctcaaggaaagtgaaatagtgaacggcggcaacctttgagctgcaacatgagtatggggtcgtacttataagagctatgaatcatggccaacgtgttacgtgctgaagtgtgtttaccggtttgtcttatggctcttgcgcgtgtggtgggtcatgttcacgcagtagcatactagcatgtatctgcttgttgtgtgttgtactatgaactatctgaataaaaatgctgtttacgcgttgtattaatcgcaccatttcttggcaacacggctttgatcggaccaatgtattgtctggatctatcatacgagaattcatctataaagtattcttcatgttaggactt

SEQ ID NO: 47429 - DNA, 1531 bp, Zea Mays
tagctagctgtcgtcttctccatcaagtagaaccagtagaggaagcaggagaatacaagctactgcccttagaaaaaaaaaaccctacgctagctagcatcctctttccattagccatcctagccttcgccccctcgacgagaagaaccacctcaaaaccgaacagccgcaaaagaaagctgctagctactctatacatgataactagaacaggaccgtgaagtaatatatatataatgacgaagtcaggggcgctacaacttgctcggagcaccggagggtcgcttagcaaggaccaagtcaaatccgccgttgatcagtatgtgaagtaccacgacctccacggaggcgaacaagaatcaagaaagtcaaattacgctgatttgatatccgggtgaaacttcccgtgaagccattaagcggcaccagcattttatggcactacaattggggctcaagaagggtatgaaggttctggacgtgggatgtggaattgggggacctttaatagaaattgccagattcagctcaacttcaataactggattgaccaacaatgactaccatgtctcaaggggcaaggagcacatcttttcagcaggtttgagtgagcaatgctgctccttgaagggggacttcatgaatatgccaatagctgataacacctttgatgcggcctatgcaatacaggctacatgttacgcaccagaggcacaaggtgtctatagtgaggtctaccgtgtgctgaaacctgggcagtattttgcactggatgaatggtgcctgactgaccgatttgatcccaacaacgctaagcatttgaccgccaaggctgagattgagcttggcgatggcctgcctgacatccgtaccactcgccagtgtgtccaagctatgaaagatgcaggattcgaggtcatttttgcaaaggatcttgctcaagattttccttgcccatggtaccagacgatggatcctaactacttttcatgggctaacttccaatgcacacgcccaggacggataatcacccgtgcaattgtcaatacactagagttcctccgtattgccccagcaggcagcgtgggagcctacaacgtcctaacgagtgcctctgatggccttctaaaaggtggtcgggaaggtatcttcacagcgtccttcttcgtcctgggccgcaagcctctcaaggaaagtgaaatagtgaacggcggcaacctttgagctgcaacatgagtatggggtcgtacttataagagctatgaatcatggccaacgtgttacgtgctgaagtgtgtttaccggtttgtcttatggctcttgcgcgtgtggtgggtcatgttcacgcagtagcatactagcatgtatctgcttgttgtgtgttgtactatgaactatctgaataaaaatgctgtttacgcgttgtattaatcgcaccatttcttggcaacacggctttgatcggaccaatgtattgtctggatctatcatacgagaattcatctataaagtattcttcatgttaggactt

SEQ ID NO: 47430 - DNA, 1747 bp, Zea Mays
agctgtcgtcttctccatcaagtagaaccagtagaggaagcaggagaatacaagctactgcccttagaaaaaaaaaaccctacgctagctagcatcctctttccattagccatcctagccttcgccccctcgacgagaagaaccacctcaaaaccgaacagccgcaaaagaaagctgctagctactctatacatgataactaggtagatatatataagcttccggggctttaatttggttgggagttccggccatgagcgagaagagattcatgcatggcgcaaatttcatgtgtgttttgcagaacaggaccgtgaagtaatatatatataatgacgaagtcaggggcgctacaacttgctcggagcaccggagggtcgcttagcaaggaccaagtcaaatccgccgttgatcagtatgtgaagtaccacgacctccacggaggcgaacaagaatcaagaaagtcaaattacgctgatttggcaaacaagtactatgatcttgtcactggcttctacgaatatggatggggcgactcattccattttgctggcggtcccatactcccatgcttgtatttcagatatccgggtgaaacttcccgtgaagccattaagcggcaccagcattttatggcactacaattggggctcaagaagggtatgaaggttctggacgtgggatgtggaattgggggacctttaatagaaattgccagattcagctcaacttcaataactggattgaccaacaatgactaccatgtctcaaggggcaaggagcacatcttttcagcaggtttgagtgagcaatgctgctccttgaagggggacttcatgaatatgccaatagctgataacacctttgatgcggcctatgcaatacaggctacatgttacgcaccagaggcacaaggtgtctatagtgaggtctaccgtgtgctgaaacctgggcagtattttgcactggatgaatggtgcctgactgaccgatttgatcccaacaacgctaagcatttgaccgccaaggctgagattgagcttggcgatggcctgcctgacatccgtaccactcgccagtgtgtccaagctatgaaagatgcaggattcgaggtcatttttgcaaaggatcttgctcaagattttccttgcccatggtaccagacgatggatcctaactacttttcatgggctaacttccaatgcacacgcccaggacggataatcacccgtgcaattttaattctttttttgtcaggtcaatacactagagttcctccgtattgccccagcaggcagcgtgggagcctacaacgtcctaacgagtgcctctgatggccttctaaaaggtggtcgggaaggtatcttcacagcgtccttcttcgtcctgggccgcaagcctctcaaggaaagtgaaatagtgaacggcggcaacctttgagctgcaacatgagtatggggtcgtacttataagagctatgaatcatggccaacgtgttacgtgctgaagtgtgtttaccggtttgtcttatggctcttgcgcgtgtggtgggtcatgttcacgcagtagcatactagcatgtatctgcttgttgtgtgttgtactatgaactatctgaataaaaatgctgtttacgcgttgtattaatcgcaccatttcttggcaacacggctttgatcggaccaatgtattgtctggatctatcatacgagaattcatctataaagtattcttcatgttaggactt

SEQ ID NO: 47431 - DNA, 1680 bp, Zea Mays
cttctccatcaagtagaaccagtagaggaagcaggagaatacaagctactgcccttagaaaaaaaaaaccctacgctagctagcatcctctttccattagccatcctagccttcgccccctcgacgagaagaaccacctcaaaaccgaacagccgcaaaagaaagctgctagctactctatacatgataactagaacaggaccgtgaagtaatatatatataatgacgaagtcaggggcgctacaacttgctcggagcaccggagggtcgcttagcaaggaccaagtcaaatccgccgttgatcagtatgtgaagtaccacgacctccacggaggcgaacaagaatcaagaaagtcaaattacgctgatttggcaaacaagtactatgatcttgtcactggcttctacgaatatggatggggcgactcattccattttgctggcggatatccgggtgagacttcccgtgaagccattaagcggcaccagcattttttggcactacaattggggctcaagaagggtatgaaggttttggatgtgggatgtggaattgggggacctttaatagaaatcgccagattcaggcaatgatctgcaataatgtttcattgcccattcaatcaataaattccaacaataatgaagaacatacatacatatatatatatatgtgtgtgtgtgaattttcaattctgtttattgtagctcaacatcgataactggactgaacaacaatgactaccacatctcaaggggcaaggagctcattttttcagcaggtttgagtgagcaatgctgcttcttgaagggggacttcatggacatgccaatatctgataacacctttgatgcggcctatgcaatacaggctacatgtcatgcaccagatgcacaaggcgtctatagtgaggtctaccgtgtgctgaaacctgggcagtattttgcactggatgaatggtgcttgaccgaccgatttgatcccaacaacgccaagcatttggccatcaaggctgagattgagctcggtgatggcctacctgacatccgtaccactcgccaatgtgtccaagctatgaaagatgcaggatttgaggtcgtttttgcaaaggatcttgctcaagtttttccttgcccgtggtaccgggtgatggatcccacctacttttcatgggctcacttccaatgcacacgcccaggacggatcgtcacccgtgcaattgtcaatacactagagttcctccgtattgccccagcaggcagcatgggagcctacaacgtcctgatgagtgcctctgatggccttctaaaaggtggccgggaaggtatcttcacagcgaccttcttcgtcctgggccgcaagcctctcaaggaagttgatatagtaagcctctcaaggaagttgatatagtgaacggcggcgtcctttgagctgcaagattagtatggggctgtactcataagagctatgaatcatggccaacgtgttctgtgctgaggtgtgtttactggattgtcttatgggttatggcccttgcgctgtgtgctggcctgctgggtcatgttcccgcagtagcctgtatctgcttgtcagcttgtgtgctgtgtactatgcactatctgaataaaaatgcagttttacgcattgttattaatcgcaccatttcttggcaacacgac

SEQ ID NO: 47432 - DNA, 1431 bp, Zea Mays
cctgcctctgcctgatcactccaccttcttgctttcacaactggtcgcctggacggccagagccgacgatgcagacggtgcttccttccgcggccgcacgcacgtcgttcgacgaattgccggagccagctgaacataaccgaaggtatgtgaagtaccacgacctccacggaggcgaacaagaatcaagaaagtcaaattacgctgatttggcaaacaagtactatgatcttgtcactggcttctacgaatatggatggggcgactcattccattttgctggcggatatccgggtgaaacttcccgtgaagccattaagcggcaccagcattttatggcactacaattggggctcaagaagggtatgaaggttctggacgtgggatgtggaattgggggacctttaatagaaattgccagattcagctcaacttcaataactggattgaccaacaatgactaccatgtctcaaggggcaaggagcacatcttttcagcaggtttgagtgagcaatgctgctccttgaagggggacttcatgaatatgccaatagctgataacacctttgatgcggcctatgcaatacaggctacatgttacgcaccagaggcacaaggtgtctatagtgaggtctaccgtgtgctgaaacctgggcagtattttgcactggatgaatggtgcctgactgaccgatttgatcccaacaacgctaagcatttgaccgccaaggctgagattgagcttggcgatggcctgcctgacatccgtaccactcgccagtgtgtccaagctatgaaagatgcaggattcgaggtcatttttgcaaaggatcttgctcaagattttccttgcccatggtaccagacgatggatcctaactacttttcatgggctaacttccaatgcacacgcccaggacggataatcacccgtgcaattgtcaatacactagagttcctccgtattgccccagcaggcagcgtgggagcctacaacgtcctaacgagtgcctctgatggccttctaaaaggtggtcgggaaggtatcttcacagcgtccttcttcgtcctgggccgcaagcctctcaaggaaagtgaaatagtgaacggcggcaacctttgagctgcaacatgagtatggggtcgtacttataagagctatgaatcatggccaacgtgttacgtgctgaagtgtgtttaccggtttgtcttatggctcttgcgcgtgtggtgggtcatgttcacgcagtagcatactagcatgtatctgcttgttgtgtgttgtactatgaactatctgaataaaaatgctgtttacgcgttgtattaatcgcaccatttcttggcaacacggctttgatcggaccaatgtattgtctggatctatcatacgagaattcatctataaagtattcttcatgttaggactt

SEQ ID NO: 47433 - DNA, 1416 bp, Zea Mays
cctgatcactccaccttcttgctttcacaactggtcgcctggacgagccgacgatgcagacggtgcttccttccgcggccgcacgcacgtcgttcgacgaattgccggagccagctgaacataaccgaaggtatgtgaagtaccacgacctccacggaggcgaacaagaatcaagaaagtcaaattacgctgatttggcaaacaagtactatgatcttgtcactggcttctacgaatatggatggggcgactcattccattttgctggcggatatccgggtgaaacttcccgtgaagccattaagcggcaccagcattttatggcactacaattggggctcaagaagggtatgaaggttctggacgtgggatgtggaattgggggacctttaatagaaattgccagattcagctcaacttcaataactggattgaccaacaatgactaccatgtctcaaggggcaaggagcacatcttttcagcaggtttgagtgagcaatgctgctccttgaagggggacttcatgaatatgccaatagctgataacacctttgatgcggcctatgcaatacaggctacatgttacgcaccagaggcacaaggtgtctatagtgaggtctaccgtgtgctgaaacctgggcagtattttgcactggatgaatggtgcctgactgaccgatttgatcccaacaacgctaagcatttgaccgccaaggctgagattgagcttggcgatggcctgcctgacatccgtaccactcgccagtgtgtccaagctatgaaagatgcaggattcgaggtcatttttgcaaaggatcttgctcaagattttccttgcccatggtaccagacgatggatcctaactacttttcatgggctaacttccaatgcacacgcccaggacggataatcacccgtgcaattgtcaatacactagagttcctccgtattgccccagcaggcagcgtgggagcctacaacgtcctaacgagtgcctctgatggccttctaaaaggtggtcgggaaggtatcttcacagcgtccttcttcgtcctgggccgcaagcctctcaaggaaagtgaaatagtgaacggcggcaacctttgagctgcaacatgagtatggggtcgtacttataagagctatgaatcatggccaacgtgttacgtgctgaagtgtgtttaccggtttgtcttatggctcttgcgcgtgtggtgggtcatgttcacgcagtagcatactagcatgtatctgcttgttgtgtgttgtactatgaactatctgaataaaaatgctgtttacgcgttgtattaatcgcaccatttcttggcaacacggctttgatcggaccaatgtattgtctggatctatcatacgagaattcatctataaagtattcttcatgttaggactt

SEQ ID NO: 47434 - DNA, 1360 bp, Zea Mays
ccaaggtgttccggccaaaattgtgacatttacacacatgctgtcactgttatttcttcgtggaagccattgatgtatgtgaagtaccacgacctccacggaggcgaacaagaatcaagaaagtcaaattacgctgatttggcaaacaagtactatgatcttgtcactggcttctacgaatatggatggggcgactcattccattttgctggcggatatccgggtgaaacttcccgtgaagccattaagcggcaccagcattttatggcactacaattggggctcaagaagggtatgaaggttctggacgtgggatgtggaattgggggacctttaatagaaattgccagattcagctcaacttcaataactggattgaccaacaatgactaccatgtctcaaggggcaaggagcacatcttttcagcaggtttgagtgagcaatgctgctccttgaagggggacttcatgaatatgccaatagctgataacacctttgatgcggcctatgcaatacaggctacatgttacgcaccagaggcacaaggtgtctatagtgaggtctaccgtgtgctgaaacctgggcagtattttgcactggatgaatggtgcctgactgaccgatttgatcccaacaacgctaagcatttgaccgccaaggctgagattgagcttggcgatggcctgcctgacatccgtaccactcgccagtgtgtccaagctatgaaagatgcaggattcgaggtcatttttgcaaaggatcttgctcaagattttccttgcccatggtaccagacgatggatcctaactacttttcatgggctaacttccaatgcacacgcccaggacggataatcacccgtgcaattgtcaatacactagagttcctccgtattgccccagcaggcagcgtgggagcctacaacgtcctaacgagtgcctctgatggccttctaaaaggtggtcgggaaggtatcttcacagcgtccttcttcgtcctgggccgcaagcctctcaaggaaagtgaaatagtgaacggcggcaacctttgagctgcaacatgagtatggggtcgtacttataagagctatgaatcatggccaacgtgttacgtgctgaagtgtgtttaccggtttgtcttatggctcttgcgcgtgtggtgggtcatgttcacgcagtagcatactagcatgtatctgcttgttgtgtgttgtactatgaactatctgaataaaaatgctgtttacgcgttgtattaatcgcaccatttcttggcaacacggctttgatcggaccaatgtattgtctggatctatcatacgagaattcatctataaagtattcttcatgttaggactt

SEQ ID NO: 47435 - DNA, 1339 bp, Zea Mays
gttatttcttcgtggaagccattgatgtatgtgaagtaccacgacctccacggaggcgaacaagaatcaagaaagtcaaattacgctgatttggcaaacaagtactatgatcttgtcactggcttctacgaatatggatggggcgactcattccattttgctggcggtcccatactcccatgcttgtatttcagatatccgggtgaaacttcccgtgaagccattaagcggcaccagcattttatggcactacaattggggctcaagaagggtatgaaggttctggacgtgggatgtggaattgggggacctttaatagaaattgccagattcagctcaacttcaataactggattgaccaacaatgactaccatgtctcaaggggcaaggagcacatcttttcagcaggtttgagtgagcaatgctgctccttgaagggggacttcatgaatatgccaatagctgataacacctttgatgcggcctatgcaatacaggctacatgttacgcaccagaggcacaaggtgtctatagtgaggtctaccgtgtgctgaaacctgggcagtattttgcactggatgaatggtgcctgactgaccgatttgatcccaacaacgctaagcatttgaccgccaaggctgagattgagcttggcgatggcctgcctgacatccgtaccactcgccagtgtgtccaagctatgaaagatgcaggattcgaggtcatttttgcaaaggatcttgctcaagattttccttgcccatggtaccagacgatggatcctaactacttttcatgggctaacttccaatgcacacgcccaggacggataatcacccgtgcaattgtcaatacactagagttcctccgtattgccccagcaggcagcgtgggagcctacaacgtcctaacgagtgcctctgatggccttctaaaaggtggtcgggaaggtatcttcacagcgtccttcttcgtcctgggccgcaagcctctcaaggaaagtgaaatagtgaacggcggcaacctttgagctgcaacatgagtatggggtcgtacttataagagctatgaatcatggccaacgtgttacgtgctgaagtgtgtttaccggtttgtcttatggctcttgcgcgtgtggtgggtcatgttcacgcagtagcatactagcatgtatctgcttgttgtgtgttgtactatgaactatctgaataaaaatgctgtttacgcgttgtattaatcgcaccatttcttggcaacacggctttgatcggaccaatgtattgtctggatctatcatacgagaattcatctataaagtattcttcatgttaggactt

SEQ ID NO: 47436 - DNA, 1407 bp, Zea Mays
aaaagctgctccgggaagaacaaggctttgcagtgtcttgttttggagagcaaaggatcatcgtcaagtgatggccaagtcaggggcgctagaacttgctcggagcaccggagggtcgcttagcaaggaccaagtcaaatccgccgttgatcagtatgtcaaataccacgacctccatggaggcaaacaagaatcaaggaagtcaaattacaccgatttggcaaacaagtactatgatcttgtcactggcttttacgaatatggatggggcgactcattccatcttgctggcggatatccgggtgagacttcccgtgaagccattaagcggcaccagcattttttggcactacaattggggctcaagaagggtatgaaggttttggatgtgggatgtggaattgggggacctttaatagaaatcgccagattcagctcaacatcgataactggactgaacaacaatgactaccacatctcaaggggcaaggagctcattttttcagcaggtttgagtgagcaatgctgcttcttgaagggggacttcatggacatgccaatatctgataacacctttgatgcggcctatgcaatacaggctacatgtcatgcaccagatgcacaaggcgtctatagtgaggtctaccgtgtgctgaaacctgggcagtattttgcactggatgaatggtgcttgaccgaccgatttgatcccaacaacgccaagcatttggccatcaaggctgagattgagctcggtgatggcctacctgacatccgtaccactcgccaatgtgtccaagctatgaaagatgcaggatttgaggtcgtttttgcaaaggatcttgctcaagtttttccttgcccgtggtaccgggtgatggatcccacctacttttcatgggctcacttccaatgcacacgcccaggacggatcgtcacccgtgcaattgtcaatacactagagttcctccgtattgccccagcaggcagcatgggagcctacaacgtcctgatgagtgcctctgatggccttctaaaaggtggccgggaaggtatcttcacagcgaccttcttcgtcctgggccgcaagcctctcaaggaagttgatatagtaagcctctcaaggaagttgatatagtgaacggcggcgtcctttgagctgcaagattagtatggggctgtactcataagagctatgaatcatggccaacgtgttctgtgctgaggtgtgtttactggattgtcttatgggttatggcccttgcgctgtgtgctggcctgctgggtcatgttcccgcagtagcctgtatctgcttgtcagcttgtgtgctgtgtactatgcactatctgaataaaaatgcagttttacgcattgttattaatcgcaccatttcttggcaacacgac

SEQ ID NO: 47437 - DNA, 1742 bp, Zea Mays
cttcgatcaagaagaacaaaagctgcccgccttggagaagggaaaaaaaaactacgctagcatctcttcgtccccagtcggtcactccattcagcgttgttaaaaccagtgccattagccatcctagccttcaccctcgcggagaagaagaaagaaaccacctcacctcaagaacagctagctgcaaggataaaaaaaaacaaagctgctgatctatatataataattaggctttgcagtgtcttgttttggagagcaaaggatcatcgtcaagtgatggccaagtcaggggcgctagaacttgctcggagcaccggagggtcgcttagcaaggaccaagtcaaatccgccgttgatcagggctgcctctgtcggaccactccacttcttgcttccagcaaccgttcgtctagccggcctgacgtcgcggcgcccaacacggcaacgcgcctttttcttccgcacgctgcgctggcccccttctcttggtatgtcaaataccacgacctccatggaggcaaacaagaatcaaggaagtcaaattacaccgatttggcaaacaagtactatgatcttgtcactggcttttacgaatatggatggggcgactcattccatcttgctggcggatatccgggtgagacttcccgtgaagccattaagcggcaccagcattttttggcactacaattggggctcaagaagggtatgaaggttttggatgtgggatgtggaattgggggacctttaatagaaatcgccagattcagctcaacatcgataactggactgaacaacaatgactaccacatctcaaggggcaaggagctcattttttcagcaggtttgagtgagcaatgctgcttcttgaagggggacttcatggacatgccaatatctgataacacctttgatgcggcctatgcaatacaggctacatgtcatgcaccagatgcacaaggcgtctatagtgaggtctaccgtgtgctgaaacctgggcagtattttgcactggatgaatggtgcttgaccgaccgatttgatcccaacaacgccaagcatttggccatcaaggctgagattgagctcggtgatggcctacctgacatccgtaccactcgccaatgtgtccaagctatgaaagatgcaggatttgaggtcgtttttgcaaaggatcttgctcaagtttttccttgcccgtggtaccgggtgatggatcccacctacttttcatgggctcacttccaatgcacacgcccaggacggatcgtcacccgtgcaattgtcaatacactagagttcctccgtattgccccagcaggcagcatgggagcctacaacgtcctgatgagtgcctctgatggccttctaaaaggtggccgggaaggtatcttcacagcgaccttcttcgtcctgggccgcaagcctctcaaggaagttgatatagtaagcctctcaaggaagttgatatagtgaacggcggcgtcctttgagctgcaagattagtatggggctgtactcataagagctatgaatcatggccaacgtgttctgtgctgaggtgtgtttactggattgtcttatgggttatggcccttgcgctgtgtgctggcctgctgggtcatgttcccgcagtagcctgtatctgcttgtcagcttgtgtgctgtgtactatgcactatctgaataaaaatgcagttttacgcattgttattaatcgcaccatttcttggcaacacgac

SEQ ID NO: 47438 - DNA, 1897 bp, Zea Mays
cgccgttgatcagggctgcctctgtcggaccactccacttcttgcttccagcaaccgttcgtctagccggcctgacgtcgcggcgcccaacacggcaacgcgcctttttcttccgcacgctgcgctggcccccttctcttggtaacttagccgtattgatatatgcactgatgactggccagaggcgacgatggagacggtctgctagttcaagttctacttccttccgcggccgcacgcgcgtcgttcgacgaattgccggagccagctgaaaatcgccggaggtgctctcggcggtcctggcctgattctctaccgacgcgagctgtggtcagtagccacgtctgtatatccacgtctagctggccatctttgcaccctccccacgtccatggaccctccaagaggtggagcttccacctccagtgaattagaagaacacagcagtggtagggtgccctggtgagcgctcatcatcctctgtgatgacgatgatgatgacaaaagagaggtcatttgttgctaagtcgagacggatgagtattgagtaggcggccttataggagcactaagatgttccgggcaaatttgtggcatttacacacatgctgttactgctgattcttctttaaaagccatggatgtatgtcaaataccacgacctccatggaggcaaacaagaatcaaggaagtcaaattacaccgatttggcaaacaagtactatgatcttgtcactggcttttacgaatatggatggggcgactcattccatcttgctggcggatatccgggtgagacttcccgtgaagccattaagcggcaccagcattttttggcactacaattggggctcaagaagggtatgaaggttttggatgtgggatgtggaattgggggacctttaatagaaatcgccagattcagctcaacatcgataactggactgaacaacaatgactaccacatctcaaggggcaaggagctcattttttcagcaggtttgagtgagcaatgctgcttcttgaagggggacttcatggacatgccaatatctgataacacctttgatgcggcctatgcaatacaggctacatgtcatgcaccagatgcacaaggcgtctatagtgaggtctaccgtgtgctgaaacctgggcagtattttgcactggatgaatggtgcttgaccgaccgatttgatcccaacaacgccaagcatttggccatcaaggctgagattgagctcggtgatggcctacctgacatccgtaccactcgccaatgtgtccaagctatgaaagatgcaggatttgaggtcgtttttgcaaaggatcttgctcaagtttttccttgcccgtggtaccgggtgatggatcccacctacttttcatgggctcacttccaatgcacacgcccaggacggatcgtcacccgtgcaattgtcaatacactagagttcctccgtattgccccagcaggcagcatgggagcctacaacgtcctgatgagtgcctctgatggccttctaaaaggtggccgggaaggtatcttcacagcgaccttcttcgtcctgggccgcaagcctctcaaggaagttgatatagtaagcctctcaaggaagttgatatagtgaacggcggcgtcctttgagctgcaagattagtatggggctgtactcataagagctatgaatcatggccaacgtgttctgtgctgaggtgtgtttactggattgtcttatgggttatggcccttgcgctgtgtgctggcctgctgggtcatgttcccgcagtagcctgtatctgcttgtcagcttgtgtgctgtgtactatgcactatctgaataaaaatgcagttttacgcattgttattaatcgcaccatttcttggcaacacgac

SEQ ID NO: 47439 - DNA, 1582 bp, Zea Mays
ttcttgcttccagcaaccgttcgtctagccggcctgacgtcgcggcgcccaacacggcaacgcgcctttttcttccgcacgctgcgctggcccccttctcttggtatgtcaaataccacgacctccatggaggcaaacaagaatcaaggaagtcaaattacaccgatttggcaaacaagtactatgatcttgtcactggcttttacgaatatggatggggcgactcattccatcttgctggcggatatccgggtgagacttcccgtgaagccattaagcggcaccagcattttttggcactacaattggggctcaagaagggtatgaaggttttggatgtgggatgtggaattgggggacctttaatagaaatcgccagattcaggcaatgatctgcaataatgtttcattgcccattcaatcaataaattccaacaataatgaagaacatacatacatatatatatatatgtgtgtgtgtgaattttcaattctgtttattgtagctcaacatcgataactggactgaacaacaatgactaccacatctcaaggggagctcattttttcagcaggtttgagtgagcaatgctgcttcttgaagggggacttcatggacatgccaatatctgataacacctttgatgcggcctatgcaatacaggctacatgtcatgcaccagatgcagtatgtctcgtgtcatacttgtgtccgagtcaaagttaaggtttcacaggaataccatagattcagtgtttgtttacgttttttttcttctaatccctggttaccgcagcaaggcgtctatagtgaggtctaccgtgtgctgaaacctgggcagtattttgcactggatgaatggtgcttgaccgaccgatttgatcccaacaacgccaagcatttggccatcaaggctgagattgagctcggtgatggcctacctgacatccgtaccactcgccaatgtgtccaagctatgaaagatgcaggatttgaggtcgtttttgcaaaggatcttgctcaagtttttccttgcccgtggtaccgggtgatggatcccacctacttttcatgggctcacttccaatgcacacgcccaggacggatcgtcacccgtgcaattgtcaatacactagagttcctccgtattgccccagcaggcagcatgggagcctacaacgtcctgatgagtgcctctgatggccttctaaaaggtggccgggaaggtatcttcacagcgaccttcttcgtcctgggccgcaagcctctcaaggaagttgatatagtaagcctctcaaggaagttgatatagtgaacggcggcgtcctttgagctgcaagattagtatggggctgtactcataagagctatgaatcatggccaacgtgttctgtgctgaggtgtgtttactggattgtcttatgggttatggcccttgcgctgtgtgctggcctgctgggtcatgttcccgcagtagcctgtatctgcttgtcagcttgtgtgctgtgtactatgcactatctgaataaaaatgcagttttacgcattgttattaatcgcaccatttcttggcaacacgac

SEQ ID NO: 47440 - DNA, 1975 bp, Zea Mays
ttcttgcttccagcaaccgttcgtctagccggcctgacgtcgcggcgcccaacacggcaacgcgcctttttcttccgcacgctgcgctggcccccttctcttggtaacttagccgtattgatatatgcactgatgactggccagaggcgacgatggagacggtctgctagttcaagttctacttccttccgcggccgcacgcgcgtcgttcgacgaattgccggagccagctgaaaatcgccggaggtgctctcggcggtcctggcctgattctctaccgacgcgagctgtggtcagtagccacgtctgtatatccacgtctagctggccatctttgcaccctccccacgtccatggaccctccaagaggtggagcttccacctccagtgaattagaagaacacagcagtggtgccctggtgagcgctcatcatcctctgtgatgacgatgatgatgacaaaagagaggtcatttgttgctaagtcgagacggatgagtattgagtaggcggccttataggagcactaagatgttccgggcaaatttgtggcatttacacacatgctgttactgctgattcttctttaaaagccatggatgtatgtcaaataccacgacctccatggaggcaaacaagaatcaaggaagtcaaattacaccgatttggcaaacaagtactatgatcttgtcactggcttttacgaatatggatggggcgactcattccatcttgctggcggatatccgggtgagacttcccgtgaagccattaagcggcaccagcattttttggcactacaattggggctcaagaagggtatgaaggttttggatgtgggatgtggaattgggggacctttaatagaaatcgccagattcaggcaatgatctgcaataatgtttcattgcccattcaatcaataaattccaacaataatgaagaacatacatacatatatatatatatgtgtgtgtgtgaattttcaattctgtttattgtagctcaacatcgataactggactgaacaacaatgactaccacatctcaaggggcaaggagctcattttttcagcaggtttgagtgagcaatgctgcttcttgaagggggacttcatggacatgccaatatctgataacacctttgatgcggcctatgcaatacaggctacatgtcatgcaccagatgcacaaggcgtctatagtgaggtctaccgtgtgctgaaacctgggcagtattttgcactggatgaatggtgcttgaccgaccgatttgatcccaacaacgccaagcatttggccatcaaggctgagattgagctcggtgatggcctacctgacatccgtaccactcgccaatgtgtccaagctatgaaagatgcaggatttgaggtcgtttttgcaaaggatcttgctcaagtttttccttgcccgtggtaccgggtgatggatcccacctacttttcatgggctcacttccaatgcacacgcccaggacggatcgtcacccgtgcaattgtcaatacactagagttcctccgtattgccccagcaggcagcatgggagcctacaacgtcctgatgagtgcctctgatggccttctaaaaggtggccgggaaggtatcttcacagcgaccttcttcgtcctgggccgcaagcctctcaaggaagttgatatagtaagcctctcaaggaagttgatatagtgaacggcggcgtcctttgagctgcaagattagtatggggctgtactcataagagctatgaatcatggccaacgtgttctgtgctgaggtgtgtttactggattgtcttatgggttatggcccttgcgctgtgtgctggcctgctgggtcatgttcccgcagtagcctgtatctgcttgtcagcttgtgtgctgtgtactatgcactatctgaataaaaatgcagttttacgcattgttattaatcgcaccatttcttggcaacacgac

SEQ ID NO: 47441 - DNA, 2354 bp, Zea Mays
atacctaaggtgaagtaatgccatacatccattcactcatttcacattcccacctagaaataacgctagacgaaaagcttatagctcgtttaactcaatccattggtggcttgacgagctggtatagtaaaaattacgattcgagtcgagttaggttatatttggaaccaatctagtttttaagaaactgtttttatgttttaattgcaaggacagtcctatccaagagactagggcgccaaacgaatcgttttttttttttactatagcagctcgtctggcaaaaaaaaaaaaaaaaactcctccaaatcacgagccgtccgtgcccaacccgacggccacagaccttccaagggcagagcggacccatccataccaggaggcggcggaggagagagcggctgcctcagcctgtctttcttgtgtgcactgcacccaccctgcctcagcttgggcttggctgcctcttcgtttcgccaggaacgcgtaggcgcagcgcagcagcccaggaagcaacacccagccgcctaatcccgcaacaactcgccctcttctacccccatcggctcctctgcatccgcataccggtggcctacaggtttgctggagtgcagtgcacgggcggtggagcagcaaatctgcaactgatggatcaggaggcgaaggactctaggccctcaaggtctcccagcgagccaaacctcttcctgcaatggggtagccgtaagaggctgcgatgtgtcaagacgcgtgatgacggctcaccatcgccgtcgccgtctcaaggtcttaggcgtgccataccccgttctactcggcccctccttggagcagacattgcagcatttcgttcaccgcggcgccctagcacccttaaccgcaggaaatccgatttgctggtgaatgagtacaagcacacgatggcgctatcgccagagaaggacaagtattacacaacgaggggttcaccatttccctttgaaggaaatgggtttgactttggtaccataacagaggataagggaaccacatcgttgccgagattcttcattgcattgtcaaacaaggagaaggaggaggacttcatggcgatgaagggctccaagctgccacagaggccaaagaagaggcccaagctgatgcagaagtgcttgcttatggtgagcccaggagcttggttatcagatctatctcatgagagatatgaagttagagagaagaagagttctaaaaagaaaagagaaatcgaaactccaggataaggaaacgagcctcaagaaagctgctgcaaaaggaagcaaagctgagcagaaggcgaagaaaaagcaggtagaggaagagatcacacgcctctcatctgagttagaggcgaaccatgctgcagagcttgcttcctttgggtacaaaccctctggtagctcagagaagggaaacctcgacaacttagtgaaggccatagccggtgtttcagtttccagcaattcggattcagcaaagctcagcaagggagcacgccggcgagagaagaaggcgaaggaggaagctgcccgagagcagcggatccaagaggaacaaagcaatctcgtgagcgaccgcatgctagaaaacgagaagctcgaaaggaagctcgagcccttggggctgaccgtccaagagataaagccggacgggcactgcctgtaccgagcagttgaaaaccagctgtcgctccactccaatggcgctgcacggtacagttaccaggacctacggcagatgacggccaagtacatgagggagcacgccgccaatttccttcccttctacttagcggaaggcaaggccgatgttggaccagatcccatggcgagcttcgagaggtactgcgaggagatggagtccaccgcagcttggggcgggcagctcgaactcggcgcgctgacccactgcctgaagaaacatatcgtcgtctactcaggctccttcccggacgtggagatgggtaaggagtacaaatctggacctggaggtagtggcgccggcggtgcgagcatcaggctgtcgttccacaggcacgcctatggtctcggcgagcactacaactcggtggttccagccggatcatcctagcaagagaaaggtggatgctctgatggcctctaatacttcttgatttgattgtttacgggtggcacttgtctgagtctgaaacacaataggccacttttctttttcccagttgctgtaatccctgtcatgagtagatgaaggttgagtgtaccaatcaaagctgtaccggggagtttgtttcccaaacaattttgctctcatcagttttatgtctgtggtttgatttgaagttgtgtgctgctact

SEQ ID NO: 47442 - DNA, 2361 bp, Zea Mays
atacctaaggtgaagtaatgccatacatccattcactcatttcacattcccacctagaaataacgctagacgaaaagcttatagctcgtttaactcaatccattggtggcttgacgagctggtatagtaaaaattacgattcgagtcgagttaggttatatttggaaccaatctagtttttaagaaactgtttttatgttttaattgcaaggacagtcctatccaagagactagggcgccaaacgaatcgttttttttttttactatagcagctcgtctggcaaaaaaaaaaaaaaaaactcctccaaatcacgagccgtccgtgcccaacccgacggccacagaccttccaagggcagagcggacccatccataccaggaggcggcggaggagagagcggctgcctcagcctgtctttcttgtgtgcactgcacccaccctgcctcagcttgggcttggctgcctcttcgtttcgccaggaacgcgtaggcgcagcgcagcagcccaggaagcaacacccagccgcctaatcccgcaacaactcgccctcttctacccccatcggctcctctgcatccgcataccggtggcctacaggtttgctggagtgcagtgcacgggcggtggagcagcaaatctgcaactgattcaggatggatcaggaggcgaaggactctaggccctcaaggtctcccagcgagccaaacctcttcctgcaatggggtagccgtaagaggctgcgatgtgtcaagacgcgtgatgacggctcaccatcgccgtcgccgtctcaaggtcttaggcgtgccataccccgttctactcggcccctccttggagcagacattgcagcatttcgttcaccgcggcgccctagcacccttaaccgcaggaaatccgatttgctggtgaatgagtacaagcacacgatggcgctatcgccagagaaggacaagtattacacaacgaggggttcaccatttccctttgaaggaaatgggtttgactttggtaccataacagaggataagggaaccacatcgttgccgagattcttcattgcattgtcaaacaaggagaaggaggaggacttcatggcgatgaagggctccaagctgccacagaggccaaagaagaggcccaagctgatgcagaagtgcttgcttatggtgagcccaggagcttggttatcagatctatctcatgagagatatgaagttagagagaagaagagttctaaaaagaaaagagaaatcgaaactccaggataaggaaacgagcctcaagaaagctgctgcaaaaggaagcaaagctgagcagaaggcgaagaaaaagcaggtagaggaagagatcacacgcctctcatctgagttagaggcgaaccatgctgcagagcttgcttcctttgggtacaaaccctctggtagctcagagaagggaaacctcgacaacttagtgaaggccatagccggtgtttcagtttccagcaattcggattcagcaaagctcagcaagggagcacgccggcgagagaagaaggcgaaggaggaagctgcccgagagcagcggatccaagaggaacaaagcaatctcgtgagcgaccgcatgctagaaaacgagaagctcgaaaggaagctcgagcccttggggctgaccgtccaagagataaagccggacgggcactgcctgtaccgagcagttgaaaaccagctgtcgctccactccaatggcgctgcacggtacagttaccaggacctacggcagatgacggccaagtacatgagggagcacgccgccaatttccttcccttctacttagcggaaggcaaggccgatgttggaccagatcccatggcgagcttcgagaggtactgcgaggagatggagtccaccgcagcttggggcgggcagctcgaactcggcgcgctgacccactgcctgaagaaacatatcgtcgtctactcaggctccttcccggacgtggagatgggtaaggagtacaaatctggacctggaggtagtggcgccggcggtgcgagcatcaggctgtcgttccacaggcacgcctatggtctcggcgagcactacaactcggtggttccagccggatcatcctagcaagagaaaggtggatgctctgatggcctctaatacttcttgatttgattgtttacgggtggcacttgtctgagtctgaaacacaataggccacttttctttttcccagttgctgtaatccctgtcatgagtagatgaaggttgagtgtaccaatcaaagctgtaccggggagtttgtttcccaaacaattttgctctcatcagttttatgtctgtggtttgatttgaagttgtgtgctgctact

SEQ ID NO: 47443 - DNA, 2117 bp, Zea Mays
atacctaaggtgaagtaatgccatacatccattcactcatttcacattcccacctagaaataacgctagacgaaaagcttatagctcgtttaactcaatccattggtggcttgacgagctggtatagtaaaaattacgattcgagtcgagttaggttatatttggaaccaatctagtttttaagaaactgtttttatgttttaattgcaaggacagtcctatccaagagactagggcgccaaacgaatcgttttttttttttactatagcagctcgtctggcaaaaaaaaaaaaaaaaactcctccaaatcacgagccgtccgtgcccaacccgacggccacagaccttccaagggcagagcggacccatccataccaggaggcggcggaggagagagcggctgcctcagcctgtctttcttgtgtgcactgcacccaccctgcctcagcttgggcttggctgcctcttcgtttcgccaggaacgcgtaggcgcagcgcagcagcccaggaagcaacacccagccgcctaatcccgcaacaactcgccctcttctacccccatcggctcctctgcatccgcataccggtggcctacaggtttgctggagtgcagtgcacgggcggtggagcagcaaatctgcaactgaaatccgatttgctggtgaatgagtacaagcacacgatggcgctatcgccagagaaggacaagtattacacaacgaggggttcaccatttccctttgaaggaaatgggtttgactttggtaccataacagaggataagggaaccacatcgttgccgagattcttcattgcattgtcaaacaaggagaaggaggaggacttcatggcgatgaagggctccaagctgccacagaggccaaagaagaggcccaagctgatgcagaagtgcttgcttatggtgagcccaggagcttggttatcagatctatctcatgagagatatgaagttagagagaagaagagttctaaaaagaaaagagaaatcgaaactccaggataaggaaacgagcctcaagaaagctgctgcaaaaggaagcaaagctgagcagaaggcgaagaaaaagcaggtagaggaagagatcacacgcctctcatctgagttagaggcgaaccatgctgcagagcttgcttcctttgggtacaaaccctctggtagctcagagaagggaaacctcgacaacttagtgaaggccatagccggtgtttcagtttccagcaattcggattcagcaaagctcagcaagggagcacgccggcgagagaagaaggcgaaggaggaagctgcccgagagcagcggatccaagaggaacaaagcaatctcgtgagcgaccgcatgctagaaaacgagaagctcgaaaggaagctcgagcccttggggctgaccgtccaagagataaagccggacgggcactgcctgtaccgagcagttgaaaaccagctgtcgctccactccaatggcgctgcacggtacagttaccaggacctacggcagatgacggccaagtacatgagggagcacgccgccaatttccttcccttctacttagcggaaggcaaggccgatgttggaccagatcccatggcgagcttcgagaggtactgcgaggagatggagtccaccgcagcttggggcgggcagctcgaactcggcgcgctgacccactgcctgaagaaacatatcgtcgtctactcaggctccttcccggacgtggagatgggtaaggagtacaaatctggacctggaggtagtggcgccggcggtgcgagcatcaggctgtcgttccacaggcacgcctatggtctcggcgagcactacaactcggtggttccagccggatcatcctagcaagagaaaggtggatgctctgatggcctctaatacttcttgatttgattgtttacgggtggcacttgtctgagtctgaaacacaataggccacttttctttttcccagttgctgtaatccctgtcatgagtagatgaaggttgagtgtaccaatcaaagctgtaccggggagtttgtttcccaaacaattttgctctcatcagttttatgtctgtggtttgatttgaagttgtgtgctgctact

SEQ ID NO: 47444 - DNA, 769 bp, Zea Mays
atgacatatttgatagcgggccgcaggctaagccattccttctaactgcaactgctgctcctctttgtctcccccgttccgttctccactgaactcctcgccctcgtcgacccgtgacccgtgagcctcttccactgccgccgtcgacgagagctgcgttagccgctaggtgatttcggctgcttccctcatggcgaccgcgctcaagtcgttcttgaacagccccgttggccccaagaccacccacttctggggccctgttgccaactggggcttcgtcgtcgcgggcttggttgacatgaacaagcctcctgaaatgatatctggcaacatgacagcagccatgtgcgtgtattctggactgttcatgaggtttgcatggatggtacagccccggaattatttgcttctagcatgccatgcttccaacgagagtgttcagctctatcagctgtctcgctgggctagggctcaggggtacctggagaagaaagagccagagacacaacagtaaagagggtatgcaacactgcagtgacttgttcctttagtgaccatgcagtatgccgaggagatttcatatacctagcgccgttacaagcttctgcttgcttacttttctgtgcatttggtttttacaatgcgttatgcaatgagtttcccccaaacacgcaatgagtttgggcactattttcgttttacctggctcatgtgcccatagtgctttgtaaaagaccagtcgttgcaaaattttggtccggtcctcggc

SEQ ID NO: 47445 - DNA, 633 bp, Zea Mays
atgacatatttgatagcgggccgcaggctaagccattccttctaactgcaactgctgctcctctttgtctcccccgttccgttctccactgaactcctcgccctcgtcgacccgtgacccgtgagcctcttccactgccgccgtcgacgagagctgcgttagccgctaggtgatttcggctgcttccctcatggcgaccgcgctcaagtcgttcttgaacagccccgttggccccaagaccacccacttctggggccctgttgccaactggggcttcgtcgtcgcgggcttggttgacatgaacaagcctcctgaaatgatatctggcaacatgacagcaggtacctggagaagaaagagccagagacacaacagtaaagagggtatgcaacactgcagtgacttgttcctttagtgaccatgcagtatgccgaggagatttcatatacctagcgccgttacaagcttctgcttgcttacttttctgtgcatttggtttttacaatgcgttatgcaatgagtttcccccaaacacgcaatgagtttgggcactattttcgttttacctggctcatgtgcccatagtgctttgtaaaagaccagtcgttgcaaaattttggtccggtcctcggc

SEQ ID NO: 47446 - DNA, 858 bp, Zea Mays
atgacatatttgatagcgggccgcaggctaagccattccttctaactgcaactgctgctcctctttgtctcccccgttccgttctccactgaactcctcgccctcgtcgacccgtgacccgtgagcctcttccactgccgccgtcgacgagagctgcgttagccgctagggacaggtgatttcggctgcttccctcatggcgaccgcgctcaagtcgttcttgaacagccccgttggccccaagaccacccacttctggggccctgttgccaactggggcttcgtcgtcgcgggcttggttgacatgaacaagcctcctgaaatgatatctggcaacatgacagcagccatgtgcgtgtattctggactgttcatgaggtttgcatggatggtacagccccggaattatttgcttctagcatgccatgcttccaacgagagtgttcagctctatcagctgtctcgctgggctagggctcaggggtacctggagaagaaagagccagagacacaacagtaaagagggagaagttttattcctttatcttcgggttagttacttcatgtggatgacttgaagcttagaaggtttttatatatctcttatggaaaggcttcacccttccaattattgtaataagttatgcacttcgagtactatcaggacttgtaataaatacatctcattctaccatgtaaaacttgagttctggaatgtaaagtgtactttgtaaaagtcttccgctctatctccaatgtgtgtgtatcaaatgtgattactgtaatatacctgttatgtgggagatccttgggatgatgagttccagttggcgaactcgatagccttgttaagttacc

SEQ ID NO: 47447 - DNA, 1833 bp, Zea Mays
atgacatatttgatagcgggccgcaggctaagccattccttctaactgcaactgctgctcctctttgtctcccccgttccgttctccactgaactcctcgccctcgtcgacccgtgacccgtgagcctcttccactgccgccgtcgacgagagctgcgttagccgctagggacaggtgatttcggctgcttccctcatggcgaccgcgctcaagtcgttcttgaacagccccgttggccccaagaccacccacttctggggccctgttgccaactggggcttcgtcgtcgcgggcttggttgacatgaacaagcctcctgaaatgatatctggcaacatgacagcagccatgtgcgtgtattctggactgttcatgaggtttgcatggatggtacagccccggaattatttgcttctagcatgccatgcttccaacgagagtgttcagctctatcagctgtctcgctgggctagggctcaggggtacctggagaagaaagagccagagacacaacagtaaagagggatatggtgtcagcccctcggccatgctctccacccattagaagagtgacggctacagaagatgagaaggaaaatgccatggaatatgggctaccgtcatcgcatgctctcaacactgtttgtttgacgggatatttgttacattatgtcctcacatacggagaacatggcagtcttacagttgctgcgggtttatctctagctctcttacttgttatgctagttggcattgcgaggatatatctgggtatgcacagcttgaccgacgttgtcgctggaattggtttcggcatcgtcatcctcgcattctggctggctgttcatgaccatgtcgacgcctttgttgtctccgggcaaaacgttgcaaccttctgggcaggccttgctctactgatgtgctttgcgtatcccaagccagaattccctaccccgagctttgaattccacacagcattcaacggggtcgctttcggaatcgtgtacggcatccagcaaacctacttccacttccacgcccccgacgcgccgatcgtcttcagcgccgagctgcccttcctcgcgttcgcggggcgcgtcctcgtcgggatcccgaccatcctggccgtgaaatcgtgcagcaaggcgctctccaggtggctgctgcccgtgatgtgcagcaccctgggcatccccatcgtgtcgtcctgctacgtccccgccctgaaaatcgacggcggcagcagcaagagcaggcaggccgccggcgggcacctccagcgccttctctctcacttcccccagaaggcgtacgacgtggacaccggcatcaggttcgtccagtacgccagcctcgcgtggtccgtggttgacttggtgccggccatcttcgcccatttggatttgtagccagctacttaaaatttcagtttcgtttttttttctggaggtctcaataaggccctcctactcgtaagacatgtgtcatcttatgaggctgtaaatccgatgatctggccctttcttctttttttgtattgtattgtgtgtatgaatggacgaatggttccctagctgttttcatcagggtgttcagtaagtagaaatcagtggtacatttcttattctttaaattagatatggttattgtcttatatactaggttagagagggtattgatttgtagctatgagactatcgatattgttcggttccatgataagcaccactaagggtctatttggttttgctagaaaaaaagttgaaacaaacacaacttgcactggactggattatcttattcttggcatcgaagaaatgccttttcttgcc

SEQ ID NO: 47448 - DNA, 1904 bp, Zea Mays
ctgccacgaaatggacacacgcgcgcacgtaaaaacgaaaaaaggtccccggccgagaccgagagccgcggtccagagcggggggcggccggcaaggacgaaacggcccaacgccaccacctccaccacctcgtcctcgatcgacacctcccccgtcgccgtcccgtgactccccgtccagccgtccaggcccagctgcccccgcgacccagacgaccacgtccgcctcggcctgcgcctccccgctacaagagtccgtccgcccgccagcgctgcggtgccagcgagcccctccctcctccactctctgcggcgcggagatcccgtcctttctctgtgcccccggtaccgcgaggagccactgccaggcgccggcgtttttggaactgggcatggaggcggcggcggcgtcggcggcggcggtcgggggttcgggcgctggactgaccaggtggcaggcggcggcgcttgcggcgctggccggctgggtgtgggcggcctccttctacgacctcacgcgccgggcgcgcgcgctcgtccagccgtgggtcacgcgccgggtgcacgccgagacgccggccatcctcaggttccaggatatggtgtcagcccctcggccatgctctccacccattagaagagtgacggctacagaagatgagaaggaaaatgccatggaatatgggctaccgtcatcgcatgctctcaacactgtttgtttgacgggatatttgttacattatgtcctcacatacggagaacatggcagtcttacagttgctgcgggtttatctctagctctcttacttgttatgctagttggcattgcgaggatatatctgggtatgcacagcttgaccgacgttgtcgctggaattggtttcggcatcgtcatcctcgcattctggctggctgttcatgaccatgtcgacgcctttgttgtctccgggcaaaacgttgcaaccttctgggcaggccttgctctactgatgtgctttgcgtatcccaagccagaattccctaccccgagctttgaattccacacagcattcaacggggtcgctttcggaatcgtgtacggcatccagcaaacctacttccacttccacgcccccgacgcgccgatcgtcttcagcgccgagctgcccttcctcgcgttcgcggggcgcgtcctcgtcgggatcccgaccatcctggccgtgaaatcgtgcagcaaggcgctctccaggtggctgctgcccgtgatgtgcagcaccctgggcatccccatcgtgtcgtcctgctacgtccccgccctgaaaatcgacggcggcagcagcaagagcaggcaggccgccggcgggcacctccagcgccttctctctcacttcccccagaaggcgtacgacgtggacaccggcatcaggttcgtccagtacgccagcctcgcgtggtccgtggttgacttggtgccggccatcttcgcccatttggatttgtagccagctacttaaaatttcagtttcgtttttttttctggaggtctcaataaggccctcctactcgtaagacatgtgtcatcttatgaggctgtaaatccgatgatctggccctttcttctttttttgtattgtattgtgtgtatgaatggacgaatggttccctagctgttttcatcagggtgttcagtaagtagaaatcagtggtacatttcttattctttaaattagatatggttattgtcttatatactaggttagagagggtattgatttgtagctatgagactatcgatattgttcggttccatgataagcaccactaagggtctatttggttttgctagaaaaaaagttgaaacaaacacaacttgcactggactggattatcttattcttggcatcgaagaaatgccttttcttgcc

SEQ ID NO: 47449 - DNA, 439 bp, Zea Mays
ggtacagcgactcagcggcccagtcccacaggcggagagcgtagagtcgctcagccacagaccctagcctcctcagcgcccgccgcccagtcctcaaccactgctcgcctgctcctatggcgcgagcgcgactgctcttgctcggctgctgctcctggcctatatgcactccgctgtcagttgcctagacccctaaggcggaggccccgacgggcaacggctggccagcgtcggactccattgcatgccacactatgttctgcaacttctcccaaccagagttgtagagcaggcgcaagttcccatgtgtgtttgttgccatagtgcttcgtgtgaagttggttaaactagaccattatgtggccgcatttttctagattataaacatgttaatatgtattctgtgttgtatggttcttgagaccgggagaattgggaa

SEQ ID NO: 47450 - DNA, 2572 bp, Zea Mays
acctggaacacacgcaccgtcccaagttaacctctcgtgctcgggcactttctttttccttcccccctgtgcgctcggccgcctccgccgctgcctcgctccctccgcgcccaccacggaggcgcacgcgcgggcgcagcgtccctcgcgtgcctcgccttccgcactgctctgtccgcccgcctggctcctgcctcctcctcctcctcctcctctagggttagggcacgcgtcgcgggggcccgtggcgcccggcgcaatgcggaggccgtcgggggccggcgtgccgagccgccgccgccgcgcgatccaggtgctcgtggcggtctccctcgcctacgcggtcgccgtgctgctcctcgagtcgcccctcgtgtccacgtcgctgcccggggcgggggcgtccgccgcggcgtcgcggaagctccacctcgacggcgcgtgggagggcgcgggacgagcagcgccggcgcgccccgcgaagcacccgcacagggagaccctctcggcggacgcggggcggggacgggcgcgccggttggcggggatcgtctctggcctcgagctccgccacctcaactccacccgctccggctcgctccgcaaggtcgccgcggaggccgccgagtcaggggcccgcgtgttctccgacctggaggctctagcgacggccttgactttctcgggcgattcgtcaggggaggaggaggagaagagcaagtgcccgcactcgatcgtcctcagcggcgacgagttccgggagagggggcgggcggtggagctgccgtgcgggctcacgctgggttcgtatatcacggtcgccgcgacgccgcacgaggcgcaccctgagcgggatcctaagatcacgctgctcagggagggggaagagccgatcatggtgtcgcagttcatgatggagctgcaggggctcaagacggtggacggcgaggatccgcccaggattctccacttcaacccccgcctccgcggcgactggagcggcaagccggtgatcgagcagaacacctgctaccgcatgcagtggggcactccgctccgctgcgatggctggaggtcccgtgccgacgaggagactgtggatgggttggccaagtgtgagaagtggattcgggatgatgaagggcggtccgaggagtcgaaaacatcatggtggctgaaccggctcattggccgtacgaagaccgtctccgttgattggccatacccattcgtggagaaccacctgtttgttctaactctcactgctggattggaaggttaccatgtgaatgttgatggacggcatgtgacatcatttccataccgcactggatttgttcttgaggatgctactggcttatcattgaatggggacctggatgtgcaatcagtgttcgcggggactctgcccactacacatcctagcttttctccacagaaacatctagagttgttacccagttggcaggcccctccccttccagacgaaccagttgagattttcatcggtatcctgtcagcaggcaaccattttgctgagcgtatggctgcaagaaagacatggatgtctgctgctcagaagtcgtcgaatgttgtggcccgtttttttgttgccctgcatggcagaaatgaggttaatgtggagctgaaaaaagaggctgagttttttggtgacattgttattgtcccattcatggatagctatgatttggttgttctcaagacaattgccatatgcgagtatggggtccatgttgtatctgctagatacataatgaagtgtgatgatgatacttttgttagacttgattcagtaatggctgaagtgaagaaaatccagaatggtgaaagtctctatatagggaacatgaattatcaccacaagccattacgtgatgggaaatgggctgttacttacgaggaatggccagaagaggattatcccatctatgcaaatggtcctggatatgttatatcctctgatattgcaggttccattctatcggaatttttaaagcataaattaaggcttttcaaaatggaggatgtgagcatgggcatgtgggtagagcggttcaacaacaccagacttgttaaatatgtccacagcatcaaattttgtcaatttggatgcatagatgattattacactgcacactaccaatcaccaaggcagatgttgtgtttgtgggacaaactgcaggctggaaaagcccaatgctgcaatatgagatagcaagaatggatgtggtggtactgctgaccaggtggtgtttgagctggaaatggaaacaaggggaacagacagcagcctgtaacgcctttccctcttcttttctcaacgtatagaccgagttctttgagcagtatgagacctgcttggggacttgatttgtaaatggaacggttagaaagcttagttaaataactgttactttttggcaccattggctgtggttgctgtcagacaacccagctggtacacatgagcgatcttggtggacaagaattttgctgtgtaacttctcttaacatggtcataatttatgatttgatcagttggtggatgtat

SEQ ID NO: 47451 - DNA, 1830 bp, Zea Mays
cgtttcctgactcctggtctccctacgcaattccagtgggcgccgccgccgaccgaatccaggtagagaatataagaaaccgtcacgaccgcctccgccgtgctcttccatccgttccatggcgccgccgctcgccctgctccttctcgccgccatcgtgctctcgcgggccgtctcccacgcccacggcggcggcggcggcttctacgacccggcgagcgtcactcagctctcctcgcgccccagggcgttcctgtacagcggcttcctctcggacaccgagtgcgaccacctcgtcagcctggcgaaaggcagcatggagaagtcgatggtggcggataacgactccgggaagagtgtggcgagccaggcgcgcaccagctccggcaccttcttggccaagcgcgaggatgagatcgtgtctgcgattgagaaacgcgtagctgcttggacatttctcccggaagaaaacgccgaatcactccaggtcctgcgctacgaaaccggccagaagtatgacgcccacttcgactatttccacgacagaaacaacctgaagctcggcggccagcgagttgcgaccgtccttatgtacctcacagatgtcaacaagggtggagagactgtatttccaaacgctgagggaagccatttacagtacaaggacgaaacttggtcggagtgttcaagatctggcctggcagtgaagccaaagaaaggagacgcgctactgttcttcaacctccacgtcaacgccacagccgatacaggcagtctccacgggagctgcccggtgatcgagggcgagaaatggtcggcgacgaaatggatccacgtcaggtcgttcgacaaccccccagacgtgaggacggacgcgccgtgctccgacgacaaggagctctgccctagatgggctgctatcggggagtgccacaggaacccgacgtacatggttgggaccaaagacactctcgggttttgccgcaagagctgcgggatctgtgatgcttgaacgtgcatgttttgggggtagattttgatcccatcatgttttcactctctctgctcataacagatgaatcagtaacctagtgtaatgcgaatttcggtacagtcgcctccattggactgtttcgtccaccagatgttctaatactaatgatctaatcatcctttaccaacatgttagtccactaattgtcgcaattacaaaaaaaaaaacaaatatagagcttccacatgtggcgacgtgttcctcccatacatcttggcccacaccattgggcccctatccgtcggcctgctagcccgcagatgttcagctgctagccaggcaggggacggtccttctccccctgggcctgggcccttacgagacgccgggtcggcgttttcatcgctcgatgctgactgtggggggatggttgtggaatcaaaatcgtagacttattattatcttggtggcgccaaatcaaaatccttcgcgacgacttcgcagcaatagagagcgacagagcggggcctgcttgccttcttttccgccgccaccgtcgcgcctttggtccccgtgctcttcttctccggtggcaaccggcaagatatcaattctcgagacctacttgcagtccagagcggttgtcagaacctgacctccattatcttttttgtgtggaatctatgtttttttttgcttgcagtgaaatcggtgtagggttatagtaatctttatatgatctacaactaaggtatagatgaactaatgtttagtttaactaaaatttagataggatggttttagtcaggtgtgtttatatacatggactaaaactg

SEQ ID NO: 47452 - DNA, 1621 bp, Zea Mays
cgcaattccagtgggcgccgccgccgaccgaatccagggcgttcctgtacagcggcttcctctcggacaccgagtgcgaccacctcgtcagcctggcgaaaggcagcatggagaagtcgatggtggcggataacgactccgggaagagtgtggcgagccaggcgcgcaccagctccggcaccttcttggccaagcgcgaggatgagatcgtgtctgcgattgagaaacgcgtagctgcttggacatttctcccggaagaaaacgccgaatcactccaggtcctgcgctacgaaaccggccagaagtatgacgcccacttcgactatttccacgacagaaacaacctgaagctcggcggccagcgagttgcgaccgtccttatgtacctcacagatgtcaacaagggtggagagactgtatttccaaacgctgagggaagccatttacagtacaaggacgaaacttggtcggagtgttcaagatctggcctggcagtgaagccaaagaaaggagacgcgctactgttcttcaacctccacgtcaacgccacagccgatacaggcagtctccacgggagctgcccggtgatcgagggcgagaaatggtcggcgacgaaatggatccacgtcaggtcgttcgacaaccccccagacgtgaggacggacgcgccgtgctccgacgacaaggagctctgccctagatgggctgctatcggggagtgccacaggaacccgacgtacatggttgggaccaaagacactctcgggttttgccgcaagagctgcgggatctgtgatgcttgaacgtgcatgttttgggggtagattttgatcccatcatgttttcactctctctgctcataacagatgaatcagtaacctagtgtaatgcgaatttcggtacagtcgcctccattggactgtttcgtccaccagatgttctaatactaatgatctaatcatcctttaccaacatgttagtccactaattgtcgcaattacaaaaaaaaaaacaaatatagagcttccacatgtggcgacgtgttcctcccatacatcttggcccacaccattgggcccctatccgtcggcctgctagcccgcagatgttcagctgctagccaggcaggggacggtccttctccccctgggcctgggcccttacgagacgccgggtcggcgttttcatcgctcgatgctgactgtggggggatggttgtggaatcaaaatcgtagacttattattatcttggtggcgccaaatcaaaatccttcgcgacgacttcgcagcaatagagagcgacagagcggggcctgcttgccttcttttccgccgccaccgtcgcgcctttggtccccgtgctcttcttctccggtggcaaccggcaagatatcaattctcgagacctacttgcagtccagagcggttgtcagaacctgacctccattatcttttttgtgtggaatctatgtttttttttgcttgcagtgaaatcggtgtagggttatagtaatctttatatgatctacaactaaggtatagatgaactaatgtttagtttaactaaaatttagataggatggttttagtcaggtgtgtttatatacatggactaaaactg

SEQ ID NO: 47453 - DNA, 1801 bp, Zea Mays
cgcaattccagtgggcgccgccgccgaccgaatccaggtagagaatataagaaaccgtcacgaccgcctccgccgtgctcttccatccgttccatggcgccgccgctcgccctgctccttctcgccgccatcgtgctctcgcgggccgtctcccacgcccacggcggcggcggcggcttctacgacccggcgagcgtcactcagctctcctcgcgccccagggcgttcctgtacagcggcttcctctcggacaccgagtgcgaccacctcgtcagcctggcgaaaggcagcatggagaagtcgatggtggcggataacgactccgggaagagtgtggcgagccaggcgcgcaccagctccggcaccttcttggccaagcgcgaggatgagatcgtgtctgcgattgagaaacgcgtagctgcttggacatttctcccggaagaaaacgccgaatcactccaggtcctgcgctacgaaaccggccagaagtatgacgcccacttcgactatttccacgacagaaacaacctgaagctcggcggccagcgagttgcgaccgtccttatgtacctcacagatgtcaacaagggtggagagactgtatttccaaacgctgagggaagccatttacagtacaaggacgaaacttggtcggagtgttcaagatctggcctgtgaagccaaagaaaggagacgcgctactgttcttcaacctccacgtcaacgccacagccgatacaggcagtctccacgggagctgcccggtgatcgagggcgagaaatggtcggcgacgaaatggatccacgtcaggtcgttcgacaaccccccagacgtgaggacggacgcgccgtgctccgacgacaaggagctctgccctagatgggctgctatcggggagtgccacaggaacccgacgtacatggttgggaccaaagacactctcgggttttgccgcaagagctgcgggatctgtgatgcttgaacgtgcatgttttgggggtagattttgatcccatcatgttttcactctctctgctcataacagatgaatcagtaacctagtgtaatgcgaatttcggtacagtcgcctccattggactgtttcgtccaccagatgttctaatactaatgatctaatcatcctttaccaacatgttagtccactaattgtcgcaattacaaaaaaaaaaacaaatatagagcttccacatgtggcgacgtgttcctcccatacatcttggcccacaccattgggcccctatccgtcggcctgctagcccgcagatgttcagctgctagccaggcaggggacggtccttctccccctgggcctgggcccttacgagacgccgggtcggcgttttcatcgctcgatgctgactgtggggggatggttgtggaatcaaaatcgtagacttattattatcttggtggcgccaaatcaaaatccttcgcgacgacttcgcagcaatagagagcgacagagcggggcctgcttgccttcttttccgccgccaccgtcgcgcctttggtccccgtgctcttcttctccggtggcaaccggcaagatatcaattctcgagacctacttgcagtccagagcggttgtcagaacctgacctccattatcttttttgtgtggaatctatgtttttttttgcttgcagtgaaatcggtgtagggttatagtaatctttatatgatctacaactaaggtatagatgaactaatgtttagtttaactaaaatttagataggatggttttagtcaggtgtgtttatatacatggactaaaactg

SEQ ID NO: 47454 - DNA, 791 bp, Zea Mays
ttttacccttctctagttctcttcacaagaagaagcgagggattgaaagggaaaggcaggaaaacaacatggcataacccaaaaaaagcaaagtgcaacaaaaagcaagcatggctcagcagcttgctttggttctactctcccccctcggcctcggcctcggcccctcaaaagcacagcagaatcggccaaagcaaaagaatgcccccagaggcggccaggaacagaacaagaagcaagaatactgagtaccgcagcagcgactgactgacacaaatcctgctgctacagtgctacttcctccccacacacacacattataatatgcagtcacgttgcgcggccgcagcagcgctgcatcgcattagcgccaccctagtccccatgcccgtgagaggaagctcttagaaggccagcgctgtcgccaggagagagagagagagagaggaggaggaggaggaggaggaagccacgacggcggaagacgacgcagcgcggcggcgaccggcgggtgtcatggcaaggtcggccgtggccgtgaggcgggcggcattggccatcgtgttcggagggcttctcctgatgtcgttggttatggacgacgtcaagaaagcggcgatcggcgggaggaggatgctggccagaggcgacggacgagggcagagcactctggaggatttccaggctgctgatgttcccttccaggacagcaagagaagggtgcccaacggtcctgatcctatccacaacaggggaaccggcaaatcaggacggtcgccgggccgagcgtg

SEQ ID NO: 47455 - DNA, 2498 bp, Zea Mays
cttcactcgtgccgccatcgccgtcgacatcaacccattccctccttgagatcatagcgtaagcacaagttatatgttagaaaaaaaaagaaagtcacccgaaaaagaagtacataggccacatctttcgttggccgggccgcgttgggcatggccgcatgggcctgcaagactgacggcgcggccgcgcgggaggttgagaagccacggtgagaccactgccgttaataccgaacctctcgcgccgttacccgctggtcctaaaaccctagcgaaggcgagccttccacttccctcaacctgccgccgccaccgccaccgccgccgccatgtgcccagcagcggcgaccacgagctccgccaagccgtcgaagaagcggaaacagcccgtcatagcgccgccggagtcggactctgaggaggaatctgtctacgacactgcctccgacgatgacgaggaggaagaggagacgcaggagttagagagtgaggatgtagacgaggaggtggaggaggggagcgagggcggcgaggaaaatgaaattggtgacgatagcgaggtggaagaagaggaggtgaaggagaaaaaagaaaaggaggagacggtgaaggagaaaaaggaaaagaaggacatgaagcaagagggaaagaaggcgaagaagcaagaggaaaagaaggcgaagaaggacaagaaggaagaggaaaaaaaggtgatggaggacaagaaagaagaggaaaagaaggcgaagaagaagagcgaggggagtggaatcctgtctaacaagctcttctcggagctccccctctctgagctcactgccaaggccatcagagagatgaactacacccacctcacccagattcaagctagatcaataccacatctgttggaggggaatgatgtgatgggcgcagccaagactggctctgggaagactcttgcattccttataccagcgattgagatgctatatcacacacacttctcaccgaggaatgggactggagctattgtggtttgcccgacacgggaacttgctatccagacacacaatgttgccaaggagttaatgaaatatcactcacaaactctcagatatgtcattggtggtaataatcgaagaagtgaggctgatcagcttgcaaaggggatcaatttattagttgctaccccaggcaggcttttggaccatctacaaaataccaagagtttcatatacagaaggctaaaatgccttgtcattgatgaagccgatcgcatacttgagcaaaactttgaggaagacatgaaacaaatatttaaacgccttccccagaataggcagactgttcttttttctgctacacaaactccagaggttgaaaaatttgctaaactgtcatttgagaaaaatgaagaaagtaaaaaaaaacctgtttatgttggagttgatgatgataagtcaaaggctactgttgaaggcctgcagcagggttattgtgtcatttctagcgataaaaggttcttggttctgtatgctttcctaagaaagaagcggaataagaagataatggtgttcttctcatcatgtaattcagtaaagttccacgctgaacttctgaatttccttgggatagagtgttctgatatccatggaaaacagaagcaacagaagcgaactactacattctttagcttttgcaaggcagaaaagggcatcttattgtgcactaatgtggctgcccgtggacttgatattcctgacgtggattatatcttgcaatatgaccctccagatgaaccaaaggattacattcacagagttggtcgtaccgcacgtggtgagaaaggcaaaggaagtgcattgctgttcttactaccagaagaactgaagtttctaatttacctgaaggcggccaaggttaccctgacggaatatgagttcaatcagaagaatgtgccaaatttgcaatcgcagcttgagaatattgttggtgagaattactttctgaaccagtctgccaaagaagcctacagatcctacgttttggcatatgactctcactctatgaaagacatttttaatgtccatcaacttgatctaaagtagctgcgtcattcggtttcaagaatcccccgaaagtgaacctggacctggatagcagtgcggcgaagcatcggaagaagatgaggagagtagacggtgggaagaggcatggcatcagcgcttcgaacccgtacgggaggaaggacaaaggcggtgccggcgataaacgacagttggcgagattctagaaaggaaggaagagcaggagcgtttcactattgttgtgttcgtaccagggctttgattgatgttacctggcttgggaaaaatcttgacaggccactaagattggctataaattttgggttgtcttgatatatttggtgtgtaacgcaatcagcctgctcgatgcgaaaattggattattgctttatagtacttgtggtttccaacccgaggaaagttggtgct

SEQ ID NO: 47456 - DNA, 2301 bp, Zea Mays
gaggttgagaagccacggtgagaccactgccgttaataccgaacctctcgcgccgttacccgctggtcctaaaaccctagcgaaggcgagccttccacttccctcaacctgccgccgccaccgccaccgccgccgccatgtgcccagcagcggcgaccacgagctccgccaagccgtcgaagaagcggaaacagcccgtcatagcgccgccggagtcggactctgaggaggaatctgtctacgacactgcctccgacgatgacgaggaggaagaggagacgcaggagttagagagtgaggatgtagacgaggaggtggaggaggggagcgagggcggcgaggaaaatgaaattggtgacgatagcgaggtggaagaagaggaggtgaaggagaaaaaagaaaaggaggagacggtgaaggagaaaaaggaaaagaaggacatgaagcaagagggaaagaaggcgaagaagcaagaggaaaagaaggcgaagaaggacaagaaggaagaggaaaaaaaggtgatggaggacaagaaagaagaggaaaagaaggcgaagaagaagagcgaggggagtggaatcctgtctaacaagctcttctcggagctccccctctctgagctcactgccaaggccatcagagagatgaactacacccacctcacccagattcaagctagatcaataccacatctgttggaggggaatgatgtgatgggcgcagccaagactggctctgggaagactcttgcattccttataccagcgattgagatgctatatcacacacacttctcaccgaggaatgggactggagctattgtggtttgcccgacacgggaacttgctatccagacacacaatgttgccaaggagttaatgaaatatcactcacaaactctcagatatgtcattggtggtaataatcgaagaagtgaggctgatcagcttgcaaaggggatcaatttattagttgctaccccaggcaggcttttggaccatctacaaaataccaagagtttcatatacagaaggctaaaatgccttgtcattgatgaagccgatcgcatacttgagcaaaactttgaggaagacatgaaacaaatatttaaacgccttccccagaataggcagactgttcttttttctgctacacaaactccagaggttgaaaaatttgctaaactgtcatttgagaaaaatgaagaaagtaaaaaaaaacctgtttatgttggagttgatgatgataagtcaaaggctactgttgaaggcctgcagcagggttattgtgtcatttctagcgataaaaggttcttggttctgtatgctttcctaagaaagaagcggaataagaagataatggtgttcttctcatcatgtaattcagtaaagttccacgctgaacttctgaatttccttgggatagagtgttctgatatccatggaaaacagaagcaacagaagcgaactactacattctttagcttttgcaaggcagaaaagggcatcttattgtgcactaatgtggctgcccgtggacttgatattcctgacgtggattatatcttgcaatatgaccctccagatgaaccaaaggattacattcacagagttggtcgtaccgcacgtggtgagaaaggcaaaggaagtgcattgctgttcttactaccagaagaactgaagtttctaatttacctgaaggttaccctgacggaatatgagttcaatcagaagaatgtgccaaatttgcaatcgcagcttgagaatattgttggtgagaattactttctgaaccagtctgccaaagaagcctacagatcctacgttttggcatatgactctcactctatgaaagacatttttaatgtccatcaacttgatctgcagaaagtagctgcgtcattcggtttcaagaatcccccgaaagtgaacctggacctggatagcagtgcggcgaagcatcggaagaagatgaggagagtagacggtgggaagaggcatggcatcagcgcttcgaacccgtacgggaggaaggacaaaggcggtgccggcgataaacgacagttggcgagattctagaaaggaaggaagagcaggagcgtttcactattgttgtgttcgtaccagggctttgattgatgttacctggcttgggaaaaatcttgacaggccactaagattggctataaattttgggttgtcttgatatatttggtgtgtaacgcaatcagcctgctcgatgcgaaaattggattattgctttatagtacttgtggtttccaacccgaggaaagttggtgct

SEQ ID NO: 47457 - DNA, 2285 bp, Zea Mays
ggtgagaccactgccgttaataccgaacctctcgcgccgttacccgctggtcctaaaaccctagcgaaggcgagccttccacttccctcaacctgccgccgccaccgccaccgccgccgccatgtgcccagcagcggcgaccacgagctccgccaagccgtcgaagaagcggaaacagcccgtcatagcgccgccggagtcggactctgaggaggaatctgtctacgacactgcctccgacgatgacgaggaggaagaggagacgcaggagttagagagtgaggatgtagacgaggaggtggaggaggggagcgagggcggcgaggaaaatgaaattggtgacgatagcgaggtggaagaagaggaggtgaaggagaaaaaagaaaaggaggagacggtgaaggagaaaaaggaaaagaaggacatgaagcaagagggaaagaaggcgaagaagcaagaggaaaagaaggcgaagaaggacaagaaggaagaggaaaaaaaggtgatggaggacaagaaagaagaggaaaagaaggcgaagaagaagagcgaggggagtggaatcctgtctaacaagctcttctcggagctccccctctctgagctcactgccaaggccatcagagagatgaactacacccacctcacccagattcaagctagatcaataccacatctgttggaggggaatgatgtgatgggcgcagccaagactggctctgggaagactcttgcattccttataccagcgattgagatgctatatcacacacacttctcaccgaggaatgggactggagctattgtggtttgcccgacacgggaacttgctatccagacacacaatgttgccaaggagttaatgaaatatcactcacaaactctcagatatgtcattggtggtaataatcgaagaagtgaggctgatcagcttgcaaaggggatcaatttattagttgctaccccaggcaggcttttggaccatctacaaaataccaagagtttcatatacagaaggctaaaatgccttgtcattgatgaagccgatcgcatacttgagcaaaactttgaggaagacatgaaacaaatatttaaacgccttccccagactgttcttttttctgctacacaaactccagaggttgaaaaatttgctaaactgtcatttgagaaaaatgaagaaagtaaaaaaaaacctgtttatgttggagttgatgatgataagtcaaaggctactgttgaaggcctgcagcagggttattgtgtcatttctagcgataaaaggttcttggttctgtatgctttcctaagaaagaagcggaataagaagataatggtgttcttctcatcatgtaattcagtaaagttccacgctgaacttctgaatttccttgggatagagtgttctgatatccatggaaaacagaagcaacagaagcgaactactacattctttagcttttgcaaggcagaaaagggcatcttattgtgcactaatgtggctgcccgtggacttgatattcctgacgtggattatatcttgcaatatgaccctccagatgaaccaaaggattacattcacagagttggtcgtaccgcacgtggtgagaaaggcaaaggaagtgcattgctgttcttactaccagaagaactgaagtttctaatttacctgaaggcggccaaggttaccctgacggaatatgagttcaatcagaagaatgtgccaaatttgcaatcgcagcttgagaatattgttggtgagaattactttctgaaccagtctgccaaagaagcctacagatcctacgttttggcatatgactctcactctatgaaagacatttttaatgtccatcaacttgatctgcagaaagtagctgcgtcattcggtttcaagaatcccccgaaagtgaacctggacctggatagcagtgcggcgaagcatcggaagaagatgaggagagtagacggtgggaagaggcatggcatcagcgcttcgaacccgtacgggaggaaggacaaaggcggtgccggcgataaacgacagttggcgagattctagaaaggaaggaagagcaggagcgtttcactattgttgtgttcgtaccagggctttgattgatgttacctggcttgggaaaaatcttgacaggccactaagattggctataaattttgggttgtcttgatatatttggtgtgtaacgcaatcagcctgctcgatgcgaaaattggattattgctttatagtacttgtggtttccaacccgaggaaagttggtgct

SEQ ID NO: 47458 - DNA, 2359 bp, Zea Mays
ccactgccgttaataccgaacctctcgcgccgttacccgctggtcctaaaaccctagcgaaggcgagccttccacttccctcaacctgccgccgccaccgccaccgccgccgccatgtgcccagcagcggcgaccacgagctccgccaagccgtcgaagaagcggaaacagcccgtcatagcgccgccggagtcggactctgaggaggaatctgtctacgacactgcctccgacgatgacgaggaggaagaggagacgcaggagttagagagtgaggatgtagacgaggaggtggaggaggggagcgagggcggcgaggaaaatgaaattggtgacgatagcgaggtggaagaagaggaggtgaaggagaaaaaagaaaaggaggagacggtgaaggagaaaaaggaaaagaaggacatgaagcaagagggaaagaaggcgaagaagcaagaggaaaagaaggcgaagaaggacaagaaggaagaggaaaaaaaggtgatggaggacaagaaagaagaggaaaagaaggcgaagaagaagagcgaggggagtggaatcctgtctaacaagctcttctcggagctccccctctctgagctcactgccaaggccatcagagagatgaactacacccacctcacccagattcaagctagatcaataccacatctgttggaggggaatgatgtgatgggcgcagccaagactggctctgggaagactcttgcattccttataccagcgattgagatgctatatcacacacacttctcaccgaggaatgggactggagctattgtggtttgcccgacacgggaacttgctatccagacacacaatgttgccaaggagttaatgaaatatcactcacaaactctcagatatgtcattggtggtaataatcgaagaagtgaggctgatcagcttgcaaaggggatcaatttattagttgctaccccaggcaggcttttggaccatctacaaaataccaagagtttcatatacagaaggctaaaaatgtattatttggttatcgctatctactgcttttcccaagacttgaagcttgcttgagtgtgaaaataaatgtgccttgtcattgatgaagccgatcgcatacttgagcaaaactttgaggaagacatgaaacaaatatttaaacgccttccccagaataggcagactgttcttttttctgctacacaaactccagaggttgaaaaatttgctaaactgtcatttgagaaaaatgaagaaagtaaaaaaaaacctgtttatgttggagttgatgatgataagtcaaaggctactgttgaaggcctgcagcagggttattgtgtcatttctagcgataaaaggttcttggttctgtatgctttcctaagaaagaagcggaataagaagataatggtgttcttctcatcatgtaattcagtaaagttccacgctgaacttctgaatttccttgggatagagtgttctgatatccatggaaaacagaagcaacagaagcgaactactacattctttagcttttgcaaggcagaaaagggcatcttattgtgcactaatgtggctgcccgtggacttgatattcctgacgtggattatatcttgcaatatgaccctccagatgaaccaaaggattacattcacagagttggtcgtaccgcacgtggtgagaaaggcaaaggaagtgcattgctgttcttactaccagaagaactgaagtttctaatttacctgaaggcggccaaggttaccctgacggaatatgagttcaatcagaagaatgtgccaaatttgcaatcgcagcttgagaatattgttggtgagaattactttctgaaccagtctgccaaagaagcctacagatcctacgttttggcatatgactctcactctatgaaagacatttttaatgtccatcaacttgatctgcagaaagtagctgcgtcattcggtttcaagaatcccccgaaagtgaacctggacctggatagcagtgcggcgaagcatcggaagaagatgaggagagtagacggtgggaagaggcatggcatcagcgcttcgaacccgtacgggaggaaggacaaaggcggtgccggcgataaacgacagttggcgagattctagaaaggaaggaagagcaggagcgtttcactattgttgtgttcgtaccagggctttgattgatgttacctggcttgggaaaaatcttgacaggccactaagattggctataaattttgggttgtcttgatatatttggtgtgtaacgcaatcagcctgctcgatgcgaaaattggattattgctttatagtacttgtggtttccaacccgaggaaagttggtgct

SEQ ID NO: 47459 - DNA, 744 bp, Zea Mays
ggcacgcggctggcggcgggtggcaggcggctacgaggaggaggagcaagcggaggcagaggtgatgcggcggtggcatttcggcgcggcgagcgatcaggcgggtgacaatattgcggatgggttatttatggcgttccgtgccaaggctttctttcactacaggtgtgctgctccggtggcatgttgggttgaccgaacagcatgcgttagcatcagcggtatgagatccaattgttccttttataaaaggaattctttttataaaaggaagagaagagcagaagagaatgagaatgaaaagcaaaggcgggcacacactttacgacgacacaggagcaaggctcccgacacggcgacacccattccatctggaagtttggaacagaggttatcccagaatgcccacagccacaagggtgccatagagatctgcatctgctactgtttccgcgcgaggctcgtctacaacttcgcttgtgtccagaagctgtacaagattctgggccaatgtgccgactgctgaagcagaattgcagaaccattctgcatatccatcgccagaaatatgatgctcgttttgtatttattgatgctatatttaaaaaaacagtcaaagttccgctttagaactcatgctaaaatatgatatgccttattattttataggatggagggagtataaaatatagtgctgtgcaactatttctcaaccccataaagtcaatgccacttaatctatat

SEQ ID NO: 47460 - DNA, 961 bp, Zea Mays
gatcaggcgggtgacaatattgcggatgggttatttatggcgttccgtgccaaggctttctttcactacaggtgtgctgctccggtggcatgttgggttgaccgaacagcatgcgttagcatcagcggtatgaggtaattggatgggtatacagtagttaatttacatgactatggagcattgtggtataggtaaaatattttttaatgatgagaacatgattttctttatacagtaggaatttagagtaatatgagtgacaaatcctctgcatttgtttctcttccttttctttttataaagggaaatttggatccataccattaaaagatcaccactttggatccataccattactatctcacttacatgtgggtccacatgagtcaatgacatgtggggtccatggtatatatctaaagtttggatcttttaatggtatagatccaattgttccttttataaaaggaattctttttataaaaggaagagaagagcagaagagaatgagaatgaaaagcaaaggcgggcacacactttacgacgacacaggagcaaggctcccgacacggcgacacccattccatctggaagtttggaacagaggttatcccagaatgcccacagccacaagggtgccatagagatctgcatctgctactgtttccgcgcgaggctcgtctacaacttcgcttgtgtccagaagctgtacaagattctgggccaatgtgccgactgctgaagcagaattgcagaaccattctgcatatccatcgccagaaatatgatgctcgttttgtatttattgatgctatatttaaaaaaacagtcaaagttccgctttagaactcatgctaaaatatgatatgccttattattttataggatggagggagtataaaatatagtgctgtgcaactatttctcaaccccataaagtcaatgccacttaatctatata

SEQ ID NO: 47461 - DNA, 1224 bp, Zea Mays
tgtgatgggacccacaaaataaaaaaacataaaacatcttttcttcttcgtgacatcgctgtgctcagttccatcttcgtcagatccaatcgtgaaggcaaacagtgccagcagcttcccgccgacggctcacacccacacgggcacatgaggtggccagctcttcggcagctgcggccactggcacgtgtgatgcttctgtggcttcaatggtttattcgcgcatgcgaggctccatgagacagtggtgatggactgatggtgtctcgtgatgcgcttggcgaggcagctatggccggcggagcagatggaggcggcacaactatgtggggttgagaaacttttggttcagaacgtcgcccaattgtagagtttgcgcttgaggatgttgaaaaggtgaggcttcagaagattcgaatggaacggcatcgcaagtcagcagcagaaactgcagaagttcagcagaccccttcaggggatcaacctgcaagtgaaggccgtaacgcagataacagcaggactttcagaaaaggaaacaagcggaaatcacacagtttaccatctaaaccctccgactctgttgaagggctggccaaggatcctctagttcctggagttcgaaacgcgaaagctgcaaagagagcaaggaagtcaaatgtggggaccattttgccggaccgaggtctaacagctgcaaccccaaacactgctcagaatcaagttgcgtcaagtgagcttgatcaggcagctgctccaaagaaaagaaaaaacagaaaagacggtcaggcagagcaaaagagaggaaaggttacaaaaaggacaaggaaagaaccttccggggaaggaggcgtggacaagtcgctggtggagcagtaccgtttcaagttcttgcaacatggtgtgagcaagaccaagaccaagaccaaaggatagttgacttgggaactgtgggaagtgggattgatgttgaagagcagcacggtgtcccggaccaccgtataacgtttcgaagagcaagtctccacaaactttctgaggccaaaatttcgattgtgatgcttaatagttttgtgtccatctgtactgatatttataactgatctagttacagccgtataattatgaatcatcttatcatacaccgtttatggcttcatgatgacctgcctgtgtctgaaattcctgtgttggtatttctaacggaaactttgcaggaaattcatg

SEQ ID NO: 47462 - DNA, 2985 bp, Zea Mays
acacgcgacgaacagagctgaacacaaacacccgcatcaatccaagccgagcctcccctcggggacagcctacgcgagcgagatccaacccaagtcccgacgccgcgggcgagggcgaccagatccacctcctcagtcgtctcggatggcggcagcatcgacgtcggtacgggtgctccccgacggcggtgctgacgacgaggagcgctggctcgccgagggcatcgccggcgtccagcaaaacgctttctacatgcaccgtgccctcgattccaacaacctcaaggacgcactcaagtactcggcgcagatgctatcagagctgcgcacctcgcgactatcgccgcacaagtactacgagctttacatgagggcgtttgatgagatgaagaagctggagatgttcttcagggaggagactcgccgaggcagctgctctgtggttgatctgtacgagcttgtgcagcatgctgggaatgtcttaccgagactctatctcctgtgcacggtggggtctgtgtacatcaaatcgaaagaggctcctgctaaagatgttcttaaagatctcgttgaaatgtgccgaggcattcaacatcctcttcgtggcctttttttgagaagttacctttctcaaataagcagagacaaattgcctgatattggttctgagtacgaaggcgatgtggaaaatattaacgatgcggttgaatttgttcttcagaatttcatagaaatgaacaaactctgggtcccggatgcagcatcaggggcctgcccgagaaaaggaaaagcgtgggaaggaaagaaatgaactgcgtgatctggcaaaaaccttcatgttctaggccagattgacggcgttgaccttgatatgtacaaagaaactgttcttccaaggatattagagcaggtggttaattgtaaggatgaccttgcacaattctacctgatggactgcataatccaagtctttccagacgaataccatttacaaacattggaaacgttattgagcgcatttccccagcttcagccaagtgttgatataaaaacagtactctctcaacttatggacagattgtctaactatgctgcctcaagtcctgaactgttgccagagttcttgcaagttgaagcttttgctaagttcagtaatgctattggaaaggtgatagaagcccaacctgacatgccagttgttggagccataactctatatgtatcacttctgacctttactctccgtgtacatcctgatcggcttgattatgttgaccaagtgctgggtgcatgtgtcaagaaactttcaggcaaggcaaaacttgaagatagcagggcaacaaagcaaattgttgcacttcttagtgctcccctggaaaaatatagcaatattgttactgcattagaactttcaaactatcctcgggttatggattatcttgataatgctacaaccaaagtgatggctgtggtaataattcaaagcataatgaaaaacacaacctgcatatctacttctgacaagattgaggcactattcgatttaattaaggggctgataaaggatatggatggagctcaagatgatgagcttgatgaagaagactttaaggaggaacaaaactctgtagcgcgtctcattcacatgctgcacaatgatgatcctgaagagatgctgaagatcttatgtactgtacagaagcatatacttcagggaggccccaagcgtctaactttcactgtgccttcgttagtattctcttctcttaagctggtcaggcgattacaaggccaagatggagatgtcactggggaggatgttcctgcaactccaaagaaaatattccagatattgcatcagactattgaagcactttcttgtgttccttctccagagttagctctgagactatatttgcagtgtgcagaggctgccaatgactgtgatttggaaccagttgcttatgagttctttactcaagcgttcattttatatgaagaagaaatcacggattcaaaggctcagatcactgcaattcacctgataattgggacccttcagcggatgaatatatttggggtggaaaatagagacaccctcactcacaagacaacagggtactcagcaaaacttctcaagaagcctgatcaatgccgagcagtatatgcgtgttcacatcttttttggactgatgaccaagatggtataatggatggtgaaagggttctcctttgtttgaagcgtgccttgagaatcgcaaatgctgctcaacagatggctagtgctacaagggggagcagtggatctgtaaccctatttattgaaattttgaacaagtacttgtacttctttgagaaaggaattccacaaatcacaaacactgtgattcaagatttgattgaattgattagaacggagaagcaaagtgataactctgtagctgatccatctacagaggcattcttttctagcactttgcggtacattgaatttcagaagcagaaaggtggaaccataggcgaaaaatatgaacaaataaagacaagttcatgactcggaacaaacacgtcacgatgactggttttgattttgttaagagaattggatcatttgtttgacatggttcagtgaaatagaaaccgccagttttagtagcatccaactaaaggatgtttacatgagctgttattctcaaatctcacggtctgagcgggtttgctcgcccattggcaacattttcaggtttagtcaggtggcaataagctgtcctttggtgagcacaggtctgtacaggattacttgtgttcgtgattggttctactgctacctgagtttcattgttgtatatttccgcccctcatacaaagcttatggattttagatttctgtaacatttggagtgcatgcctccatttctgagttctggctggacatttgatgattgtttcatagcatttgaacattttgtttaaccactactcggc

SEQ ID NO: 47463 - DNA, 2874 bp, Zea Mays
acacgcgacgaacagagctgaacacaaacacccgcatcaatccaagccgagcctcccctcggggacagcctacgcgagcgagatccaacccaagtcccgacgccgcgggcgagggcgaccagatccacctcctcagtcgtctcggatggcggcagcatcgacgtcggtacgggtgctccccgacggcggtgctgacgacgaggagcgctggctcgccgagggcatcgccggcgtccagcaaaacgctttctacatgcaccgtgccctcgattccaacaacctcaaggacgcactcaagtactcggcgcagatgctatcagagctgcgcacctcgcgactatcgccgcacaagtactacgagctttacatgagggcgtttgatgagatgaagaagctggagatgttcttcagggaggagactcgccgaggcagctgctctgtggttgatctgtacgagcttgtgcagcatgctgggaatgtcttaccgagactctatctcctgtgcacggtggggtctgtgtacatcaaatcgaaagaggctcctgctaaagatgttcttaaagatctcgttgaaatgtgccgaggcattcaacatcctcttcgtggcctttttttgagaagttacctttctcaaataagcagagacaaattgcctgatattggttctgagtacgaaggcgatgtggaaaatattaacgatgcggttgaatttgttcttcagaatttcatagaaatgaacaaactctgggtcccggatgcagcatcaggggcctgcccgagaaaaggaaaagcgtgggaaggaaagaaatgaactgcgtgatctggtaggcaaaaaccttcatgttctaggccagattgacggcgttgaccttgatatgtacaaagaaactgttcttccaaggatattagagcaggtggttaattgtaaggatgaccttgcacaattctacctgatggactgcataatccaagtctttccagacgaataccatttacaaacattggaaacgttattgagcgcatttccccagcttcagccaagtgttgatataaaaacagtactctctcaacttatggacagattgtctaactatgctgcctcaagtcctgaactgttgccagagttcttgcaagttgaagcttttgctaagttcagtaatgctattggaaaggtgatagaagcccaacctgacatgccagttgttggagccataactctatataaactttcaggcaaggcaaaacttgaagatagcagggcaacaaagcaaattgttgcacttcttagtgctcccctggaaaaatatagcaatattgttactgcattagaactttcaaactatcctcgggttatggattatcttgataatgctacaaccaaagtgatggctgtggtaataattcaaagcataatgaaaaacacaacctgcatatctacttctgacaagattgaggcactattcgatttaattaaggggctgataaaggatatggatggagctcaagatgatgagcttgatgaagaagactttaaggaggaacaaaactctgtagcgcgtctcattcacatgctgcacaatgatgatcctgaagagatgctgaagatcttatgtactgtacagaagcatatacttcagggaggccccaagcgtctaactttcactgtgccttcgttagtattctcttctcttaagctggtcaggcgattacaaggccaagatggagatgtcactggggaggatgttcctgcaactccaaagaaaatattccagatattgcatcagagttagctctgagactatatttgcagtgtgcagaggctgccaatgactgtgatttggaaccagttgcttatgagttctttactcaagcgttcattttatatgaagaagaaatcacggattcaaaggctcagatcactgcaattcacctgataattgggacccttcagcggatgaatatatttggggtggaaaatagagacaccctcactcacaagacaacagggtactcagcaaaacttctcaagaagcctgatcaatgccgagcagtatatgcgtgttcacatcttttttggactgatgaccaagatggtataatggatggtgaaagggttctcctttgtttgaagcgtgccttgagaatcgcaaatgctgctcaacagatggctagtgctacaagggggagcagtggatctgtaaccctatttattgaaattttgaacaagtacttgtacttctttgagaaaggaattccacaaatcacaaacactgtgattcaagatttgattgaattgattagaacggagaagcaaagtgataactctgtagctgatccatctacagaggcattcttttctagcactttgcggtacattgaatttcagaagcagaaaggtggaaccataggcgaaaaatatgaacaaataaagacaagttcatgactcggaacaaacacgtcacgatgactggttttgattttgttaagagaattggatcatttgtttgacatggttcagtgaaatagaaaccgccagttttagtagcatccaactaaaggatgtttacatgagctgttattctcaaatctcacggtctgagcgggtttgctcgcccattggcaacattttcaggtttagtcaggtggcaataagctgtcctttggtgagcacaggtctgtacaggattacttgtgttcgtgattggttctactgctacctgagtttcattgttgtatatttccgcccctcatacaaagcttatggattttagatttctgtaacatttggagtgcatgcctccatttctgagttctggctggacatttgatgattgtttcatagcatttgaacattttgtttaaccactactcggc

SEQ ID NO: 47464 - DNA, 3063 bp, Zea Mays
acacgcgacgaacagagctgaacacaaacacccgcatcaatccaagccgagcctcccctcggggacagcctacgcgagcgagatccaacccaagtcccgacgccgcgggcgagggcgaccagatccacctcctcagtcgtctcggatggcggcagcatcgacgtcggtacgggtgctccccgacggcggtgctgacgacgaggagcgctggctcgccgagggcatcgccggcgtccagcaaaacgctttctacatgcaccgtgccctcgattccaacaacctcaaggacgcactcaagtactcggcgcagatgctatcagagctgcgcacctcgcgactatcgccgcacaagtactacgagctttacatgagggcgtttgatgagatgaagaagctggagatgttcttcagggaggagactcgccgaggcagctgctctgtggttgatctgtacgagcttgtgcagcatgctgggaatgtcttaccgagactctatctcctgtgcacggtggggtctgtgtacatcaaatcgaaagaggctcctgctaaagatgttcttaaagatctcgttgaaatgtgccgaggcattcaacatcctcttcgtggcctttttttgagaagttacctttctcaaataagcagagacaaattgcctgatattggttctgagtacgaaggcgatgtggaaaatattaacgatgcggttgaatttgttcttcagaatttcatagaaatgaacaaactctgggtcccggatgcagcatcaggggcctgcccgagaaaaggaaaagcgtgggaaggaaagaaatgaactgcgtgatctggtgattcagtgacatctggatattttactcaactgtattttctaagtcatggcattgatattattattgttttttatcttctaggtaggcaaaaaccttcatgttctaggccagattgacggcgttgaccttgatatgtacaaagaaactgttcttccaaggatattagagcaggtggttaattgtaaggatgaccttgcacaattctacctgatggactgcataatccaagtctttccagacgaataccatttacaaacattggaaacgttattgagcgcatttccccagcttcagccaagtgttgatataaaaacagtactctctcaacttatggacagattgtctaactatgctgcctcaagtcctgaaagttcttgcaagttgaagcttttgctaagttcagtaatgctattggaaaggtgatagaagcccaacctgacatgccagttgttggagccataactctatatgtatcacttctgacctttactctccgtgtacatcctgatcggcttgattatgttgaccaagtgctgggtgcatgtgtcaagaaactttcaggcaaggcaaaacttgaagatagcagggcaacaaagcaaattgttgcacttcttagtgctcccctggaaaaatatagcaatattgttactgcattagaactttcaaactatcctcgggttatggattatcttgataatgctacaaccaaagtgatggctgtggtaataattcaaagcataatgaaaaacacaacctgcatatctacttctgacaagattgaggcactattcgatttaattaaggggctgataaaggatatggatggagctcaagatgatgagcttgatgaagaagactttaaggaggaacaaaactctgtagcgcgtctcattcacatgctgcacaatgatgatcctgaagagatgctgaagatcttatgtactgtacagaagcatatacttcagggaggccccaagcgtctaactttcactgtgccttcgttagtattctcttctcttaagctggtcaggcgattacaaggccaagatggagatgtcactggggaggatgttcctgcaactccaaagaaaatattccagatattgcatcagactattgaagcactttcttgtgttccttctccagagttagctctgagactatatttgcagtgtgcagaggctgccaatgactgtgatttggaaccagttgcttatgagttctttactcaagcgttcattttatatgaagaagaaatcacggattcaaaggctcagatcactgcaattcacctgataattgggacccttcagcggatgaatatatttggggtggaaaatagagacaccctcactcacaagacaacagggtactcagcaaaacttctcaagaagcctgatcaatgccgagcagtatatgcgtgttcacatcttttttggactgatgaccaagatggtataatggatggtgaaagggttctcctttgtttgaagcgtgccttgagaatcgcaaatgctgctcaacagatggctagtgctacaagggggagcagtggatctgtaaccctatttattgaaattttgaacaagtacttgtacttctttgagaaaggaattccacaaatcacaaacactgtgattcaagatttgattgaattgattagaacggagaagcaaagtgataactctgtagctgatccatctacagaggcattcttttctagcactttgcggtacattgaatttcagaagcagaaaggtggaaccataggcgaaaaatatgaacaaataaagacaagttcatgactcggaacaaacacgtcacgatgactggttttgattttgttaagagaattggatcatttgtttgacatggttcagtgaaatagaaaccgccagttttagtagcatccaactaaaggatgtttacatgagctgttattctcaaatctcacggtctgagcgggtttgctcgcccattggcaacattttcaggtttagtcaggtggcaataagctgtcctttggtgagcacaggtctgtacaggattacttgtgttcgtgattggttctactgctacctgagtttcattgttgtatatttccgcccctcatacaaagcttatggattttagatttctgtaacatttggagtgcatgcctccatttctgagttctggctggacatttgatgattgtttcatagcatttgaacattttgtttaaccactactcggc

SEQ ID NO: 47465 - DNA, 2910 bp, Zea Mays
ccaatctttactagtatccaactatccatggagagtacatttcgattccactctatctcctgtgcacggtggggtctgtgtacatcaaatcgaaagaggctcctgctaaagatgttcttaaagatctcgttgaaatgtgccgaggcattcaacatcctcttcgtggcctttttttgagaagttacctttctcaaataagcagagacaaattgcctgatattggttctgagtacgaaggcgatgtggaaaatattaacgatgcggttgaatttgttcttcagaatttcatagaaatgaacaaactctgggtcccggatgcagcatcaggggcctgcccgagaaaaggaaaagcgtgggaaggaaagaaatgaactgcgtgatctggtgattcagtgacatctggatattttactcaactgtattttctaagtcatggcattgatattattattgttttttatcttctaggtaggcaaaaaccttcatgttctaggccagattgacggcgttgaccttgatatgtacaaagaaactgttcttccaaggatattagagcaggtggttaattgtaaggatgaccttgcacaattctacctgatggactgcataatccaagtctttccagacgaataccatttacaaacattggaaacgttattgagcgcatttccccagcttcagccaagtgttgatataaaaacagtactctctcaacttatggacagattgtctaactatgctgcctcaagtcctgaactgttgccagagttcttgcaagttgaagcttttgctaagttcagtaatgctattggaaaggtgatagaagcccaacctgacatgccagttgttggagccataactctatatgtatcacttctgacctttactctccgtgtacatcctgatcggcttgattatgttgaccaagtgctgggtgcatgtgtcaagaaactttcaggcaaggcaaaacttgaagatagcagggcaacaaagcaaattgttgcacttcttagtgctcccctggaaaaatatagcaatattgttactgcattagaactttcaaactatcctcgggttatggattatcttgataatgctacaaccaaagtgatggctgtggtaataattcaaagcataatgaaaaacacaacctgcatatctacttctgacaagattgaggcactattcgatttaattaaggggctgataaaggatatggatggagctcaagatgatgagcttgatgaagaagactttaaggaggaacaaaactctgtagcgcgtctcattcacatgctgcacaatgatgatcctgaagagatgctgaagatcttatgtactgtacagaagcatatacttcagggaggccccaagcgtctaactttcactgtgccttcgttagtattctcttctcttaagctggtcaggcgattacaaggccaagatggagatgtcactggggaggatgttcctgcaactccaaagaaaatattccagatattgcatcaggtttttatcattattttgcatgcatctaactttggttacagtatcataacagatgcatacactgtaaatatgttttcagtttttttaaccttttgtccttggaagagcctgggaataacacatgtttttaggcattaattatatcaaaagtttctggtaaactatggttaataacacagggcacccaatttttacattcgtaattataaaaaaaacatttcataacatctccatattcttctgcacatttgtcattgttttcatttttcttgtccagactattgaagcactttcttgtgttccttctccagagttagctctgagactatatttgcagtgtgcagaggctgccaatgactgtgatttggaaccagttgcttatgagttctttactcaagcgttcattttatatgaagaagaaatcacggattcaaaggctcagatcactgcaattcacctgataattgggacccttcagcggatgaatatatttggggtggaaaatagagacaccctcactcacaagacaacagggtactcagcaaaacttctcaagaagcctgatcaatgccgagcagtatatgcgtgttcacatcttttttggactgatgaccaagatggtataatggatggtgaaagggttctcctttgtttgaagcgtgccttgagaatcgcaaatgctgctcaacagatggctagtgctacaagggggagcagtggatctgtaaccctatttattgaaattttgaacaagtacttgtacttctttgagaaaggaattccacaaatcacaaacactgtgattcaagatttgattgaattgattagaacggagaagcaaagtgataactctgtagctgatccatctacagaggcattcttttctagcactttgcggtacattgaatttcagaagcagaaaggtggaaccataggcgaaaaatatgaacaaataaagacaagttcatgactcggaacaaacacgtcacgatgactggttttgattttgttaagagaattggatcatttgtttgacatggttcagtgaaatagaaaccgccagttttagtagcatccaactaaaggatgtttacatgagctgttattctcaaatctcacggtctgagcgggtttgctcgcccattggcaacattttcaggtttagtcaggtggcaataagctgtcctttggtgagcacaggtctgtacaggattacttgtgttcgtgattggttctactgctacctgagtttcattgttgtatatttccgcccctcatacaaagcttatggattttagatttctgtaacatttggagtgcatgcctccatttctgagttctggctggacatttgatgattgtttcatagcatttgaacattttgtttaaccactactcggc

SEQ ID NO: 47466 - DNA, 1474 bp, Zea Mays
ctttgttagaaagcttgatgaagaagactttaaggaggaacaaaactctgtagcgcgtctcattcacatgctgcacaatgatgatcctgaagagatgctgaagatcttatgtactgtacagaagcatatacttcagggaggccccaagcgtctaactttcactgtgccttcgttagtattctcttctcttaagctggtcaggcgattacaaggccaagatggagatgtcactggggaggatgttcctgcaactccaaagaaaatattccagatattgcatcagactattgaagcactttcttgtgttccttctccagagttagctctgagactatatttgcagtgtgcagaggtatgtttgtgatactgcgtattttcataattcttcatcttactctctgattatgtttttaatttaggctgccaatgactgtgatttggaaccagttgcttatgagttctttactcaagcgttcattttatatgaagaagaaatcacggattcaaaggctcagatcactgcaattcacctgataattgggacccttcagcggatgaatatatttggggtggaaaatagagacaccctcactcacaagacaacagggtactcagcaaaacttctcaagaagcctgatcaatgccgagcagtatatgcgtgttcacatcttttttggactgatgaccaagatggtataatggatggtgaaagggttctcctttgtttgaagcgtgccttgagaatcgcaaatgctgctcaacagatggctagtgctacaagggggagcagtggatctgtaaccctatttattgaaattttgaacaagtacttgtacttctttgagaaaggaattccacaaatcacaaacactgtgattcaagatttgattgaattgattagaacggagaagcaaagtgataactctgtagctgatccatctacagaggcattcttttctagcactttgcggtacattgaatttcagaagcagaaaggtggaaccataggcgaaaaatatgaacaaataaagacaagttcatgactcggaacaaacacgtcacgatgactggttttgattttgttaagagaattggatcatttgtttgacatggttcagtgaaatagaaaccgccagttttagtagcatccaactaaaggatgtttacatgagctgttattctcaaatctcacggtctgagcgggtttgctcgcccattggcaacattttcaggtttagtcaggtggcaataagctgtcctttggtgagcacaggtctgtacaggattacttgtgttcgtgattggttctactgctacctgagtttcattgttgtatatttccgcccctcatacaaagcttatggattttagatttctgtaacatttggagtgcatgcctccatttctgagttctggctggacatttgatgattgtttcatagcatttgaacattttgtttaaccactactcggc

SEQ ID NO: 47467 - DNA, 788 bp, Zea Mays
atgagctcaagcctatggaaatccaaggttctcctttgtttgaagcgtgccttgagaatcgcaaatgctgctcaacagatggctagtgctacaagggggagcagtggatctgtaaccctatttattgaaattttgaacaagtacttgtacttctttgagaaaggaattccacaaatcacaaacactgtgattcaagatttgattgaattgattagaacggagaagcaaagtgataactctgtagctgatccatctacagaggcattcttttctagcactttgcggtacattgaatttcagaagcagaaaggtggaaccataggcgaaaaatatgaacaaataaagacaagttcatgactcggaacaaacacgtcacgatgactggttttgattttgttaagagaattggatcatttgtttgacatggttcagtgaaatagaaaccgccagttttagtagcatccaactaaaggatgtttacatgagctgttattctcaaatctcacggtctgagcgggtttgctcgcccattggcaacattttcaggtttagtcaggtggcaataagctgtcctttggtgagcacaggtctgtacaggattacttgtgttcgtgattggttctactgctacctgagtttcattgttgtatatttccgcccctcatacaaagcttatggattttagatttctgtaacatttggagtgcatgcctccatttctgagttctggctggacatttgatgattgtttcatagcatttgaacattttgtttaaccactactcggc

SEQ ID NO: 47468 - DNA, 1420 bp, Zea Mays
gtgacaacacccctcgtattctcaactaaaaccctagccccacagccccgactcccgacagttccttcggtctcatcgcaactgcgaagctccccccagttcccacggtttcccccacgacgccggcgatgggcaagcggaaacagcgcggcggcggcgacggagaacccgccgcggaaggcggtgctggcggaggacacagcccctccaccgtctcgaggcggtgtttagcgaggtcggcccagtgcggcgctgctttatggtcgcggagaaagggtcggagaagagtcgaggcttcgggttcgtgcaatttgcaactgttcaagatgctgatcgagctcttcaacaaaagaatggatctcctgttgctggtaggaaaatcagagttaagctagcaatgaatcgtgctccactgaaggaacgtttgcaaaaggggaatatgcaagtgaaggactctgatgcaaaagatgaagcagacgaaatttctcctgctgaaaagcataaggggaaatctcataaaacagatccagagcaactgcatttgttgtcaaatgatgctaaggtatcaaaggaagctcccattggcgactccgaaaaagtgaaaaattctgaaaagcaaagggttgcaaagacggtgatttttggtggcctgcaagactccgccatggcaaccgaggttttccgtcaagctcgagagattggttcagttgtatctgtaaactatccacttcccaaagaggaaatgagattcaatggacttgctcgagatggatgcacatcagatatggcagctgtactctttgcaagtgtcaaatcagcttgggattctgttgtccaactgcataataaggaagtcaagggagctactgtttgggctcgtcaacttggcggagagggctcaaagatcagaaaatggagagcgattgtcaggaacctgccattcaagattacagagaaggagatcgtggatatgtttagttcagcagggtttgtctgggatgtgacaattccacataagtctgatgaggggatatcaaaaggctttgcttttgtatctttcacacggaagcaagatgcagaaaatgctataaaaaatattaatggaaaagatgttgcaaagagaccagtggctgttgattgggctgttccgaaaaaagtctacactgttgctgcaaaagttgatgctaaggataatgggaacagggttatcttctgttaatttaaaaataatttagtcttattcctgattgtctaaacagatgttcggtgtaggattttttgtgtcattttgttagactacccgtctagggtttgtgctattccccgtgtaatgaccgttatacccctgtgtaatgggccttggcccagttactctctctatttaataccactcccaacccctgattagggtatgggttcc

SEQ ID NO: 47469 - DNA, 1514 bp, Zea Mays
atgggcaagcggaaacagcgcggcggcggcgacggagaacccgccgcggaaggcggtgctggcggaggacacagcccctccaccgtgttcgtttccaacctcccctacaccttcaagtcctccgatctcgaggcggtgtttagcgaggtcggcccagtgcggcgctgctttatggtcgcggagaaagggtcggagaagagtcgaggcttcgggttcgtgcaatttgcaactgttcaagatgctgatcgagctcttcaacaaaagaatggatctcctgttgctggtaggaaaatcagagttaagctagcaatgaatcgtgctccactgaaggaacgtttgcaaaaggggaatatgcaagtgaaggactctgatgcaaaagatgaagcagacgaaatttctcctgctgaaaagcataaggggaaatctcataaaacagatccagagcaactgcatttgttgtcaaatgatgctaaggtatcaaaggaagctcccattggcgactccgaaaaagtgaaaaattctgaaaagcaaagggttgcaaagacggtgatttttggtggcctgcaagactccgccatggcaaccgaggttttccgtcaagctcgagagattggttcagttgtatctgtaaactatccacttcccaaagaggaaatgagattcaatggacttgctcgagatggatgcacatcagatatggcagctgtactctttgcaagtgtcaaatcagcttgggattctgttgtccaactgcataataaggaagtcaagggagctactgtttgggctcgtcaacttggcggagagggctcaaagatcagaaaatggagagcgattgtcaggaacctgccattcaagagaaggagatcgtggatatgtttagttcagcagggtttgtctgggatgtgacaattccacataagtctgatgaggggatatcaaaaggctttgcttttgtatctttcacacggaagcaagatgcagaaaatgctataaaaaatattaatggaaaagatgttgcaaagagaccagtggctgttgattgggctgttccgaaaaaagtctacactgttgctgcaaaagttgatgctaaggataatggtaaatctaaagtttcctttatcagctatctttccttaagtcattcatttatccattatacacaaattaagagttcttacatagctaatgcaagatttatcttacgtgaatgatactgtaaatgactattagccttagacatttgattgatatcatgttggctatttgatacttggcgtggtttctcagggaacagggttatcttctgttaatttaaaaataatttagtcttattcctgattgtctaaacagatgttcggtgtaggattttttgtgtcattttgttagactacccgtctagggtttgtgctattccccgtgtaatgaccgttatacccctgtgtaatgggccttggcccagttactctctctatttaataccactcccaacccctgattagggtatgggttcc

SEQ ID NO: 47470 - DNA, 722 bp, Zea Mays
agtgtatgtcatgattcatgaagaataaatctgctgctttatgattcaataggaaaagacttgctcgagatggatgcacatcagatatggcagctgtactctttgcaagtgtcaaatcagcttgggattctgttgtccaactgcataataaggaagtcaagggagctactgtttgggctcgtcaacttggcggagagggctcaaagatcagaaaatggagagcgattgtcaggaacctgccattcaagattacagagaaggagatcgtggatatgtttagttcagcagggtttgtctgggatgtgacaattccacataagtctgatgaggggatatcaaaaggctttgcttttgtatctttcacacggaagcaagatgcagaaaatgctataaaaaatattaatggaaaagatgttgcaaagagaccagtggctgttgattgggctgttccgaaaaaagtctacactgttgctgcaaaagttgatgctaaggataatgggaacagggttatcttctgttaatttaaaaataatttagtcttattcctgattgtctaaacagatgttcggtgtaggattttttgtgtcattttgttagactacccgtctagggtttgtgctattccccgtgtaatgaccgttatacccctgtgtaatgggccttggcccagttactctctctatttaataccactcccaacccctgattagggtatgggttcc

SEQ ID NO: 47471 - DNA, 2887 bp, Zea Mays
tcccctcgcaggtcccggctggtcaggctcgcgcccgccagccccacccaaacctggggaactcttcgttcgtcctcttcttcccctgtcgcctttcccaaaaggccaaaaccctaaaccatacgcgcctaactccgcgtcctcccccccctccctcgaagcggccaaggcggcggcagcagtgccggcatgggcgcaatgtcggcttcgatttcgtcggtgaattggctagtcgaggatgacatccttctcaagaacgccgtcgaggctggtgcttcgttagagtccttagccagaggagctgtatgtttttcccgtaaattcactcttcatgaaatacaggaccgctggaattcattgctatatgacccagatatctcaacacaagcagcttctcggatggctgagtatgagaatgaactttctacttccgatccagccaaggcacataaacttttcaactcaaaagcaaaggatttttcatttcagaaacggaaaatagacagtgtaaagaatctatattatgcgatgagaaaaagagtacgcaatgatccacgcaacagtggcgaccttggatttcttgtcccctgttcgtgtacggcaattggtagtgagtgtatctgtggaggcctacctaacaatattgaaccagagctgaattcagtaagccgctatgggcaagtaggttcaaggtacaccattggacattcatattctgaaatgaacgaacatgcttttcatacgaagcatactgaaagcatgacaagagatggggatggcaccagtaatgttgtgtatggctactcagatgtaggccaactatatgaacatcatgcgtacacagcgaataatcatgggaatagagaagggaacaatctttctctaaagagtatcacaaattttcaggattctatgcagtttcagcagttggacaacaatcaatgtggtaatggggtggtagactcaaaggctttggtgatccctaaccatttcagtggaagtgtgcaggaacctatgcctctccaaatgattggtcaacctgagggttctgaagcaccaggtggtgcaatcttgagtcttcagcgaagcgacaggctcgctcttgctgatgataaggatgtaaaatcagaagacagggaccctctcacatttgaagcgcatttagatggtgggatatctggtttagatcacgctactgagtttatggacttcccatatttcactaatagtgaagaccttgatatcctgaatagtgaaaatcttttgaattctccaagtgagggaatccaggaggatttagacgatactgcattagttgttcatggggttagatcaaccatgcaaaatctggttcatgctgatgaagccaatatgtcctgtgatcaaatagatcttggtgatgtgaaaaataatgtagatgcttctggtataatcttatttcctacttcattagtagtgccctgtcctggcctgtatgttgagtgcaaattgaacacagaagatactgaaattccttgcaacgacgatgtttctacaccaacagagtatcctcttgaatgctgtacttctacctttgggcagaaatctgagaatactatctattccgtctcccctgcaatcagccctccatcaattgctgaacagcccaacccatccacttcagaacaaaaagaagattcagtggctcatgacgaaggtggtgtcctaggagctaaaccatcagaaggtgctttaacagttggaggccttttgcctggtaacattgacacaaatgatgcaaacacatgcatgctagctttgccttcttttagcactgctggatttggtgaaggatcaccttgtagtttaggaccacacgagagctttgataactctcatggtttgactttgcaaaattcagttcaagctcctgatcagatgcaacacaactcacttgatggtaaaccagaattaggtgacaaggctgctctacagaactgtatgccatcaaatgcactgcccgatttggatattcagaacactattgcaaatgcgccaacaccagctcaagcagaagaatgccctgactatgaaaaagatgttccaaattactatgatctagaagctttgattcttgaccaggatcttatcccgtgggaccaagactccgattttatgcatcctgaagttaccggatttcctcacccggaaagcaggaaggcattgattagattggagcaaggtgctcggtcttgtatgaacagagctatcatgtcgcatggtgcctttgcagttatctatggattgcacttgagatgctacataaaggatcctgaggttactcttggaagagagacagaagacattaaagttgacattgatttaggaaaagaagggagggcaaataagatatctcgccgacaggcggttatcaagatggatgaatctgggtattttcatattaagaacactggaaaatgtccaatctttgttaatagcaaggaaataccaagctgcaaacgcatcaacctaagctcagactcattaatcgagataaaggacatgaggtttattttccatgtaaaccaagaggctgtgaggcagtacattgatcgtgacctgaagccagaacgctaatttcccctggctttccagtcagcagcagccttttgtacctacactcccaggaatgatttcatttgtaatactggcaccctagattgtggtgactgccgccaagagcaagaggcaaccaatgcaataaagtgcggaaaagaatcaatagaagggtagattctagggtagaacaggaggagggtgcacttgtgcaagaaaccattcggttcttgcgacgctataagcataaactttattggtttttatttatataccctgatgatcttgaagc

SEQ ID NO: 47472 - DNA, 3849 bp, Zea Mays
tcccctcgcaggtcccggctggtcaggctcgcgcccgccagccccacccaaacctggggaactcttcgttcgtcctcttcttcccctgtcgcctttcccaaaaggccaaaaccctaaaccatacgcgcctaactccgcgtcctcccccccctccctcgaagcggccaaggcggcggcagcagtgccggcatgggcgcaatgtcggcttcgatttcgtcggtgaattggctagtcgaggatgacatccttctcaagaacgccgtcgagaattattgaacactgatggtagcagcagccagcgctctcatattaattatgttttgaagcaatgtcctgcactatgtagcagcgaatcagcagcctaatctaattgaaatggttgctttctctaattcacatactctaccatgttatcatcaaatatagattatttccgttgtccctatattttattctaagcatttttcctcaaaatatactatgaacaactcttgttatttaatctctaggtcagcatattgatctagcaatagttctaataagtgggtgttatggttggtattccatacaaacacagaagcaaaggagaagaggtccagcaggagataagtccagctataaaatagcttagttggttcaagtctgtttagatccggccagtttgttaggacctcccatttgttagggagtcggccaattagcaagaccttatcagattaggtcctagtcaggtccatttatatgaaacaatggatgaaataaagagattgatccctgcttccccgttttcccttaccttctccatcttcacgtctgcccctgtgttcctcgtcggccatcagcacggcacctcttcgtcgcccgtctctgaggccgcgaccggagatcttccacaagtacaacctgcgctgtagaagagcccacaccagtgggtttgtgattttgtgaagccaacacagtacgaaaccaaaaatagtacaaggctgctccaaacttggatctacatgacttcactagtaattattttattttatttgccaaatactaactgctccttgtaatacttgcaggctggtgcttcgttagagtccttagccagaggagctgtatgtttttcccgtaaattcactcttcatgaaatacaggaccgctggaattcattgctatatgacccagatatctcaacacaagcagcttctcggatggctgagtatgagaatgaactttctacttccgatccagccaaggcacataaacttttcaactcaaaagcaaaggatttttcatttcagaaacggaaaatagacagtgtaaagaatctatattatgcgatgagaaaaagagtacgcaatgatccacgcaacagtggcgaccttggatttcttgtcccctgttcgtgtacggcaattggtagtgagtgtatctgtggaggcctacctaacaatattgaaccagagctgaattcagtaagccgctatgggcaagtaggttcaaggtacaccattggacattcatattctgaaatgaacgaacatgcttttcatacgaagcatactgaaagcatgacaagagatggggatggcaccagtaatgttgtgtatggctactcagatgtaggccaactatatgaacatcatgcgtacacagcgaataatcatgggaatagagaagggaacaatctttctctaaagagtatcacaaattttcaggattctatgcagtttcagcagttggacaacaatcaatgtggtaatggggtggtagactcaaaggctttggtgatccctaaccatttcagtggaagtgtgcaggaacctatgcctctccaaatgattggtcaacctgagggttctgaagcaccaggtggtgcaatcttgagtcttcagcgaagcgacaggctcgctcttgctgatgataaggatgtaaaatcagaagacagggaccctctcacatttgaagcgcatttagatggtgggatatctggtttagatcacgctactgagtttatggacttcccatatttcactaatagtgaagaccttgatatcctgaatagtgaaaatcttttgaattctccaagtgagggaatccaggaggatttagacgatactgcattagttgttcatggggttagatcaaccatgcaaaatctggttcatgctgatgaagccaatatgtcctgtgatcaaatagatcttggtgatgtgaaaaataatgtagatgcttctggtataatcttatttcctacttcattagtagtgccctgtcctggcctgtatgttgagtgcaaattgaacacagaagatactgaaattccttgcaacgacgatgtttctacaccaacagagtatcctcttgaatgctgtacttctacctttgggcagaaatctgagaatactatctattccgtctcccctgcaatcagccctccatcaattgctgaacagcccaacccatccacttcagaacaaaaagaagattcagtggctcatgacgaaggtggtgtcctaggagctaaaccatcagaaggtgctttaacagttggaggccttttgcctggtaacattgacacaaatgatgcaaacacatgcatgctagctttgccttcttttagcactgctggatttggtgaaggatcaccttgtagtttaggaccacacgagagctttgataactctcatggtttgactttgcaaaattcagttcaagctcctgatcagatgcaacacaactcacttgatggtaaaccagaattaggtgacaaggctgctctacagaactgtatgccatcaaatgcactgcccgatttggatattcagaacactattgcaaatgcgccaacaccagctcaagcagaagaatgccctgactatgaaaaagatgttccaaattactatgatctagaagctttgattcttgaccaggatcttatcccgtgggaccaagactccgattttatgcatcctgaagttaccggatttcctcacccggaaagcaggaaggcattgattagattggagcaaggtgctcggtcttgtatgaacagagctatcatgtcgcatggtgcctttgcagttatctatggattgcacttgagatgctacataaaggatcctgaggttactcttggaagagagacagaagacattaaagttgacattgatttaggaaaagaagggagggcaaataagatatctcgccgacagaacactggaaaatgtccaatctttgttaatagcaaggaaataccaagctgcaaacgcatcaacctaagctcagactcattaatcgagataaaggacatgaggtttattttccatgtaaaccaagaggctgtgaggcagtacattgatcgtgacctgaagccagaacgctaatttcccctggctttccagtcagcagcagcctgtgagtgactgcctcattaacagcaatagaagtagcatagcagtaaatttgagtaagcattgctcgtttaggatgttccttcatatgatgttaacaagttaggttcacttggctccggtctgtaaatggttgtagtttgttgcgttttctgtctgtttggcgggcataaatcatgcatataaccagcgcatttgcttccagtttgtacctacactcccaggaatgatttcatttgtaatactggcaccctagattgtggtgactgccgccaagagcaagaggcaaccaatgcaataaagtgcggaaaagaatcaatagaagggtagattctagggtagaacaggaggagggtgcacttgtgcaagaaaccattcggttcttgcgacgctataagcataaactttattggtttttatttatataccctgatgatcttgaagc

SEQ ID NO: 47473 - DNA, 3142 bp, Zea Mays
tcccctcgcaggtcccggctggtcaggctcgcgcccgccagccccacccaaacctggggaactcttcgttcgtcctcttcttcccctgtcgcctttcccaaaaggccaaaaccctaaaccatacgcgcctaactccgcgtcctcccccccctccctcgaagcggccaaggcggcggcagcagtgccggcatgggcgcaatgtcggcttcgatttcgtcggtgaattggctagtcgaggatgacatccttctcaagaacgccgtcgagcacggcacctcttcgtcgcccgtctctgaggccgcgaccggagatcttccacaagctggtgcttcgttagagtccttagccagaggagctgtatgtttttcccgtaaattcactcttcatgaaatacaggaccgctggaattcattgctatatgacccagatatctcaacacaagcagcttctcggatggctgagtatgagaatgaactttctacttccgatccagccaaggcacataaacttttcaactcaaaagcaaaggatttttcatttcagaaacggaaaatagacagtgtaaagaatctatattatgcgatgagaaaaagagtacgcaatgatccacgcaacagtggcgaccttggatttcttgtcccctgttcgtgtacggcaattggtagtgagtgtatctgtggaggcctacctaacaatattgaaccagagctgaattcagtaagccgctatgggcaagtaggttcaaggtacaccattggacattcatattctgaaatgaacgaacatgcttttcatacgaagcatactgaaagcatgacaagagatggggatggcaccagtaatgttgtgtatggctactcagatgtaggccaactatatgaacatcatgcgtacacagcgaataatcatgggaatagagaagggaacaatctttctctaaagagtatcacaaattttcaggattctatgcagtttcagcagttggacaacaatcaatgtggtaatggggtggtagactcaaaggctttggtgatccctaaccatttcagtggaagtgtgcaggaacctatgcctctccaaatgattggtcaacctgagggttctgaagcaccaggtggtgcaatcttgagtcttcagcgaagcgacaggctcgctcttgctgatgataaggatgtaaaatcagaagacagggaccctctcacatttgaagcgcatttagatggtgggatatctggtttagatcacgctactgagtttatggacttcccatatttcactaatagtgaagaccttgatatcctgaatagtgaaaatcttttgaattctccaagtgagggaatccaggaggatttagacgatactgcattagttgttcatggggttagatcaaccatgcaaaatctggttcatgctgatgaagccaatatgtcctgtgatcaaatagatcttggtgatgtgaaaaataatgtagatgcttctggtataatcttatttcctacttcattagtagtgccctgtcctggcctgtatgttgagtgcaaattgaacacagaagatactgaaattccttgcaacgacgatgtttctacaccaacagagtatcctcttgaatgctgtacttctacctttgggcagaaatctgagaatactatctattccgtctcccctgcaatcagccctccatcaattgctgaacagcccaacccatccacttcagaacaaaaagaagattcagtggctcatgacgaaggtggtgtcctaggagctaaaccatcagaaggtgctttaacagttggaggccttttgcctggtaacattgacacaaatgatgcaaacacatgcatgctagctttgccttcttttagcactgctggatttggtgaaggatcaccttgtagtttaggaccacacgagagctttgataactctcatggtttgactttgcaaaattcagttcaagctcctgatcagatgcaacacaactcacttgatggtaaaccagaattaggtgacaaggctgctctacagaactgtatgccatcaaatgcactgcccgatttggatattcagaacactattgcaaatgcgccaacaccagctcaagcagaagaatgccctgactatgaaaaagatgttccaaattactatgatctagaagctttgattcttgaccaggatcttatcccgtgggaccaagactccgattttatgcatcctgaagttaccggatttcctcacccggaaagcaggaaggcattgattagattggagcaaggtgctcggtcttgtatgaacagagctatcatgtcgcatggtgcctttgcagttatctatggattgcacttgagatgctacataaaggatcctgaggttactcttggaagagagacagaagacattaaagttgacattgatttaggaaaagaagggagggcaaataagatatctcgccgacaggcggttatcaagatggatgaatctgggtattttcatattaagaacactggaaaatgtccaatctttgttaatagcaaggaaataccaagctgcaaacgcatcaacctaagctcagactcattaatcgagataaaggacatgaggtttattttccatgtaaaccaagaggctgtgaggcagtacattgatcgtgacctgaagccagaacgctaatttcccctggctttccagtcagcagcagcctgtgagtgactgcctcattaacagcaatagaagtagcatagcagtaaatttgagtaagcattgctcgtttaggatgttccttcatatgatgttaacaagttaggttcacttggctccggtctgtaaatggttgtagtttgttgcgttttctgtctgtttggcgggcataaatcatgcatataaccagcgcatttgcttccagtttgtacctacactcccaggaatgatttcatttgtaatactggcaccctagattgtggtgactgccgccaagagcaagaggcaaccaatgcaataaagtgcggaaaagaatcaatagaagggtagattctagggtagaacaggaggagggtgcacttgtgcaagaaaccattcggttcttgcgacgctataagcataaactttattggtttttatttatataccctgatgatcttgaagc

SEQ ID NO: 47474 - DNA, 2686 bp, Zea Mays
tcccctcgcaggtcccggctggtcaggctcgcgcccgccagccccacccaaacctggggaactcttcgttcgtcctcttcttcccctgtcgcctttcccaaaaggccaaaaccctaaaccatacgcgcctaactccgcgtcctcccccccctccctcgaagcggccaaggcggcggcagcagtgccggcatgggcgcaatgtcggcttcgatttcgtcggtgaattggctagtcgaggatgacatccttctcaagaacgccgtcgaggctggtgcttcgttagagtccttagccagaggagctgtatgtttttcccgtaaattcactcttcatgaaatacaggaccgctggaattcattgctatatgacccagatatctcaacacaagcagcttctcggatggctgagtatgagaatgaactttctacttccgatccagccaaggcacataaacttttcaactcaaaagcaaaggatttttcatttcagaaacggaaaatagacagtgtaaagaatctatattatgcgatgagaaaaagagtacgcaatgatccacgcaacagtggcgaccttggatttcttgtcccctgttcgtgtacggcaattggtagtgagtgtatctgtggaggcctacctaacaatattgaaccagagctgaattcagtaagccgctatgggcaagtaggttcaaggtacaccattggacattcatattctgaaatgaacgaacatgcttttcatacgaagcatactgaaagcatgacaagagatggggatggcaccagtaatgttgtgtatggctactcagatgtaggccaactatatgaacatcatgcgtacacagcgaataatcatgggaatagagaagggaacaatctttctctaaagagtatcacaaattttcaggattctatgcagtttcagcagttggacaacaatcaatgtggtaatggggtggtagactcaaaggctttggtgatccctaaccatttcagtggaagtgtgcaggaacctatgcctctccaaatgattggtcaacctgagggttctgaagcaccaggtggtgcaatcttgagtcttcagcgaagcgacaggctcgctcttgctgatgataaggatgtaaaatcagaagacagggaccctctcacatttgaagcgcatttagatggtgggatatctggtttagatcacgctactgagtttatggacttcccatatttcactaatagtgaagaccttgatatcctgaatagtgaaaatcttttgaattctccaagtgagggaatccaggaggatttagacgatactgcattagttgttcatggggttagatcaaccatgcaaaatctggttcatgctgatgaagccaatatgtcctgtgatcaaatagatcttggtgatgtgaaaaataatgtagatgcttctggtataatcttatttcctacttcattagtagtgccctgtcctggcctgtatgttgagtgcaaattgaacacagaagatactgaaattccttgcaacgacgatgtttctacaccaacagagtatcctcttgaatgctgtacttctacctttgggcagaaatctgagaatactatctattccgtctcccctgcaatcagccctccatcaattgctgaacagcccaacccatccacttcagaacaaaaagaagattcagtggctcatgacgaaggtggtgtcctaggagctaaaccatcagaaggtgctttaacagttggaggccttttgcctggtaacattgacacaaatgatgcaaacacatgcatgctagctttgccttcttttagcactgctggatttggtgaaggatcaccttgtagtttaggaccacacgagagctttgataactctcatggtttgactttgcaaaattcagttcaagctcctgatcagatgcaacacaactcacttgatggtaaaccagaattaggtgacaaggctgctctacagaactgtatgccatcaaatgcactgcccgatttggatattcagaacactattgcaaatgcgccaacaccagctcaagcagaagaatgccctgactatgaaaaagatgttccaaattactatgatctagaagctttgattcttgaccaggatcttatcccgtgggaccaagactccgattttatgcatcctgaagttaccggatttcctcacccggaaagcaggaaggcattgattagattggagcaaggtgctcggtcttgtatgaacagagctatcatgtcgcatggtgcctttgcagttatctatggattgcacttgagatgctacataaaggatcctgaggttactcttggaagagagacagaagacattaaagttgacattgatttaggaaaagaagggagggcaaataagatatctcgccgacaggcggttatcaagatggatgaatctgggtattttcatattaagaacactggaaaatgtccaatctttgttaatagcaaggaaataccaagctgcaaacgcatcaacctaagctcagactcattaatcgagataaaggacatgaggtttattttccatgtaaaccaagaggctgtgaggcagtacattgatcgtgacctgaagccagaacgctaatttcccctggctttccagtcagcagcagcctatataagcgtgcattcaacacttttcatctgagtctgag

SEQ ID NO: 47475 - DNA, 3315 bp, Zea Mays
tcccctcgcaggtcccggctggtcaggctcgcgcccgccagccccacccaaacctggggaactcttcgttcgtcctcttcttcccctgtcgcctttcccaaaaggccaaaaccctaaaccatacgcgcctaactccgcgtcctcccccccctccctcgaagcggccaaggcggcggcagcagtgccggcatgggcgcaatgtcggcttcgatttcgtcggtgaattggctagtcgaggatgacatccttctcaagaacgccgtcgagaattattgaacactgatggtagcagcagccagcgctctcatattaattatgttttgaagcaatgtcctgcactatgtagcagcgaatcagcagcctaatctaattgaaatggttgctttctctaattcacatactctaccatgttatcatcaaatatagattatttccgttgtccctatattttattctaagcatttttcctcaaaatatactatgaacaactcttgttatttaatctctaggtcagcatattgatctagcaatagttctaataagtgggtgttatggttggtattccatacaaacacagaagcaaaggagaagaggtccagcaggagataagtccagctataaaatagcttagttggttcaagtctgtttagatccggccagtttgttaggacctcccatttgttagggagtcggccaattagcaagaccttatcagattaggtcctagtcaggtccatttatatgaaacaatggatgaaataaagagattgatccctgcttccccgttttcccttaccttctccatcttcacgtctgcccctgtgttcctcgtcggccatcagcacggcacctcttcgtcgcccgtctctgaggccgcgaccggagatcttccacaagctggtgcttcgttagagtccttagccagaggagctgtatgtttttcccgtaaattcactcttcatgaaatacaggaccgctggaattcattgctatatgacccagatatctcaacacaagcagcttctcggatggctgagtatgagaatgaactttctacttccgatccagccaaggcacataaacttttcaactcaaaagcaaaggatttttcatttcagaaacggaaaatagacagtgtaaagaatctatattatgcgatgagaaaaagagtacgcaatgatccacgcaacagtggcgaccttggatttcttgtcccctgttcgtgtacggcaattggtagtgagtgtatctgtggaggcctacctaacaatattgaaccagagctgaattcagtaagccgctatgggcaagtaggttcaaggtacaccattggacattcatattctgaaatgaacgaacatgcttttcatacgaagcatactgaaagcatgacaagagatggggatggcaccagtaatgttgtgtatggctactcagatgtaggccaactatatgaacatcatgcgtacacagcgaataatcatgggaatagagaagggaacaatctttctctaaagagtatcacaaattttcaggattctatgcagtttcagcagttggacaacaatcaatgtggtaatggggtggtagactcaaaggctttggtgatccctaaccatttcagtggaagtgtgcaggaacctatgcctctccaaatgattggtcaacctgagggttctgaagcaccaggtggtgcaatcttgagtcttcagcgaagcgacaggctcgctcttgctgatgataaggatgtaaaatcagaagacagggaccctctcacatttgaagcgcatttagatggtgggatatctggtttagatcacgctactgagtttatggacttcccatatttcactaatagtgaagaccttgatatcctgaatagtgaaaatcttttgaattctccaagtgagggaatccaggaggatttagacgatactgcattagttgttcatggggttagatcaaccatgcaaaatctggttcatgctgatgaagccaatatgtcctgtgatcaaatagatcttggtgatgtgaaaaataatgtagatgcttctggtataatcttatttcctacttcattagtagtgccctgtcctggcctgtatgttgagtgcaaattgaacacagaagatactgaaattccttgcaacgacgatgtttctacaccaacagagtatcctcttgaatgctgtacttctacctttgggcagaaatctgagaatactatctattccgtctcccctgcaatcagccctccatcaattgctgaacagcccaacccatccacttcagaacaaaaagaagattcagtggctcatgacgaaggtggtgtcctaggagctaaaccatcagaaggtgctttaacagttggaggccttttgcctggtaacattgacacaaatgatgcaaacacatgcatgctagctttgccttcttttagcactgctggatttggtgaaggatcaccttgtagtttaggaccacacgagagctttgataactctcatggtttgactttgcaaaattcagttcaagctcctgatcagatgcaacacaactcacttgatggtaaaccagaattaggtgacaaggctgctctacagaactgtatgccatcaaatgcactgcccgatttggatattcagaacactattgcaaatgcgccaacaccagctcaagcagaagaatgccctgactatgaaaaagatgttccaaattactatgatctagaagctttgattcttgaccaggatcttatcccgtgggaccaagactccgattttatgcatcctgaagttaccggatttcctcacccggaaagcaggaaggcattgattagattggagcaaggtgctcggtcttgtatgaacagagctatcatgtcgcatggtgcctttgcagttatctatggattgcacttgagatgctacataaaggatcctgaggttactcttggaagagagacagaagacattaaagttgacattgatttaggaaaagaagggagggcaaataagatatctcgccgacaggcggttatcaagatggatgaatctgggtattttcatattaagaacactggaaaatgtccaatctttgttaatagcaaggaaataccaagctgcaaacgcatcaacctaagctcagactcattaatcgagataaaggacatgaggtttattttccatgtaaaccaagaggctgtgaggcagtacattgatcgtgacctgaagccagaacgctaatttcccctggctttccagtcagcagcagcctatataagcgtgcattcaacacttttcatctgagtctgag

SEQ ID NO: 47476 - DNA, 2279 bp, Zea Mays
gctctcatattaattatgttttgaagcaatgtcctgcactatgtagcagcgaatcagcagcctaatctaattgaaatggctggtgcttcgttagagtccttagccagaggagctgtatgtttttcccgtaaattcactcttcatgaaatacaggaccgctggaattcattgctatatgacccagatatctcaacacaagcagcttctcggatggctgagtatgagaatgaactttctacttccgatccagccaaggcacataaacttttcaactcaaaagcaaaggatttttcatttcagaaacggaaaatagacagtgtaaagaatctatattatgcgatgagaaaaagagtacgcaatgatccacgcaacagtggcgaccttggatttcttgtcccctgttcgtgtacggcaattggtagtgagtgtatctgtggaggcctacctaacaatattgaaccagagctgaattcagtaagccgctatgggcaagtaggttcaaggtacaccattggacattcatattctgaaatgaacgaacatgcttttcatacgaagcatactgaaagcatgacaagagatggggatggcaccagtaatgttgtgtatggctactcagatgtaggccaactatatgaacatcatgcgtacacagcgaataatcatgggaatagagaagggaacaatctttctctaaagagtatcacaaattttcaggattctatgcagtttcagcagttggacaacaatcaatgtggtaatggggtggtagactcaaaggctttggtgatccctaaccatttcagtggaagtgtgcaggaacctatgcctctccaaatgattggtcaacctgagggttctgaagcaccaggtggtgcaatcttgagtcttcagcgaagcgacaggctcgctcttgctgatgataaggatgtaaaatcagaagacagggaccctctcacatttgaagcgcatttagatggtgggatatctggtttagatcacgctactgagtttatggacttcccatatttcactaatagtgaagaccttgatatcctgaatagtgaaaatcttttgaattctccaagtgagggaatccaggaggatttagacgatactgcattagttgttcatggggttagatcaaccatgcaaaatctggttcatgctgatgaagccaatatgtcctgtgatcaaatagatcttggtgatgtgaaaaataatgtagatgcttctggtataatcttatttcctacttcattagtagtgccctgtcctggcctgtatgttgagtgcaaattgaacacagaagatactgaaattccttgcaacgacgatgtttctacaccaacagagtatcctcttgaatgctgtacttctacctttgggcagaaatctgagaatactatctattccgtctcccctgcaatcagccctccatcaattgctgaacagcccaacccatccacttcagaacaaaaagaagattcagtggctcatgacgaaggtggtgtcctaggagctaaaccatcagaaggtgctttaacagttggaggccttttgcctggtaacattgacacaaatgatgcaaacacatgcatgctagctttgccttcttttagcactgctggatttggtgaaggatcaccttgtagtttaggaccacacgagagctttgataactctcatggtttgactttgcaaaattcagttcaagctcctgatcagatgcaacacaactcacttgatggtaaaccagaattaggtgacaaggctgctctacagaactgtatgccatcaaatgcactgcccgatttggatattcagaacactattgcaaatgcgccaacaccagctcaagcagaagaatgccctgactatgaaaaagatgttccaaattactatgatctagaagctttgattcttgaccaggatcttatcccgtgggaccaagactccgattttatgcatcctgaagttaccggatttcctcacccggaaagcaggaaggcattgattagattggagcaaggtgctcggtcttgtatgaacagagctatcatgtcgcatggtgcctttgcagttatctatggattgcacttgagatgctacataaaggatcctgaggttactcttggaagagagacagaagacattaaagttgacattgatttaggaaaagaagggagggcaaataagatatctcgccgacaggaaatggctaatgcctaataatagagaacttgattgcttgactatgttttatgtaagaaggtaag

SEQ ID NO: 47477 - DNA, 2716 bp, Zea Mays
atggatgaaataaagagattgatccctgcttccccgttttcccttaccttctccatcttcacgtctgcccctgtgttcctcgtcggccatcagcacggcacctcttcgtcgcccgtctctgaggccgcgaccggagatcttccacaagctggtgcttcgttagagtccttagccagaggagctgtatgtttttcccgtaaattcactcttcatgaaatacaggaccgctggaattcattgctatatgacccagatatctcaacacaagcagcttctcggatggctgagtatgagaatgaactttctacttccgatccagccaaggcacataaacttttcaactcaaaagcaaaggatttttcatttcagaaacggaaaatagacagtgtaaagaatctatattatgcgatgagaaaaagagtacgcaatgatccacgcaacagtggcgaccttggatttcttgtcccctgttcgtgtacggcaattggtagtgagtgtatctgtggaggcctacctaacaatattgaaccagagctgaattcagtaagccgctatgggcaagtaggttcaaggtacaccattggacattcatattctgaaatgaacgaacatgcttttcatacgaagcatactgaaagcatgacaagagatggggatggcaccagtaatgttgtgtatggctactcagatgtaggccaactatatgaacatcatgcgtacacagcgaataatcatgggaatagagaagggaacaatctttctctaaagagtatcacaaattttcaggattctatgcagtttcagcagttggacaacaatcaatgtggtaatggggtggtagactcaaaggctttggtgatccctaaccatttcagtggaagtgtgcaggaacctatgcctctccaaatgattggtcaacctgagggttctgaagcaccaggtggtgcaatcttgagtcttcagcgaagcgacaggctcgctcttgctgatgataaggatgtaaaatcagaagacagggaccctctcacatttgaagcgcatttagatggtgggatatctggtttagatcacgctactgagtttatggacttcccatatttcactaatagtgaagaccttgatatcctgaatagtgaaaatcttttgaattctccaagtgagggaatccaggaggatttagacgatactgcattagttgttcatggggttagatcaaccatgcaaaatctggttcatgctgatgaagccaatatgtcctgtgatcaaatagatcttggtgatgtgaaaaataatgtagatgcttctggtataatcttatttcctacttcattagtagtgccctgtcctggcctgtatgttgagtgcaaattgaacacagaagatactgaaattccttgcaacgacgatgtttctacaccaacagagtatcctcttgaatgctgtacttctacctttgggcagaaatctgagaatactatctattccgtctcccctgcaatcagccctccatcaattgctgaacagcccaacccatccacttcagaacaaaaagaagattcagtggctcatgacgaaggtggtgtcctaggagctaaaccatcagaaggtgctttaacagttggaggccttttgcctggtaacattgacacaaatgatgcaaacacatgcatgctagctttgccttcttttagcactgctggatttggtgaaggatcaccttgtagtttaggaccacacgagagctttgataactctcatggtttgactttgcaaaattcagttcaagctcctgatcagatgcaacacaactcacttgatggtaaaccagaattaggtgacaaggctgctctacagaactgtatgccatcaaatgcactgcccgatttggatattcagaacactattgcaaatgcgccaacaccagctcaagcagaagaatgccctgactatgaaaaagatgttccaaattactatgatctagaagctttgattcttgaccaggatcttatcccgtgggaccaagactccgattttatgcatcctgaagttaccggatttcctcacccggaaagcaggaaggcattgattagattggagcaaggtgctcggtcttgtatgaacagagctatcatgtcgcatggtgcctttgcagttatctatggattgcacttgagatgctacataaaggatcctgaggttactcttggaagagagacagaagacattaaagttgacattgatttaggaaaagaagggagggcaaataagatatctcgccgacaggcggttatcaagatggatgaatctgggtattttcatattaagaacactggaaaatgtccaatctttgttaatagcaaggaaataccaagctgcaaacgcatcaacctaagctcagactcattaatcgagataaaggacatgaggtttattttccatgtaaaccaagaggctgtgaggcagtacattgatcgtgacctgaagccagaacgctaatttcccctggctttccagtcagcagcagcctattgtggtgactgccgccaagagcaagaggcaaccaatgcaataaagtgcggaaaagaatcaatagaagggtagattctagggtagaacaggaggagggtgcacttgtgcaagaaaccattcggttcttgcgacgctataagcataaactttattggtttttatttatataccctgatgatcttgaagc

SEQ ID NO: 47478 - DNA, 1239 bp, Zea Mays
ggccctcctccaaatgaaaaaggtcaaaaggccgaagacccacgcgattcgagtcataaacctagcacactactttcttttcttcacctcatcaggattcaggaccacccgccggcagcagatacgcccaacaaaaaccaaccacccaccaagccagcaagcacctctccaagcagacagacgggaagggagggcaaccgagagcgatcggcgatgggctccttcctctcgagcttagtcacgccccctccggccgccgacgaccccaactgcgccgtggtggccgcccactccaaggccacctacgacgagcagtgggcggcccacaagagcagcagcaagctgatggtgatcgacttctcggcctcctggtgcgggccctgccgcttcatcgagccggccttcaaggagctggcctcccgcttctccgacgccatcttcgtcaaggtcgacgtcgacgagctcgcggaggtcgcaaggacatggaaggtagaggcgatgccaacgttcgtacttgtaaaggatgggaaggaggaacatggtgcctgtaccattcatcatcctctacctgaagaaactcgcaacgtttctgtctcagaacagcgcgtccgcgactcgaattatggacctcctctttgagcgggcacggcgcaaggctgctcctgttgaggaattccagtggctcggcttgatgctgttcgttgccgttccattcccaggcacgggagcgtggacaggggccttcattgcatctgtactaggcatgccgttctggtcaggttttacagcaaatttcgtgggagtcgtccttgcagggctgctggtgaacttgctcatgaatcttggcctgaaatacgcgatcgtcactggagtagttttgttctttgtctcaaccgtcatgtggagtgttcttcgttcccttaagaagtccgttaatgtcaagtgatctagtagtctttatcaaactgttcctaatcccttcagagttcagccttgcgtaggaagcttagttgtgtaattttaagtggaactttcagcttccaagtggatttacaagagagagtaacactccatatctccagcgagctgagaattggccatgcttatttaagtcgcaagtaaaaatgtctttctcatccaataattgaatatgcgatattttagctattaggctatgccaatcagtgattttgttatccactaaagttctaggaaaagatgtgttcaatgacctttgtc

SEQ ID NO: 47479 - DNA, 733 bp, Zea Mays
gtttcgactgattggtccttacatgcttgaacatggtgcctgtaccattcatcatcctctacctgaagaaactcgcaacgtttctgtctcagaacagcgcgtccgcgactcgaattatggacctcctctttgagcgggcacggcgcaaggctgctcctgttgaggaattccagtggctcggcttgatgctgttcgttgccgttccattcccaggcacgggagcgtggacaggggccttcattgcatctgtactaggcatgccgttctggtcaggttttacagcaaatttcgtgggagtcgtccttgcagggctgctggtgaacttgctcatgaatcttggcctgaaatacgcgatcgtcactggagtagttttgttctttgtctcaaccgtcatgtggagtgttcttcgttcccttaagaagtccgttaatgtcaagtgatctagtagtctttatcaaactgttcctaatcccttcagagttcagccttgcgtaggaagcttagttgtgtaattttaagtggaactttcagcttccaagtggatttacaagagagagtaacactccatatctccagcgagctgagaattggccatgcttatttaagtcgcaagtaaaaatgtctttctcatccaataattgaatatgcgatattttagctattaggctatgccaatcagtgattttgttatccactaaagttctaggaaaagatgtgttcaatgacctttgtc

SEQ ID NO: 47480 - DNA, 1501 bp, Zea Mays
ggacgtcacgtacccaatatacacctataacgcactgcccctgttccccttcccactcaccggctccacggccacgccccaccttccacggccacggcggcgaggacgaacgggagtgcggcggcgaggctccggtttgagattgaggagaagcaagaataatattgtgatgcagcttgtgttaaaatgtagaagtgagcatacctgttgtagttggagtagcagtcactggttgagtggagatatgttttcgcagcgtgctggcgcgaactgcaggatcagttagaagattctaactagatattgtgtcagggaattatatagtagctattcactaagaagtacatttgcagtacacaatgagaagaagcaacgcagtacataatgagaagaagcaacgaatatgaactgcagcatcagttagatgacagagggatggcccaaacactaccaagcactttaactagttgttgctgatgcatcgagctatctcatcatcgagccatgcactttgcctgttttagtgttttgtatgcgtactgattatgctgctcaaagcttacctcctgtttcgcttcagaatccatgtttagaactgacaggccctgcgcgtgctgtcatgatgtatggtcgtgtgatatttgaggcttcattgtatgtgaaaggtgctactagatctgatgacaaagaattgagccttctagctattacttcattggggaatttgtctgatgctcactcatccttgattgagtgttcttgcagtagcagacttagcacactggaactgatgcttggtaaaatcttacttactctgtggaagctacaattcacttgcgggacatggccagctgatggttttcgttgcatctttgtggccaatgctggcatagggacaatggattgtgttgcttgagactgcagatgatcgcgctggtgataagatcagccttgcacggcaggttgtttgtgttgactgtgatagagagctgaaggttgtggccagcattacgaatggttctgctacctatacagatgaaaagggcttcaaacctctgaaaatgggtgcaagctccaaggaacttgtatcggtggcttacgggacgtttggtttgaggaatcacttcatccaaaatatggtggtgcatcatgggtctattcctcaaatttggtggaatgaccccattcctcatattagtactaactaaataactataaggaatgaggtgatgatggatcaactcaatccattccacaaaccaaacaaaaaagtaaggagcgagaagacgatggactagatcattcctcaaaccaaacagcttattagggttggaagtcactgtttattggtcctgcttcccatttgcaccggtttagtttcgttgaaagtgctgctggtgaaaacttaggtggtgtttggtttgccgaaatatcttttccataagagttttctatgtaaaattgtatgcctcatgtttaatctatattttccgtaatattt

SEQ ID NO: 47481 - DNA, 4052 bp, Zea Mays
gacgtcacgtacccaatatacacctataacgcactgcccctgttccccttcccactcaccggctccacggccacgccccaccttccacggccacggcggcgaggacgaacgggagtgcggcggcgaggctccggtttgaggcaacaacctattgacgttggcgactagagtagttgtatggtaaccacaaggatcgggtgatagggcctctccatcacttcctcggcatcactgccgaacgtcggcctcagggtctcttcctgcaccagcgtctgtacgccatcgacattctggaacgggctggcatgtccgactgcaagccctgctccacgcctgttgacacccagacgaagctctctgaggacgacggccccccggtcgtcgacgcgacatcttaccggagcttgacaggcgcactccagcacctcaccttctctcggcccgacatcgtctacgccgttcagcaggtgtgccttcatatgcacacaccacgggagccccacctcaccgctctcaagcggattctgcgctacctccggggcttactcgactacggcctcctcctccgaccatcctcgacgtcggatcttgtggtctacaccgacgttgactgggtcggctgcctcgaaacgcgtcggtccacctccggctatgccgtgttcctgggcgccaacctcgtctcttgggccgccaagcggcagcccgtcatctcccgctccagcgctgatgctgagtaccgcgctgtggccaacggcgtggccgaggcttcctggatgcgctagctcctccacgagctctacagccccctccagcgcgccaccctagtctactgcgacaacgtcagccgtctacctctccactaatcccgtgcagcatcagcgcacgaagcatgtggagatcgacctgtatttcgtccgggagcgtgtcgccgcaggcgacgttcgggtcctcagcgtccctacaacactgcagttcgccgacatcttcaccaaggggctaccatctagtgtattcctagactttcggtccagtctcaacatctgtacatgatagagttgtgactgcgggggggggggggtgttagatacccgtcccttgtaatgggcctggcccagttgtttggtctattaatacactgcccaccctattctagggttagggttttcactattctacaaaacatcatatccaaccgcaccaacgtggggttactctgcccattcgaccaagtgtatttgcgacccactaggggtaattctaggagagccagatcatctttccacctcctgaacctgcccatcatggccctatccaggttgggcttttttctatcctcattgctcaagaccatgttgaaatcaccaaccgccaaccacggacccgagcagtgagttctaatagttctgagatcttgaagaaagtgatttttttcctggttgccttggggggcatagacacaagataaccaccaagacgatccatcttccagacagaagttaaccgaaacacaatgatcattcactctagagctatgagagataatattattcttccatgccataagaatgcctccattcgccccaaccgaaggtgagaagacaaaattatcaaaatctgatcccaagagatggagcacaaacagcctggaaatatccggcattttggtttcttgaatgcaaatgacatcagccttaacattttctaccaaacagcgaaccgcgtcctacctggccgagccattcaggcccctcacgttccaacagagatttttttacggatccattgggaaacaatttaaacacaaccaacaaaatacacataaaagatcaaaccgacagagatgctaccacactctgcaggtcctctgggatggaccaatcggaaagagtcgccaaagctttaagttgcagatcagaaagccatttgttgaagaccttggcataatactcaagaatgttggaggacaacaactcaacctgttctgacctcaggagaccaagctcctttgtaattccaaatttgcctttattgacatatttaggagttgacacactctccaccccaacccctgcgacacgcctgctgcggtgagggagggcactacaagtaggggggtctggggcgacgcttcctcttctgcggcacaccaaggatagaatcgacgggctttgacatcctatcagcgaagcactaataaagcacatgaagaaaaaatcatctaaattgtgttgtcaaattggatccctcccggtctgagctcatctcaacagaccatgaagtttagatttgcacatataaccatatacatgacacaacttctagacaatgatttcacatacagaaaagagcatgcttacatccagtcagattttgactactgtgttgtacgttaatctctctgtttgagtaaagggcactgtttagataatctttgttaaaagaaaaggcgttcaccaagagcacatgaggattcataagtcgaacatgtttactcaatctttatttctttgtttcaatctcactaattcgtggatttatgcatgatcatattgcacatatatatatatctggtcccgtcctcgtgagccagcaaagactgatcgttcgctttcgacccggccgagtccactacgtgatgcttgacgccgcaccgggacaatcctcgtcgtggaccacggaacaccacgttttgtagcgttctggatctttccccaagcgagtcatgagttaacgggatcacggctaggcagcacaccaccatcgtttctagtggctgggcaggccagaggttgatgaaggagtgtgacagctcgcaatagcataattgcataaatatgcgtccggagacatagatgcctgtccatgatggatcgaactagcgttaggacattctactgcaacttaatcaattaactgaatacaatttcttattgtcagttctcgatttgttgtaaaactgtaaaatcaagtacttactgatcctaacactaaagtatttagcattaaaaaacaacaaatacagtcatatattcaatgaaagcagacaatatgttttctagggctaccaagtcagcaaactaaatcaagttaagcagcaaaactgatatgagagaactctttcatgttaagatttagccgttaaaaccatcaaaaacaggatcacatgacaataatcgctaaggcaaattttgcacacattacttgccattaagcaagactcaactgatggttacatcaaaaggttaagataagccagcacatacagaagacaacatcaacaactattctcagagcctcaagatcactaggttcatccggcaaaagtacatcttgaaatcagataacaacatcaacaactattcatagagactcaggatcatcgggttcatccagtaaaagtacatccttaaatccaagttctggaactggtactggtttgtgcctggtcgccctctccagctcagccaactcctcattgctaagtatcattatgctatatgaccttataaacaacagctcccttctagatcctatcacattgtctagtgtgtcaagtactctcagttcatttgatccagacattctgactttgatttcttggaaatatgctggagcggcattactcaaagctgtcagcggcctttcttgtcatagtgccagcaagtgtcgttaacagtgatctcagtcatgaagtaggagccagtggctacaatcaatctcagatgaattctcgtcatcccgaattctctgtcccacaacaaggtatatggatctgaatcgaaatggctttgcaaatatcacgattacttttagaagatatgttatcgctcgatcattatcattcttattaagtaacctttccctggtatcctagttgcggtcttcaaacctggcgagcacaccaatcatatcttgcaaaacaaccataggtctgagagttgtttgtgaacttttagatgaatgtattagcttgtgtaaccgatatataacaacatgtgtatacgacaacaactctagataaagacagcgacagatccaagaatggattaatg

SEQ ID NO: 47482 - DNA, 876 bp, Zea Mays
gacgtcacgtacccaatatacacctataacgcactgcccctgttccccttcccactcaccggctccacggccacgccccaccttccacggccacggcggcgaggacgaacgggagtgcggcggcgaggctccggtttgaggtttgaagaccgcaatcgtgatacaagagaagttatttgataagaatgataataattgagcgatgacatctcttctaaaagcaatcatgatatttgtaaaagcatttcaattcagatccatatagcttgttgtgaggcagagaattcaggatgacgagaatttatctgagattgattgtagccactggctcctgcttgatgattgagggagagagctagcgactgcttgtcatccgagcgggggcaataaataggtgtggatgtcaactatggcactcgagaccttggcctggtgctacaatctgtggcccacatgttttttcaagcttgctgaactttcgaatgagatttaagataattgtgtcagtttagacttcagctctacacatggtgacatactgtgctgcactatatcttgtttttatttgataaggtattacagtttgttgcttgttaaagtctgctgcttagcctggtttagtttcatgtgtcttatacaccgtgttctgaatgcaattcatgaaagagttcagagatgcgtgttagcacaaccagcacctcctccacacaacacattactcacacacactgtttttaatgaagtgtgcagttgtttgatgaagtataatatttatttcccaaactagacctagccaacaggccataacccatagcagcgagccgtctagacctagccagcatggatagttgaacaaattcttctgcgtggtccttg

SEQ ID NO: 47483 - DNA, 176 bp, Zea Mays
gacgtcacgtacccaatatacacctataacgcactgcccctgttccccttcccactcaccggctccacggccacgccccaccttccacggccacggcggcgaggacgaacgggagtgcggcggcgaggctccggtttgaggatgtacttttgccggattaacctggtgatcttgag

SEQ ID NO: 47484 - DNA, 1016 bp, Zea Mays
gacgtcacgtacccaatatacacctataacgcactgcccctgttccccttcccactcaccggctccacggccacgccccaccttccacggccacggcggcgaggacgaacgggagtgcggcggcgaggctccggtttgaggaggcactcgcgttggggtcgctcatcgacgataagaagaaacttggcgactgccagttcgacctctagaaacagccttacgtggccgcatctgccgctatgtacgacaagctctggcgccgccaccgcttggatgtggtgcagagcggctgctccgtgctgtccatcgtcaagcagggggacttcatggtcgtcgccaacatcggtgactctcgggttgttctgggcactgcattcagcgacgacgccatcacgtcgtccagctcatcgtccacctgaagcccaacctgccacgtaagtcgctactgactagccatgaattcttgtgcgctgagacgatagccgttgctgacgttgtatgagtgtccttgaacacgatgtatgtagaggagtagcgcatccagtggtgcaacggtcaggggtactaccttgctgatgagtctggggtgcacttcgttttagcccagccaagagtcatcagtactcggtatgtcgcgcgcgttcgatgactactatatcgaggactgtggcgtcatcttggcgccagaggtgacgcagaggaggaccgacaacaatgaccagttcgtcatcctcgccaccgttggggtagcttttgtgccggcttgcctttaattctcttcgcaaacacacactttgcctttttgtttaagcaaaagcgtatggtggtatgtgtttgatgactaacgatgtacgatgtaatttcttccggtatgtatggaacgtgctctataatgatgagaccatgcaaatcgtgacatatattgaagtctgcatgatactgatggttgcaatgtagtggtgaaacagatagattataaataacaaaatttatgtatggtcagaatcacaaattga

SEQ ID NO: 47485 - DNA, 1396 bp, Zea Mays
gacgtcacgtacccaatatacacctataacgcactgcccctgttccccttcccactcaccggctccacggccacgccccaccttccacggccacggcggcgaggacgaacgggagtgcggcggcgaggctccggtttgagaagtgagcatacctgttgtagttggagtagcagtcactggttgagtggagatatgttttcgcagcgtgctggcgcgaactgcaggatcagttagaagattctaactagtacacaatgagaagaagcaacgcagtacataatgagaagaagcaacgaatatgaactgcagcatcagttagatgacagagggatggcccaaacactaccaagcactttaactagttgttgctgatgcatcgagctatctcatcatcgagccatgcactttgcctgttttagtgttttgtatgcgtactgattatgctgctcaaagcttacctcctgtttcgcttcagaatccatgtttagaactgacaggccctgcgcgtgctgtcatgatgtatggtcgtgtgatatttgaggcttcattgtatgtgaaaggtgctactagatctgatgacaaagaattgagccttctagctattacttcattggggaatttgtctgatgctcactcatccttgattgagtgttcttgcagtagcagacttagcacactggaactgatgcttggtaaaatcttacttactctgtggaagctacaattcacttgcgggacatggccagctgatggttttcgttgcatctttgtggccaatgctggcatagggacaatggattgtgttgcttgagactgcagatgatcgcgctggtgataagatcagccttgcacggcaggttgtttgtgttgactgtgatagagagctgaaggttgtggccagcattacgaatggttctgctacctatacagatgaaaagggcttcaaacctctgaaaatgggtgcaagctccaaggaacttgtatcggtggcttacgggacgtttggtttgaggaatcacttcatccaaaatatggtggtgcatcatgggtctattcctcaaatttggtggaatgaccccattcctcatattagtactaactaaataactataaggaatgaggtgatgatggatcaactcaatccattccacaaaccaaacaaaaaagtaaggagcgagaagacgatggactagatcattcctcaaaccaaacagcttattagggttggaagtcactgtttattggtcctgcttcccatttgcaccggtttagtttcgttgaaagtgctgctggtgaaaacttaggtggtgtttggtttgccgaaatatcttttccataagagttttctatgtaaaattgtatgcctcatgtttaatctatattttccgtaatattt

SEQ ID NO: 47486 - DNA, 1447 bp, Zea Mays
gacgtcacgtacccaatatacacctataacgcactgcccctgttccccttcccactcaccggctccacggccacgccccaccttccacggccacggcggcgaggacgaacgggagtgcggcggcgaggctccggtttgagattgaggagaagcaagaataatattgtgatgcagcttgtgttaaaatgtagaagtgagcatacctgttgtagttggagtagcagtcactggttgagtggagatatgttttcgcagcgtgctggcgcgaactgcaggatcagttagaagattctaactagtacacaatgagaagaagcaacgcagtacataatgagaagaagcaacgaatatgaactgcagcatcagttagatgacagagggatggcccaaacactaccaagcactttaactagttgttgctgatgcatcgagctatctcatcatcgagccatgcactttgcctgttttagtgttttgtatgcgtactgattatgctgctcaaagcttacctcctgtttcgcttcagaatccatgtttagaactgacaggccctgcgcgtgctgtcatgatgtatggtcgtgtgatatttgaggcttcattgtatgtgaaaggtgctactagatctgatgacaaagaattgagccttctagctattacttcattggggaatttgtctgatgctcactcatccttgattgagtgttcttgcagtagcagacttagcacactggaactgatgcttggtaaaatcttacttactctgtggaagctacaattcacttgcgggacatggccagctgatggttttcgttgcatctttgtggccaatgctggcatagggacaatggattgtgttgcttgagactgcagatgatcgcgctggtgataagatcagccttgcacggcaggttgtttgtgttgactgtgatagagagctgaaggttgtggccagcattacgaatggttctgctacctatacagatgaaaagggcttcaaacctctgaaaatgggtgcaagctccaaggaacttgtatcggtggcttacgggacgtttggtttgaggaatcacttcatccaaaatatggtggtgcatcatgggtctattcctcaaatttggtggaatgaccccattcctcatattagtactaactaaataactataaggaatgaggtgatgatggatcaactcaatccattccacaaaccaaacaaaaaagtaaggagcgagaagacgatggactagatcattcctcaaaccaaacagcttattagggttggaagtcactgtttattggtcctgcttcccatttgcaccggtttagtttcgttgaaagtgctgctggtgaaaacttaggtggtgtttggtttgccgaaatatcttttccataagagttttctatgtaaaattgtatgcctcatgtttaatctatattttccgtaatattt

SEQ ID NO: 47487 - DNA, 1449 bp, Zea Mays
gacgtcacgtacccaatatacacctataacgcactgcccctgttccccttcccactcaccggctccacggccacgccccaccttccacggccacggcggcgaggacgaacgggagtgcggcggcgaggctccggtttgagaagtgagcatacctgttgtagttggagtagcagtcactggttgagtggagatatgttttcgcagcgtgctggcgcgaactgcaggatcagttagaagattctaactagatattgtgtcagggaattatatagtagctattcactaagaagtacatttgcagtacacaatgagaagaagcaacgcagtacataatgagaagaagcaacgaatatgaactgcagcatcagttagatgacagagggatggcccaaacactaccaagcactttaactagttgttgctgatgcatcgagctatctcatcatcgagccatgcactttgcctgttttagtgttttgtatgcgtactgattatgctgctcaaagcttacctcctgtttcgcttcagaatccatgtttagaactgacaggccctgcgcgtgctgtcatgatgtatggtcgtgtgatatttgaggcttcattgtatgtgaaaggtgctactagatctgatgacaaagaattgagccttctagctattacttcattggggaatttgtctgatgctcactcatccttgattgagtgttcttgcagtagcagacttagcacactggaactgatgcttggtaaaatcttacttactctgtggaagctacaattcacttgcgggacatggccagctgatggttttcgttgcatctttgtggccaatgctggcatagggacaatggattgtgttgcttgagactgcagatgatcgcgctggtgataagatcagccttgcacggcaggttgtttgtgttgactgtgatagagagctgaaggttgtggccagcattacgaatggttctgctacctatacagatgaaaagggcttcaaacctctgaaaatgggtgcaagctccaaggaacttgtatcggtggcttacgggacgtttggtttgaggaatcacttcatccaaaatatggtggtgcatcatgggtctattcctcaaatttggtggaatgaccccattcctcatattagtactaactaaataactataaggaatgaggtgatgatggatcaactcaatccattccacaaaccaaacaaaaaagtaaggagcgagaagacgatggactagatcattcctcaaaccaaacagcttattagggttggaagtcactgtttattggtcctgcttcccatttgcaccggtttagtttcgttgaaagtgctgctggtgaaaacttaggtggtgtttggtttgccgaaatatcttttccataagagttttctatgtaaaattgtatgcctcatgtttaatctatattttccgtaatattt

SEQ ID NO: 47488 - DNA, 1341 bp, Zea Mays
gacgtcacgtacccaatatacacctataacgcactgcccctgttccccttcccactcaccggctccacggccacgccccaccttccacggccacggcggcgaggacgaacgggagtgcggcggcgaggctccggtttgagatattgtgtcagggaattatatagtagctattcactaagaagtacatttgcagtacacaatgagaagaagcaacgcagtacataatgagaagaagcaacgaatatgaactgcagcatcagttagatgacagagggatggcccaaacactaccaagcactttaactagttgttgctgatgcatcgagctatctcatcatcgagccatgcactttgcctgttttagtgttttgtatgcgtactgattatgctgctcaaagcttacctcctgtttcgcttcagaatccatgtttagaactgacaggccctgcgcgtgctgtcatgatgtatggtcgtgtgatatttgaggcttcattgtatgtgaaaggtgctactagatctgatgacaaagaattgagccttctagctattacttcattggggaatttgtctgatgctcactcatccttgattgagtgttcttgcagtagcagacttagcacactggaactgatgcttggtaaaatcttacttactctgtggaagctacaattcacttgcgggacatggccagctgatggttttcgttgcatctttgtggccaatgctggcatagggacaatggattgtgttgcttgagactgcagatgatcgcgctggtgataagatcagccttgcacggcaggttgtttgtgttgactgtgatagagagctgaaggttgtggccagcattacgaatggttctgctacctatacagatgaaaagggcttcaaacctctgaaaatgggtgcaagctccaaggaacttgtatcggtggcttacgggacgtttggtttgaggaatcacttcatccaaaatatggtggtgcatcatgggtctattcctcaaatttggtggaatgaccccattcctcatattagtactaactaaataactataaggaatgaggtgatgatggatcaactcaatccattccacaaaccaaacaaaaaagtaaggagcgagaagacgatggactagatcattcctcaaaccaaacagcttattagggttggaagtcactgtttattggtcctgcttcccatttgcaccggtttagtttcgttgaaagtgctgctggtgaaaacttaggtggtgtttggtttgccgaaatatcttttccataagagttttctatgtaaaattgtatgcctcatgtttaatctatattttccgtaatattt

SEQ ID NO: 47489 - DNA, 2662 bp, Zea Mays
cctgactctatcaaccgcctcgattttttctgctaggggtggttcccgccggggctcttgccgatcaaccggacgcagagacgggagtaggaacacctccatgaacgaccgctgcggaacccgacaaacgacctctccaggactcgccgctgaagaggaggggctcgtcgcagcccagcactgagccttggagcggccagacggtacgaacgggcaagccagaggagacaaggacgggggaacccgacgccacaggggaaggggaggtggtttccgtacccgaaatgggcgccgacgaggggctggagggaaggggcgggcaccggtgcggaggagggggaggcggaagggcgaggagccgaagagaccgtcgtcttctctctccaataacagactgtcatcttctctaataaataaaaagataaatctaacaaaacaattcatactaatgagtgtcatatagagcaaaatttatccttttgaatacttttgtttttcattgatataatgaattatatcatataaatttatcttagtccagtctaaaaaaatttagcccccctcctgccgttaatccattcttggatctgccatttttttatttagagttgttaccatgtacacatgttacatatctgttacataaactaatacgttcatctaatagttcccagacaactcttggaggtatggttgtgctgtaagatatgattggtgtgcttgccaggtttgaagaccgcaatcgtgatacaagagaagttatttgataagaatgataataattgagcgatgacatctcttctaaaagcaatcatgatatttgtaaaagcatttcaattcagatccatatagcttgttgtgaggcagagaattcaggatgacgagaatttatctgagattgattgtagccactggctcctgcttgatgattgagggagagagctagcgactgcttgtcatccgagcgggggcaataaataggtgtggatgtcaactatggcactcgagaccttggcctggtgctacaatctgtggcccacatgttttttcaagcttgctgaactttcgaatgagatttaagataattgtgtcagtttagacttcagctctacacatggtgacatactgtgctgcactatatcttgtttttatttgataaggtattacagtttgttgcttgttaaagtctgctgcttagcctggtttagtttcatgtgtcttatacaccgtgttctgaatgcaattcatgaaagagttcagagatgcgtgttagcacaaccagcacctcctccacacaacacattactcacacacactgtttttaatgaagtgtgcagttgtttgatgaagtataatatttatttcccaaactagacctagccaacaggccataacccatagcagcgagccgtctagacctagccagcatggatagttgaacaaattcttctgcgtggtccttgcctctttgtgtactgttaattaattttgtttcatcaatcgtgcctagacctgctagatagcgttcattatttaactgataggttaatcaatttttatagcctccttcaccaattatttattaggtttgttgataaaattattttttatattaatagggataggatgaatagtttttaaattaataaaaagataattctaacaaaacaatttataataataagagttatatatagcaaaatttatccttttcaatacttttgtttttttatatataatgaattatatcatttaggtttttttattctagtctaaaaaattttagctccctcctcccgttaatccattcttagatttgtcactgtctttatctagatttgttgtcgtatacacaagttgttacatatctgttacacaagataatacattcatataatagttcacagacaactttcggaggtatgattgtgctccaagatattattgatgtgcttgccagatttgaaaaccacaatcgtgatagcagaggaaaattatttgataaaaatgataatgatcgagcgatgatatttattctgaaaacaatcgtgatatttgcagagtcatttcgattcagatccatataccttgttgtgagattaaggattcgggatgacgagaattcatctgagattgattgtaactactggctcctgcttcatgactgtggtcattatttacggcacttgatggcactatgccaagaagggtcgctgtcaggtttgaatactgtcgctatagcatatttctaggaaatcaaagttagaagacctggatcagataaactgaaagtccttggcacactagtcaatccgataggatctaaaggcagttgttgcttgtaagatcatataacatattgatacttagtaatgaggagctgactaagctggagaagcggccggacgtaatccagtaccagttctagaaacaggatttcaggatgtagttttgccgaatgaacccgatgatcctgaggttctgtgaatagttgttaatgctgtgttctgatttcaggatgtacttttgccggattaacctggtgatcttgagactgaaaatagttgctgctgctgtgttctgtatgcgttgacttatcttaaccttttgatgtaaccattagttgagtattgcttaatggcaagtaatgcgtacaaatttg

SEQ ID NO: 47490 - DNA, 1189 bp, Zea Mays
agaaaacacatctactacatctctccctaagcccacctgctatccttgcacaatgcgtagtattagataagtatcaccgagattcttgaactatatttttggatggagtgagtagtatttaaagaagagccttatatgcaatttcttttgtttgaataatattttcaacttaaattccttttttgcatgcgtgacatttattcttcgtaatatctttttccatggatctgacttgtgagtcatttttataaaccaacgctaaacatgaatccatgtttcttacttgaaaaccccgaacaaacatcattagcaggaggcactcgcgttggggtcgctcatcgacgataagaagaaacttggcgactgccagttcgacctctagaaacagccttacgtggccgcatctgccgctatgtacgacaagctctggcgccgccaccgcttggatgtggtgcagagcggctgctccgtgctgtccatcgtcaagcagggggacttcatggtcgtcgccaacatcggtgactctcgggttgttctgggcactgcattcagcgacgacgccatcacgtcgtccagctcatcgtccacctgaagcccaacctgccacgtaagtcgctactgactagccatgaattcttgtgcgctgagacgatagccgttgctgacgttgtatgagtgtccttgaacacgatgtatgtagaggagtagcgcatccagtggtgcaacggtcaggggtactaccttgctgatgagtctggggtgcacttcgttttagcccagccaagagtcatcagtactcggtatgtcgcgcgcgttcgatgactactatatcgaggactgtggcgtcatcttggcgccagaggtgacgcagaggaggaccgacaacaatgaccagttcgtcatcctcgccaccgttggggtagcttttgtgccggcttgcctttaattctcttcgcaaacacacactttgcctttttgtttaagcaaaagcgtatggtggtatgtgtttgatgactaacgatgtacgatgtaatttcttccggtatgtatggaacgtgctctataatgatgagaccatgcaaatcgtgacatatattgaagtctgcatgatactgatggttgcaatgtagtggtgaaacagatagattataaataacaaaatttatgtatggtcagaatcacaaattga

SEQ ID NO: 47491 - DNA, 3643 bp, Zea Mays
cagagatcgcggtaaagctagcgttgcggtgagggagactctgagacgacggcgtcggcgtgcgtgctccacgcaacggctcatggctctagggtttcctctccgcctacgcctatatagcggcactctctccccgcccacctgctcaccctctctcctctgatctccctggttcctacccactgccaaggaaaaaccaccaaccccagacccagccagaggcctctgcctcagcccgtcttcttcttcttctcccatggcttaccgcggcggcggcggccggggaggaggaggccgcgacggggaccagcagcgcccgccgcacgtccacggacgaggagccggggggcccggaggcggccgcaccttcgtctggcctccaccgccttcttccacgccgcggccggtgccgccgtaccaccaccaccaccaccaccaggtgcccatgggctaccgcgcgcccatagtgctgccgcaccaggccgcgtacggggtgccgatggccgtgtaccggggggcgccggcgcccgcgtacagggtgcccgcgccagcgtcccctcggcctcgcgtctccttctcgcctgcgcctccggcgtctccggtcactatcagggcgccgccgccatcaccgacgacgccgccagctgctcccaccactccggcgcctccacgccagcccgcgcccgcgcccgcgcccgagccggccccggccccgccccccgcgccgtcgctcgcggccctggcgaaggaggtcgagaagaagctcttcgtctccgagaccgcgctggcgccggccgcggcggcggcagcggcagcggcagcgcagggcacagctggtgccggcgctgacgacgcggcgtcggacgtcgacctggcgccggtctccaagaaggggctcgcgcacccggctcggccggccctcgccaccgtggggaggaatgtgtttgtccgcgcgaaccacttcctcgtccacgtcgccgacaacaacttgttccactatgatgtcgctattaatcccgagtcaaagtcaagagcaacgaacagggaagttctcaatgaactcatcaagttgcacgggaagacatctctgggcggcaaattgcctgcctatgatggcaggaagagtctctatactgctggttcacttccttttgaatcagaggagtttgtggttactcttgttgatcctgaaaagaaggagaaagaaagggtggagagagagtacaaaatcacaattcgaattgccgggagaacagatttctaccaccttcagcagtttctgcttggaagacagagggatatgcctcaggaaaccatacaagtacttgatgttgtcctcagggagtcgccgtcttggaattatgtcacagtgtccagatcctttttctctacaacttttggtcacagaggtgatatcggtgaggggcttgagtgttggaggggttactaccaaagcctgcgcccaacacaaatgggcctttcgctgaatatagatatttcagcaacatccttttttaagcctgtgacaattatcaaatttgtggaggagttcctgaacctgcgtgatacatctcggccgttgtttgacagagatcgtgtgaagataaagaaagcattgcgcggtgtccgaattgaaacaactcaccaacaggaccaaatcagaagatacaagataacagggattactcccatccctatgagccagctgatattccctgttgatgataaaggaacaagaaagactgtagtgcagtacttcttggacaaatatgactacagattgaagtatgtctcttggccttgccttcaggctggcagtgattcacgacctgtatatttgcctatggaggtttgcaagattgtagaagggcagagatactctaagaagcttaatgacagacaagtgacgaacatacttagagcaacttgtaaacgtccccaggagagagagaagagcatacgtgatatggttctgcataacaagtatgcagatgataagtttgctcaggagtttggcatcgaagttagcagtgatctagtgactgttccagcccgtgtgctgcctccacccctgttgaaatatcatgactctggtagggagaaaacttgtgcaccaagtgttggacaatggaacatgatcaataagaaaatgatcaatggtggaactattgataactggacttgtttgaacttttcacgcatgcgccctgatgaggtacaaaggttctgtatggatctgactcatatgtgcaatgccactggaatggttgtcaatccacgcccatttattgaagtccggtctgctgctcctaaccatatagagaatgctttgagagatgtacacaagagagccacccaaatacttgcccaacaagcagtgggaaatcagctccagcttttgattgtaattcttcctgaagttagtggttcttatggtaaaattaaaagagtctgtgagactgacattggaattgtatctcaatgttgcttgccaaagcatgctagcaggccaaacaagcaatatttggaaaatgttgcactcaaaatcaatgtcaaggttggtgggcgtaacacggttcttgagcgagccttttcacacgatggtataccttttgtctctgaagtcccaacaatcatctttggcgcagatgtcacacaccccccaccaggagaggactctgcatcatccattgctgctgtggtggcatcaatggactggcctgaaatcaccaagtacagaggtctggtttctgctcaaccacaccgacaagagataatagaagatttatttactgtcagtaaagatccacagatggggcacaacgttaatggtggcatgatcagggacggtgtaagtgaaggtcaattcagccatgttctccttcatgaaatggatgctatcagaaagaaaaggcatcacacaaggcttttccctgaggttcacggaaggcgtgatatgactgataaaagtggaaacattcttcctggaactgtggttgaccaaatgatttgccaccctactgagtttgatttctacttgtgtagtcatgctggcattcagggaacaagtcgcccgacccattaccatgtgctctatgatgagaacgaatttactgctgatgcactgcagtcactgaccaacaatctttgctacacctatgctcgttgcacccgtgctgtatcagtggtcccaccagcgtactacgcccaccttgccgcattccgcgcacgctactatgtggaaggagaaagctcagacggtggctcgacacctggcagcagcgggcagacagtagcccgtgaggggcctgtcgaggtgcgtcaacttcccaagatcaaggacaacgtgaaggacgttatgttctactgctgagctgctccaagtttagcattcaagctttcttattttcgtaacttatccttgatatggagctggttgctcttattttcgtctctcggtattcggagtagctaggctatgactggagcatggtcttgaaggcctaacactctgtttggatgaaatcaatgcaaatactctataattttttttgtatttgtgttctttctgttcgatcagttattatctaatctgctttgctgcttagtctggttgattgacaagttattttttttaagatga

SEQ ID NO: 47492 - DNA, 3753 bp, Zea Mays
ggtaaagctagcgttgcggtgagggagactctgagacgacggcgtcggcgtgcgtgctccacgcaacggctcatggctctagggtttcctctccgcctacgcctatatagcggcactctctccccgcccacctgctcaccctctctcctctgatctccctggttcctacccactgccaaggaaaaaccaccaaccccagacccagccagaggcctctgcctcagcccgtcttcttcttcttctcccatggcttaccgcggcggcggcggccggggaggaggaggccgcgacggggaccagcagcgcccgccgcacgtccacggacgaggagccggggggcccggaggcggccgcaccttcgtctggcctccaccgccttcttccacgccgcggccggtgccgccgtaccaccaccaccaccaccaccaggtgcccatgggctaccgcgcgcccatagtgctgccgcaccaggccgcgtacggggtgccgatggccgtgtaccggggggcgccggcgcccgcgtacagggtgcccgcgccagcgtcccctcggcctcgcgtctccttctcgcctgcgcctccggcgtctccggtcactatcagggcgccgccgccatcaccgacgacgccgccagctgctcccaccactccggcgcctccacgccagcccgcgcccgcgcccgcgcccgagccggccccggccccgccccccgcgccgtcgctcgcggccctggcgaaggaggtcgagaagaagctcttcgtctccgagaccgcgctggcgccggccgcggcggcggcagcggcagcggcagcgcagggcacagctggtgccggcgctgacgacgcggcgtcggacgtcgacctggcgccggtctccaagaaggggctcgcgcacccggctcggccggccctcgccaccgtggggaggaatgtgtttgtccgcgcgaaccacttcctcgtccacgtcgccgacaacaacttgttccactatgatgtcgctattaatcccgagtcaaagtcaagagcaacgaacagggaagttctcaatgaactcatcaagttgcacgggaagacatctctgggcggcaaattgcctgcctatgatggcaggaagagtctctatactgctggttcacttccttttgaatcagaggagtttgtggttactcttgttgatcctgaaaagaaggagaaagaaagggtggagagagagtacaaaatcacaattcgaattgccgggagaacagatttctaccaccttcagcagtttctgcttggaagacagagggatatgcctcaggaaaccatacaagtacttgatgttgtcctcagggagtcgccgtcttggaattatgtcacagtgtccagatcctttttctctacaacttttggtcacagaggtgatatcggtgaggggcttgagtgttggaggggttactaccaaagcctgcgcccaacacaaatgggcctttcgctgaatatagatatttcagcaacatccttttttaagcctgtgacaattatcaaatttgtggaggagttcctgaacctgcgtgatacatctcggccgttgtttgacagagatcgtgtgaagataaagaaagcattgcgcggtgtccgaattgaaacaactcaccaacaggaccaaatcagaagatacaagataacagggattactcccatccctatgagccagctgatattccctgttgatgataaaggaacaagaaagactgtagtgcagtacttcttggacaaatatgactacagattgaagtatgtctcttggccttgccttcaggctggcagtgattcacgacctgtatatttgcctatggaggtttgcaagattgtagaagggcagagatactctaagaagcttaatgacagacaagtgacgaacatacttagagcaacttgtaaacgtccccaggagagagagaagagcatacgtgatatggttctgcataacaagtatgcagatgataagtttgctcaggagtttggcatcgaagttagcagtgatctagtgactgttccagcccgtgtgctgcctccacccctgttgaaatatcatgactctggtagggagaaaacttgtgcaccaagtgttggacaatggaacatgatcaataagaaaatgatcaatggtggaactattgataactggacttgtttgaacttttcacgcatgcgccctgatgaggtacaaaggttctgtatggatctgactcatatgtgcaatgccactggaatggttgtcaatccacgcccatttattgaagtccggtctgctgctcctaaccatatagagaatgctttgagagatgtacacaagagagccacccaaatacttgcccaacaagcagtgggaaatcagctccagcttttgattgtaattcttcctgaagttagtggttcttatggtaaaattaaaagagtctgtgagactgacattggaattgtatctcaatgttgcttgccaaagcatgctagcaggccaaacaagcaatatttggaaaatgttgcactcaaaatcaatgtcaaggttggtgggcgtaacacggttcttgagcgagccttttcacacgatggtataccttttgtctctgaagtcccaacaatcatctttggcgcagatgtcacacaccccccaccaggagaggactctgcatcatccattgctgctgtggtggcatcaatggactggcctgaaatcaccaagtacagaggtctggtttctgctcaaccacaccgacaagagataatagaagatttatttactgtcagtaaagatccacagatggggcacaacgttaatggtggcatgatcagggaactactgattgctttccgcaagaagacaaacagaaagcctgagaggataatattctatagggacggtgtaagtgaaggtcaattcagccatgttctccttcatgaaatggatgctatcagaaaggcttgtgcttctttggaggagggatatctacccccagtgacgtttgtggttgttcagaaaaggcatcacacaaggcttttccctgaggttcacggaaggcgtgatatgactgataaaagtggaaacattcttcctggaactgtggttgaccaaatgatttgccaccctactgagtttgatttctacttgtgtagtcatgctggcattcagggaacaagtcgcccgacccattaccatgtgctctatgatgagaacgaatttactgctgatgcactgcagtcactgaccaacaatctttgctacacctatgctcgttgcacccgtgctgtatcagtggtcccaccagcgtactacgcccaccttgccgcattccgcgcacgctactatgtggaaggagaaagctcagacggtggctcgacacctggcagcagcgggcagacagtagcccgtgaggggcctgtcgaggtgcgtcaacttcccaagatcaaggacaacgtgaaggacgttatgttctactgctgagctgctccaagtttagcattcaagctttcttattttcgtaacttatccttgatatggagctggttgctcttattttcgtctctcggtattcggagtagctaggctatgactggagcatggtcttgaaggcctaacactctgtttggatgaaatcaatgcaaatactctataattttttttgtatttgtgttctttctgttcgatcagttattatctaatctgctttgctgcttagtctggttgattgacaagttattttttttaagatga

SEQ ID NO: 47493 - DNA, 2391 bp, Zea Mays
gtcaatccacccagaacttggcaatttccttcgcacttcactgtcgctattaatcccgagtcaaagtcaagagcaacgaacagggaagttctcaatgaactcatcaagttgcacgggaagacatctctgggcggcaaattgcctgcctatgatggcaggaagagtctctatactgctggttcacttccttttgaatcagaggagtttgtggttactcttgttgatcctgaaaagaaggagaaagaaagttatgtcacagtgtccagatcctttttctctacaacttttggtcacagaggtgatatcggtgaggggcttgagtgttggaggggttactaccaaagcctgcgcccaacacaaatgggcctttcgctgaatatagatatttcagcaacatccttttttaagcctgtgacaattatcaaatttgtggaggagttcctgaacctgcgtgatacatctcggccgttgtttgacagagatcgtgtgaagataaagaaagcattgcgcggtgtccgaattgaaacaactcaccaacaggaccaaatcagaagatacaagataacagggattactcccatccctatgagccagctgatattccctgttgatgataaaggaacaagaaagactgtagtgcagtacttcttggacaaatatgactacagattgaagtatgtctcttggccttgccttcaggctggcagtgattcacgacctgtatatttgcctatggaggtttgcaagattgtagaagggcagagatactctaagaagcttaatgacagacaagtgacgaacatacttagagcaacttgtaaacgtccccaggagagagagaagagcatacgtgatatggttctgcataacaagtatgcagatgataagtttgctcaggagtttggcatcgaagttagcagtgatctagtgactgttccagcccgtgtgctgcctccacccctgttgaaatatcatgactctggtagggagaaaacttgtgcaccaagtgttggacaatggaacatgatcaataagaaaatgatcaatggtggaactattgataactggacttgtttgaacttttcacgcatgcgccctgatgaggtacaaaggttctgtatggatctgactcatatgtgcaatgccactggaatggttgtcaatccacgcccatttattgaagtccggtctgctgctcctaaccatatagagaatgctttgagagatgtacacaagagagccacccaaatacttgcccaacaagcagtgggaaatcagctccagcttttgattgtaattcttcctgaagttagtggttcttatggtaaaattaaaagagtctgtgagactgacattggaattgtatctcaatgttgcttgccaaagcatgctagcaggccaaacaagcaatatttggaaaatgttgcactcaaaatcaatgtcaaggtggtggcatcaatggactggcctgaaatcaccaagtacagaggtctggtttctgctcaaccacaccgacaagagataatagaagatttatttactgtcagtaaagatccacagatggggcacaacgttaatggtggcatgatcagggacggtgtaagtgaaggtcaattcagccatgttctccttcatgaaatggatgctatcagaaagaaaaggcatcacacaaggcttttccctgaggttcacggaaggcgtgatatgactgataaaagtggaaacattcttcctggaactgtggttgaccaaatgatttgccaccctactgagtttgatttctacttgtgtagtcatgctggcattcagggaacaagtcgcccgacccattaccatgtgctctatgatgagaacgaatttactgctgatgcactgcagtcactgaccaacaatctttgctacacctatgctcgttgcacccgtgctgtatcagtggtcccaccagcgtactacgcccaccttgccgcattccgcgcacgctactatgtggaaggagaaagctcagacggtggctcgacacctggcagcagcgggcagacagtagcccgtgaggggcctgtcgaggtgcgtcaacttcccaagatcaaggacaacgtgaaggacgttatgttctactgctgagctgctccaagtttagcattcaagctttcttattttcgtaacttatccttgatatggagctggttgctcttattttcgtctctcggtattcggagtagctaggctatgactggagcatggtcttgaaggcctaacactctgtttggatgaaatcaatgcaaatactctataattttttttgtatttgtgttctttctgttcgatcagttattatctaatctgctttgctgcttagtctggttgattgacaagttattttttttaagatga

SEQ ID NO: 47494 - DNA, 1154 bp, Zea Mays
cgaagaccgttggatgtggctggatcgagcggaccacattcaatgtggggggcgctgatgggggcaatccgagacgaggccgtatggaccaatcagcgcgaggcgttgggctctcctcgtctacgtgccgtcgccacaatttaagcacggcttcctccgccacgacctccacacatcaccagcgcacagctctcctcatcggcgcacccgagctcgccctctccttcctcatcgaggcccgagtcctgctctgatggcgaccgacgtggctgagactcccgcgccgttggtggatgcggcccctgaggcgcccgcggacaccccggcggcgcctgctgttgacgcgaagccggccaaggccaagaaggccacagcgccgaagaagcgcgccagcccgacccatccgccgtacgccgagatggtctcggaggcgatcgcgtcgctcaaggagaggacggggtccagcagctttgctattgccaagttcttggaggacaagcacaaggacaagctcccgcccaacttccgcaagcttctgaacgttcagctcaagaagctcgtcgccggcggcaagctgaccaagccaaaggccgccccgaagaagaccaagaccggcgtgaagaagcccaaggccgctgccaaaccgaaggccaagtcccccgcgaagcccaagcccgccacaaagcccaaggcggccgcgaagcccgcttccaagccgaaagcagcagcaaaacccaaggcaccagccaagcccaaggccaagcctgctgccaaggcgaagcccaaggctgccggcgctaagccgaagccagctgccaagaaggccggccgccccgccaaggcggccaagacgtcggccaaggccacgccaggaaagaaggcgccggtggccaagaagcccgcggccgccgcgaagaaggcgccggtagccaagaaggccgctccggcgaagaaggcggctgcccctgcccgaaaagcgccgtctcggaaggcgaagaagtagaggaggggtaggcgtcggagaaatgtagggtttggttctcgtattacgctagatgtttgctctccctttagcctaggtggtgtctgtgtgtgcaatgttgtaaatttgatatcggatgctgggaacactaagtcaatctttcagtaaaaac

SEQ ID NO: 47495 - DNA, 2670 bp, Zea Mays
atacagtaaaccattgtatacaattaggttacataaatggtaggcggatcataatccaaccatcaagacttatgtctaagctacactaagcgcttggtgttcatggctgatagaacaccactgctgccattttttgagacaacatatgcaaaagcagcatacaaacataattcatttataatttgaacggatccaaaagtagcatacacacatagttcattacgaatctaagaaacacgtaagcaagtactgcttgcaaacaaaagcgcataatctgtttgtcgggcaatgatattagtatcacaagtgacattttcgatgttcactaaagcgccaagttttctcttttctgactaaacgccatcttcgctagacctacgaagaaaagaagctctttaggaatcctttaaaaatgacatacaaacgatagattggtaatactgtgaacagggtccactattgaaagaatcaagaataaatgacgcatatggcatgtctagtgattttacattgcagaagttgattttgaaacctatacttgtctctatagcttaactaacgcaggacgtgatgaatttttgcttgttagaggcaattcggcaatccaaaattcacacacacttgatctaggtctaatacatgactacagaaaatggcccttcttttgcaaatagcacagctatgttggaattaaattggtttctggttgcataggacataaacatacacaagtgaaatatttcccatagttccatatcataggaagatgtaaagaaacaaacagatagttcgaaccatgttgaatggggcaaattttattttcgagagatcagctgcacacggacacgagccagaggagggcctaccagagcataagacaacaggacgtggataaaaaggtaaaatctatatgctattgtgacatgatattttttagatggttgctaatattatttgggtccaggatgcttaacgttttaagtgcaaagcacccagtctgagtccaaatattactatgaaaatgaaaggatatacacaaccatactgaaagaaaagaagggcttggttatacgggctccaagctgccaaccacttacatgcgctctgacctgtccttttcctggtggtaagctgtcgaaggatggttttcagctgtgtttttctaatagttagttcaccaccacggcaaggaaaggaaacagaaggatagaaaacataataaagatagaaatttgagcggtttaaaacgatatttgatcaagaaatttcaagcaatacacactcgagtaagcaaacaatattaatctccagcttcctatatagaaagtgaatgttaatgttactaacctcagcttctaaaatctccaggctcagaatccctccagaaagtatttcgaacccaagttatttcaagcaatacacactcgagtaagcaaacaataagcgagagaagagtcaactttatctaaaagcaattatggtactatggtaaaaaataatggattggtttgaaatcaacaccaaaaataggcctttcaattcttgtcttacattcttttaaagacctaatgctcctcaattagttatgcaaattgagaatcgcaggaggcagctgaagcagttagtaacaaaatacaaaaccaaaaaaatccagaacacaatgattcatccaagacaccataatcatcgttctcacaagcataagtataattgtatgatcagtgccttcaatagtgttgagaagagggtcattttttgttgctagatggccaggttcaacacatgcccatgtatattgattattgaatgatgctttgctcgggcattgaaataaatagtttccactactcctgaacatgaagtatatttcatttgttctcagcttgatttatgtacaaatttcgtgcatgtactgttgagagtttcctatgtatttagcaattttctttattttgaactactcaagaaaatattatcttattgatgatgattattcgaatagaaaggctttctaaaagcttgcccaatttgagcacctgccaaggggtgcttttggccattgtaatatactacatatcattgaagttaaaaataccctatgcaacctctggtcgcgtatacatatttccaccacacaaatctggacctttttagccaatcaaaacaaaaggaacataatcatagattgtcgctcttacattacatcacgacgactaaaaccattagcattcttgtcagctcctatacacaagatatgcaagctgaaacacgaattggattgtataaactctgaccttgtcagcagcagcctgtagagtctcatggtcaccccattgactgtttcttgtttgtcacaataagttaagagtggaacccagtgagaccactgataaaccaaaagcaaatgaaacaatatgtcatgactgccaatgaagatggagattctttaatggctttccccactgaataatgagccatattcatgagaagcctgatgcacaatccacacattgcacatacatagatacaaagcactaccgttgaagaaacaaaatagaagtacctgtaattttgctgcaaaggaagacaaatgcagataagcctagactgttttgtaggaacagctaccaggttgtattctaaaaaaatccataacttgtttcctctgag

SEQ ID NO: 47496 - DNA, 1155 bp, Zea Mays
gtcagtgtcgccctagaagatgggtccacgcctaaaccgctcgcccccgtcgtgcccccgctccccccacatgattctcgatcctggcccacgaccgagatcgccgccgagaaccccctgacgagaccgtttgcagccgtcctctccaagacgagatcgccgtcgagccccctcccctcgagccccgtaccccgcccaagattccagatctacgcccgatgtgggcgtgtggttgcgtcgagcgcgtggccgcgagcctcttcgtcgtcccccacgccgttggaacaccgctgtcatcatcgggggtcacagtcgtggtgggcctcgcactcatctgtcgtcgccctcaacgccgcatcgccctcttcatcgaaccatagctcttcgcctacatctccggcagcagatgagtccaccatctcctcaaatctgatggccctcggcgacagcgccaccacgtcgtcggtggccaagctctccatctccggcgcggacctcacggtgcttctacatagttgcctcagctgcaaccagcgactgaaacaacctcctcttcgaccatgcttcgcacctgcccacgccatcggtcgctctctcggactacaccgacaccgatgccacgacgacccctcctgccctcgtgctctcctcgtcgtcctcttcccggtgctttcgcacccatgggtgcatgcattcgtctctctcatcatgttcccatgctttttagttcctcacatggttcatgcccgtcgattgattcaatgttcttgtctctctgatgccataggaggacgaggaggtggctgacgggcttcgattggcggatggcgcgccggatcagagcagtcgagcgagctttggggatttcctaatgacacttcagatgaatcgaccaaaagaatctccctgtagcaactacatatttatttttcttagaccctccttacctgtgatgcccattttactggtttgcctacaatgagctctgatgtcaatggagaatttgtcatggataccaaatctgtcctgtcagtaatgccagtgtttgatttctggatccaagttgttgaagtcccaaatgtctcttgggaggatattggtgggctggagaatgtcaagagagagctctaggaggtagctggaatgccacctcgg

SEQ ID NO: 47497 - DNA, 749 bp, Zea Mays
ctgtgcaaatgtatctttgtttctttcttgctttcatgtgctgatgtgttctacttttttcttcacttggtgtgctaatgttacatgtaccaaccttctgcagggaaccagcatccagtgcttcaggtagggcagcatctggcatgtcaagtgatgaaaagaaccagcgtcagagagatgctcgagttcttatgccgccaccacgctcattagccccaaatagaggcagacatgcagataaacgtgcgatatccagctcgagcagtacttcaaacagcacaagcggcgaatcatttaaaaatagaagagtaccaaatcgccccgcggataataacagtaatctgagctcaaattctgatgttcataaaccacggcgcaaaaggaggcataagaagaaaagaaagctggcatgatgaatattcccaaagcgcgtgaactgtggggggtacggtggaaattcagattcccagcgaagtttggactttcagcatggccaatttggagaagttgaaaaaaaagaagacacagcatgtgcgatgtgtctgagcaagttgattgattctgtatcctcactcctaaatcctgatgtaaaacgactgtacatccatctgttcatggatatcacttgcggtggtcagatcttgccagtgtaccgaatgcgtgtccgtcatttccgccgtgaaattatgtatgcttttttcccccgatggtctccgatgattctgtagtacttgggaagcgcggaacag

SEQ ID NO: 47498 - DNA, 2182 bp, Zea Mays
ctaaactttagcacttcaattcatatagctaaagtttagccggaagctaaagtttatcccgtgagattgaaacggggcctaaaactggcgtgcgcctagagagaggcgtgaaagccgtagaccgtagtacgtgttttatctacagccaccgtccacacccccatttttttatctccgcttccactgttccaccaaaccaagccgagaaatttctcctaaatttcagatcaaatcctcctcctcctccccctctccctctccgaggattctgcccagcagcgcggcgatccgcctcgatccggaatggagcgcgtcttctccatggaggagatccccaacccctactgggcgcgatgaaccggtgcccatctgagtggtacttccagaagttcctcgaggaggccgtgctcgacagtccgggtcccgtcgccggcgtgggtagaagcagcggacaagctggagttgaggcggcggagagcaagccgctgggcgccgcggcgccggcgtccgtctcgagctcggtcgttgaccccgtcgagtacaacgcgatgctcaagcagaagctggagaaggacctcgctgccatcgctatgtggagggcttctggtgcagcacctccagatctttctgcgactgctgcttccttgccaagtgtcggtgctccgcatgcagctcctcttaaacccgtcggaggtgatcacccaatcatcattttgccgcgtcttcaaatttattatgaaacttggctcaaatgtgtgaatgaccttatgtctcttgtctcagtgctctatactcatgtaataggtattagatcttcggttcctctctgtccttgtaatcatcaggttgcttgcaaggaaccatttcgaaaatgcaggagagctgtgtttctctcttgcgtttctttgcattaagaagaaaagcagcgaaaatccttacaaacatacacaacacaccaagcagatccatctcgcggctgacttgtaaatcatgggggaacttgatattctgttgagtttttaaaataaaacaacttgtgattgtgaagcttttaactatgatctgacttttatcttgtgcatgtatcaggtactgaaagtctagttcaaaacatgctagctggtgctccagtaggggggtcaggtccacatgtagtacaaattgctgatatccctgttaagcaaaccactagctcttcctcacgagagcagtcagatgatgatgacatggaaggcgatgctgagacaaatggaaatggaaaccctgttcaacaaagacaacagagaaggaagcaatccaaccgggaatcagccaggcgttcgagaagcagaaaggcggctcacttgaatgaactggaggcacaggtagcacaattaagagtcgaaaactcttcgctgctaaggcggcttgctgatgttaaccagaagttcaatgaagctgctgttgacaatagggtgctaaaggcagacgtcgaaaccttaagagcaaaggtgaagatggcagaggactcggtgaagcgggtaacaggcatgaacgcattgtaccctgccgtgtcggatatgtcttccctcagcatgccattcaatggctccccttctgactccgcctctgatagcaccgtcccggtacaagatgacctgaacagttacttcgccaacccaagcgaaatcggatgcaacaacggctacatgccagatatagcctcctcggttcaacaggacgacaattttgtcaacgggtatcaggctgctggcaagatgggcagaacagactcgctgcagcgggtggcaagcctggagcacctccagaaaagaatgtgcggaggcccggcttcatccggctcgacctcctaggtttcatatgaaaaagtccctggtgcctaacggcaagaatgctaaattaacaatttcaacatgctttgtactggacattgataatcctgcgatgcgcattagtgcgttatggacttgtgggtcaattgctatttggcgtgtgctggctgctcactgtagtgagcagaacaagttccagtttctatcgaagagcaccctctccttttcgctagtgacttatgaatggtcgatggtttattagcaacattgtgtctttcgcaagttcagtaatgaatggtcgacagggatgaaaataaatacttataaagagatctataattgtctttttt

SEQ ID NO: 47499 - DNA, 915 bp, Zea Mays
ccccatttttttatctccgcttccactgttccaccaaaccaagccgagaaatttctcctaaatttcagatcaaatcctcctcctcctccccctctccctctccgaggattctgcccagcagcgcggcgatccgcctcgatccggaatggagcgcgtcttctccatggaggagatccccaacccctactgggcgcgatgaaccggtgcccatctgagtggtacttccagaagttcctcgaggaggccgtgctcgacagtccgggtcccgtcgccggcgtgggtagaagcagcggacaagctggagttgaggcggcggagagcaagccgctgggcgccgcggcgccggcgtccgtctcgagctcggtcgttgaccccgtcgagtacaacgcgatgctcaagcagaagctggagaaggacctcgctgccatcgctatgtggagggtacggccacttgcctttagctgcagctcacctgcaatactgtttgcttcgaatagtcagagctcgtagtagcttacttgtgttcttatgtgaccggtgtatgatgtacatgtactgtactgtactatactgctccgcgtagttttcttagagatttatagtggactggaggataagaaacagcgagcagtccagcacagtatctcgtattcctagccctttacaatgagatggcggtgcaagcgatcatgtgcttttaggactagcgaaatgtggaattcgtggagaacttgtgcatttatggcattaggttattgcagagatcctacatttttgttgtgagctgatgattactgtcatttcatgtgcgggtggtcaaattcaactgctgttggctcataggtgattgtacactatttgagtatgtgaatagtcagcttcatttgtctcctatccatttttgttgtttctgtg

SEQ ID NO: 47500 - DNA, 1755 bp, Zea Mays
accagaacgatagcaactttgtgcaagcaactgttccttttggtacacggagagcgatctggacggacggagaggggtcgtcagactttagcattggcgaattaggaatctatctaggttcgtcaatccaactgaatactatgtgtaggatggtgacattggatgaatccacgagccaaccaattgggttccatccagttttaaggtagcaattttaaaaaataaattttaaaaagaaaaagaaaaggaagcaggggccaagaactcaagtaaagaacacccccgcctccacccaaaacacttgcaaggcgggcctgccccctcaatctccagcgtgcgcggcgtcccgatcgcttcgtaaccgcctgattgatccgcctgtcctccgagccaggctttcaccgcgcggctttaatcccgattgggttggctggaccgcaacccaattgggggttaattgggattgctactccgcggctgcctgtctctcgtgttcctggattggcgaggcgaatcgactggtttgctgcagcctcctgggtagaatcatgaagctgaaaaatagcgcagtggagacttttaaggagaacaatatgattttcacttctgaaggaaatctccactctaaaaaaatgagagaagattatgttgctagtccaaaccaaccgggtgttgtccagacaagatgcaaatggataattggagatgtaactgaggtctttgatcgcagcacatggaagcttggaaagatcttaaagatgctaaagaacaactactttgttatcaggcttgctgattgcatccagctcaaagagttccacatatctagtttgagaatcccacgtggtctggaagctcctcaaagcaagccctttcatgcagcagataaggccaccggacgcggtaatcgtcgacctgctgatggcgccttgcccggcgcaagggctgcggatcaaatgggtcaccgagcctacgagctggggagcagcggcaagaagcggaaagcaaccgcagacgcctctcaccatctgggcagagcagcagcagcagcacattcccggaatgtcgccgcagcctccaacccgaacggcggcagctacccgcacagctcttcacaggccatagaagacgccgaatgctcggttgccagctgcagcgtggacgacctttaccgcctcggcaatggcggcaacgccaagcgtcgccccgccgccgcagggtgcctccctgacgacgccatgtccgcgtgcacgggctggagctggaggcgtacgggtcgactatgcgggcgctgtacgcgtcgggcccgctgacgtgggagcaggaggcgctgctgacgaacctgcgcctgtcgctcaacatctccaacgaggagcatctgctccagctcaggcgcctactgtcctcgtgattattggcacttggcattggcgcattgccagccaccgcccttctggccttctctttcgtacgtctccagcgtcgtcgtcggccaacggccatgcacgtcggcttggctcgccgaacgccgcgttcagcgagcctcttgcttttactcttgttgctaattgctattacatggttctctgtctagtctaggtagaaagaatcctatgttcataccagtgtcgagacatgtcatgccttttgtatcctggatatagtcttgcttgtaaatgcaaacaagttttcctttgagggaccatatttacaagtttttcttcgaaattaaatgaattttctaaatgatttctg

SEQ ID NO: 47501 - DNA, 1907 bp, Zea Mays
aagcaagaggacagacgcccaagcggcgcgagtcggcgcagcaggttgaagcgtggctgtcctgccgaaccccgttggcggctgcggcggcatgactcgccagtgctacgccgaccggccgcgccgttcgaaatgttggtgcgcctttccatctgacgccctaggcagcggcgcggtggcggacggctgcacgctactaccgacgatcgatacagtggcagctggttttgtatccaaatttcaactatgatgaggaaggaatgattcagagctttggctagctgctacgatacgagcccgggagcaaagacatgaacttccatagatcttgagaccgaggcgggctcgccgcacccgctttttgtgagacaaaatcaatgaggaccatggatccgggaaggagcagtgatgggcccgattcacgcactccactcggcccatatagaactatgccttcgcttcgaaggcacgcgcatcgcgaaggtcgtttggtcccttgcccatccaatccgagcattcccagtgcgcgaaccaactgttcgtttgcttttcagtcttcgtcctctcttttgcggcccagggccagttgtcgcccgcccgcgtcgtcgtctccgccggccggtcggcctcccaaaccctagcgagccgagcgagagagaaactagacgccatgttcgggtacaggaaggcggacccggacctcgaggccggcgggtcctcgctgctgtacccggggatgacggagagtcccgaactgcggtgggcgttcgtccgcaagatctacgtcatcctcacggtccagctcgccatgacggcagccgtctcggccttcgtcgtcaaggtgcccgccgtctccaattttttcgtctcctccaacgccgggatcgcgctctacatcttcctcatcgtcctgcccttcatcgtgctgtgccctctgcactactaccaccagaagcatccgatcaatctgctgctgctcggcctcttcaccgtcgccatcagcttcgccgtcggcatgacatgcgctttcactagcggaaaaatcattttggaggctgccattcttacagcggtggtggtgaacagcttaactgcttacactttctgggctgcgaagaggggccatgacttcaactttctcggccccttcctaattgctgctatcatggtgctcatggtgttttcactaatccagatctttttcccactgggcaagatctctgtgatgatatatggtggattggcatctcttatcttctgtggctatatcatctatgacacagacaatatcatcaagcgccacacatatgatcaatacatatgggcagctgtttcactctacctcgacgtcatcaacttgttcctgtctctgctgcagctgctgagggcagccgatagctgagctcattaatggagtgtttggtttgaggaatgatatagtccatcatcttctcactcacttttttgtttggtttgtggaatgaagtgagttaatccatcaccacctcattctcatagttagttgtttagtattaatatgtggaatagagtcatcccactaaatttgatgaatggacccatgatgcaccccttcattttggataaagtgattcattaaaccaaacacttcataagtttttacttcgatcttattcacacgtacatatctcacagactaatgatcatggatactccaatttatagttaggctccaatttataattagattctgtcagtgcgaccttagtttaaatgtcatgtgtcgcttagccgagaagatcagttttgtgtatggaactgcaagagtccacgactgtttaccagctttcgaccagacgaaatgtacctgtacttctacgcacgatcccagtaaagcactgcgtttaatctgatttgtcctattttat

SEQ ID NO: 47502 - DNA, 1705 bp, Zea Mays
gacgcccaagcggcgcgagtcggcgcagcaggttgaagcgtggctgtcctgccgaaccccgttggcggctgcggcggcatgactcgccagtgctacgccgaccggccgcgccgttcgaaatgttggtgcgcctttccatctgacgccctaggcagcggcgcggtggcggacggctgcacgctactaccgacgatcgatacagctggttttgtatccaaatttcaactatgatgaggaaggaatgattcagagctttggctagctgctacgatacgagcccgggagcaaagacatgaacttccataggcgaggtgaactaattaagtggctgagctagagcatgttgtacttgcataatagagtccagatatgttgtgaacaaagtagatattcatgttagcaaaaaaataaaaaaaggtgccgccatgaagcctgaaatttgggtgtagtagcatggtaggcggaagaactgtcgaggtaggcgaatatacaatggtcgctgctgatgtgacccaaacgtccgaatgcatgcactgattaagtcgtagtcaggcccttcaatttgtgggcaggagacagagacgctgctctggtgtttgcagccgctacatttcacacttttcacggatgcagaagtgctcctgctttgcgttagtgtcgtggcttggcttcactggaggttctgtgctcatgtttatccgcaagccatctgagtagagtaggactacacggactctctatatcaaaataagtatatgacgtttttatttcagacatcttactcaggatgtttttgttcgtcttcctgaacttagatttgttgtcaacatttagaatctcaactaaacagatacaataagaatagattcttgtaaatctatagatttctattgttcaattcagaataactttcaactctataaagtttctatatctctagtttaatttagaattaccttctaatctagattttctagacttttatcatccatgcatattactatatgtcatattcttataatatatatagttctcagttgtataaaccaaatataaattttagttttttttcataattattagctcacatcaactttgtcacaactcacaattaaaatctaccgttaacagatccttaacgttttatcttattcgatttttagtataaatattatttattttgtcataactcaattttatctagaaatactttaataatgacatacctattttgtattttataaaaaaaacttatatacaaacgatgatatctaaaagtcagaagcacggcatgtttgctacctaattcattccctcaataccctcctgctattcagtactggcttagccttagaaaatttatttacgagactagttgaagttttttttttgtttttttaaaaagcatgccctctgtcgtggtgcctaacttaacattatattctaagtcacctgattctatttatacgaatattagacctatttgctaccgtctagattttattgtaaattttcggcttggggttccgttctataatttagtgcagtaaaacttaactaaaatccatagcttgtaaaacttaattaaataaattaaacaaagggtgcatattcatgtaggtttgatccggctcaggtgagctaaaatgttaattcagattgttggaaaatacaaaccagctaaaagctacgtagatgcgagatc

SEQ ID NO: 47503 - DNA, 5244 bp, Zea Mays
ggcgcagcaggttgaagcgtggctgtcctgccgaaccccgttggcggctgcggcggcatgactcgccagtgctacgccgaccggccgcgccgttcgaaatgttggtgcgcctttccatctgacgccctaggcagcggcgcggtggcggacggctgcacgctactaccgacgatcgatacagtggcagctggttttgtatccaaatttcaactatgatgaggaaggaatgattcagagctttggctagctgctacgatacgagcccgggagcaaagacatgaacttccataggtacttgcaaaatcacttattttatgatatctgatataagaaacatatgcacaaacataaaaaaaaaggctcagcaaaaatatttttttttctagtgctggtaaggctaagattatcacacgattatataaataaatgaaatattattttatatatagactgtacggattatagagtcgaatatagaagttgacataaaccagggcacgatgaaggattgaaggcacattgtcgtggcttttctgtttggccttgctctcttttgctaagccgaggtacagtcaacaaggacttgggcttgaccgcttgactaatgagcaatgagtagtctccctcgctctacacgcatgcatgcaaaaggcagtagcgatcgtgctccttttcctcccaggctccctgcagcagctgcagctctgcagcccatggagaagaaaggtgtcgtcggcagtatttgtgattttactaggaggatctggtggtggtcccgccaggctagctcctgttatgctagctagcgatacaggttagctagctagtaggcaaagtatcgtgacatctgacatcctcagccacagcccacacacaagggggatgaacacaaatatatatataattgtttcaaattacagtaaacttttggttcaaagcgtaaaattgcaagggtgcgcgtgcatgcatgctcacctattttgcagtttgcaacttgcaggtgggaattatttacagtactaactttattacaaactataaaatattatatttttctgaatatgtagcttatgttatataactagatattttaaaaaaatgagaatatttagtactctctgtcttaaaatatagttttttctaagcctcttttttccatccacgttcgaataaatgatatacaaactatatttagactagttaatgaatacgaattatattttagaacatacaataggttgttatgctatgtagttggagtgagctccattctacttttggacgtcggccccactttcattcttacatccggtggattgttttcttctaggaatttcctagaatgaattggttcatcacatacgaagacattcattttaaaccagtttaattttgtgtcatctcttttctctagcaaccaaacacataaataactcaaatggcataatttcatggcaccccatcttataactgtaccttagggggcgtttggttcgcttcccaggcgagcctggctcgcactagctcagccaggctacaactggcctggctgagtgtatacgatagagtgtgtttggttgtctgcatgcgtttagtctggttcacgagagatgctgtttggttggttgcatgaatacggccaaccaaacgaacgctgttttttgcacgcacagatgcagctgcatctcctgagaagagaaccaaacgcgcccttaaagtttaagaggaatattattatatttatatcataagaaaaagtatgccactgtgataccgtgctctttcttttctgaagtagcgtacccgtatacggatacgtacgctgtactgtagtcgccatgcctcgggcgcccatgcgcctaggctgcttttgcagccgttgttgtctcctctgtggttctagggttctacctagttttctaggatcctaggcctggacaagaggctcttgcttgtcctgtcaggctgctagcttatcccggctcgacaaaaaaacacgtaacccgaaatctgaacccgtaaaactgaaatacccgaaatatccgaaacccgaattttgttccggaatttcgagtagcaacttgtaaaacccgaatttattttgggtaattcgggtatcacaatcgggtacccgaaatacccgaattactcgaactttcatgtgtcatgtactaatgtcatgcttaattattaatttatacatctataattatgtgtaagtgtgctacttgtgattgtagattgcttgtgttttatatgtccatgtatatcattattcaaactatatttttatactaatttaatagggtgtatatgtttttatgaagccgtcacaatagttcggataattcgggaatacccgaacccgaaattccgggtacccgaattttcgggtattgcaaaacccgttgtaatttcggttcctcgctcagatctctgtgatccaccattcaaagttagtccacgcttacatcccctccggacataaatctattgtccctagtttccgaaaccgcgacatagaccttttcaagttacagagacgaaagtgttggtgttttgacctgaggatcctaccgactagtgattgaatgctgcgtgccctggcccatctgtgtgatgcaaaaagacacaagtctttatcctagttcgggcaaaaaaaagaccctacctccagcagacggggatgagacttatattacctgcacctaagtgcttgcagtagggaaggtggccgaggccgagctcgggctagacaaagtttgtcatgaggccaagaccggcttcgggcgagacgtagttttctccctagggccaggtcatcctctgccgtatgtgtgtcccattcggagttggcagacgacttgggggacagtagccgttgttgggcatgcgtcatcgtagttggtgaaagcggacgagaccgcggtcctgtcgctcctgttgaccgtggcatcacgtggggtagatatgcgtattgaatgctcatgtcccctacggcctttggccgaggcctggctcgaggttgtcctccttgcctgagacaggctcggacgaggtgaaaacatccattccatgaagggagaacctcgggcgggacgatgatttcctcgagtacgtcccccgtccgagggcacgctcgggtgaggtggagttttgagtgaccgtcatgtgaagcctcgggcgaatcatggttcgtactttcttgacctcacgaaatgtgtctggcggcagccttggggttaagcgcgtttaggggcataatccaggtacccctaatacgatacctgacaccctaattacgataatcgacagaaagaatacaacattctaagtaattatgttgatctctctcacacattagaaagctaaaactactctaccactaagcaccatagagatcgagcagcttcctatcttatttataccctattacacatttctaatatgtttctatatattctcgctgaactacttgaactagggttaaatggtccaactttaaattaccgcatctcacagcgacaagtttttcatgaattcgcttcgtcttaacgtcacataccgccaacaactcatgtggaacttcaataagattttgaggtgtaaacctaaaaactgttcgcaagtggttttaatatctaaaccaccaatagcctcgtgagtagcgtgtctgatgtactctctcgtaatctcgacatatatcaccgtcaatttgtgaccatcttattaccaagttctccggtgcccccattatacttagtgaatcattttgttgatttggtcaacacagtctactcttccatatacttttacacttgttggtttacctaggagtcgaccatcatagtcagcctttcgcttctcgagtctcttagttcaagctttggcatcggtttttttatcgctcttgtctatcagcacaaactcgtttgacatccaccttcaacatagattgtatccaaactccacatctaaacatcacaaatgaagagatacgttgcataacgtcaaaagcaataagattagtgtacaaacttaaataaaatcgatcatttcttggataatcacgtatcatatttaaatattaggctcatatttgaatactatggacacgtctcaaccacgcattcgtatttgtgacgcttgaagtcgcagatatagatccatacaaaaaaaaaagagtgctctcgatcgtagtctcatccatttgtaacgtggtagagttagcagtgtataggttcaagctggacgcttgcagtctcgaacagacgtgcatgtgactgcaaagcgcaaagaagttattctcaagcaagcccagaatcttgctgcagctggtgatgtatggctgttggatgttgctgtgcggtctagtttgatgacatcattgccagtactggatattccttccaaattccattctacatcaatcgtcgactataattagtatgtatgatcatctgttatgatatggtgttagctacactgaaaaggagcattgatatagtattttggactaaaatatatcactgttggtaccaaataaccgtgcacgagaggtgcttgctaatgcttgatatgatgtttgttctgtgatttgaagtagtctttgttgcatatcaacaccatttctgaacaatcagtaatgcctatgatataattccatttcaaggcttagtaaattactaaagtttaatacatatcacatcgaatgtttcaatattacattgaatactaaatcaggcttgatattaaaatagactacaattgaaaaccgttgtttagatgaccataaaattggcttttggaatcacaagaggcatccaaactcaatttatgtttggatgtacaaaacatggaattgaatttgtgaagaggagcagcgagtgtcggtctgattccccacaaaatgctgagctggtattagactctatttctagttttgaattctgtacatccaaaaccggcattcgagctgtccaatatcaactgtgaattctaaggctgaatacctgcgttcaaacgggctaccagagatatagaaattcgcagttggattgaatcttggtgacacaaatacatgtaacacattcttaagcactgttgctgttagaaaagctgcatcactaaaaagcaacccattgaaacggccgaggccgcatggggtacaggcgggtttgtcttgattccccatcccccgatccatccgtccatcaaaccaccatttttttccatctctttttc

SEQ ID NO: 47504 - DNA, 1642 bp, Zea Mays
cgcagcaggttgaagcgtggctgtcctgccgaaccccgttggcggctgcggcggcatgactcgccagtgctacgccgaccggccgcgccgttcgaaatgttggtgcgcctttccatctgacgccctaggcagcggcgcggtggcggacggctgcacgctactaccgacgatcgatacagtggcagctggttttgtatccaaatttcaactatgatgaggaaggaatgattcagagctttggctagctgctacgatacgagcccgggagcaaagacatgaacttccatagtcttcgtcctctcttttgcggcccagggccagttgtcgcccgcccgcgtcgtcgtctccgccggccggtcggcctcccaaaccctagcgagccgagcgagagagaaactagacgccatgttcgggtacaggaaggcggacccggacctcgaggccggcgggtcctcgctgctgtacccggggatgacggagagtcccgaactgcggtgggcgttcgtccgcaagatctacgtcatcctcacggtccagctcgccatgacggcagccgtctcggccttcgtcgtcaaggtgcccgccgtctccaattttttcgtctcctccaacgccgggatcgcgctctacatcttcctcatcgtcctgcccttcatcgtgctgtgccctctgcactactaccaccagaagcatccgatcaatctgctgctgctcggcctcttcaccgtcgccatcagcttcgccgtcggcatgacatgcgctttcactagcggaaaaatcattttggaggctgccattcttacagcggtggtggtgaacagcttaactgcttacactttctgggctgcgaagaggggccatgacttcaactttctcggccccttcctaattgctgctatcatggtgctcatggtgttttcactaatccagatctttttcccactgggcaagatctctgtgatgatatatggtggattggcatctcttatcttctgtggctatatcatctatgacacagacaatatcatcaagcgccacacatatgatcaatacatatgggcagctgtttcactctacctcgacgtcatcaacttgttcctgtctctgctgcagctgctgagggcagccgatagctgagctcattaatggagtgtttggtttgaggaatgatatagtccatcatcttctcactcacttttttgtttggtttgtggaatgaagtgagttaatccatcaccacctcattctcatagttagttgtttagtattaatatgtggaatagagtcatcccactaaatttgatgaatggacccatgatgcaccccttcattttggataaagtgattcattaaaccaaacacttcataagtttttacttcgatcttattcacacgtacatatctcacagactaatgatcatggatactccaatttatagttaggctccaatttataattagattctgtcagtgcgaccttagtttaaatgtcatgtgtcgcttagccgagaagatcagttttgtgtatggaactgcaagagtccacgactgtttaccagctttcgaccagacgaaatgtacctgtacttctacgcacgatcccagtaaagcactgcgtttaatctgatttgtcctattttat

SEQ ID NO: 47505 - DNA, 1601 bp, Zea Mays
cgtggctgtcctgccgaaccccgttggcggctgcggcggcatgactcgccagtgctacgccgaccggccgcgccgttcgaaatgttggtgcgcctttccatctgacgccctaggcagcggcgcggtggcggacggctgcacgctactaccgacgatcgatacagtggcagctggttttgtatccaaatttcaactatgatgaggaaggaatgattcagagctttggctagctgctacgatacgagcccgggagcaaagacatgaacttccatagggccagttgtcgcccgcccgcgtcgtcgtctccgccggccggtcggcctcccaaaccctagcgagccgagcgagagagaaactagacgccatgttcgggtacaggaaggcggacccggacctcgaggccggcgggtcctcgctgctgtacccggggatgacggagagtcccgaactgcggtgggcgttcgtccgcaagatctacgtcatcctcacggtccagctcgccatgacggcagccgtctcggccttcgtcgtcaaggtgcccgccgtctccaattttttcgtctcctccaacgccgggatcgcgctctacatcttcctcatcgtcctgcccttcatcgtgctgtgccctctgcactactaccaccagaagcatccgatcaatctgctgctgctcggcctcttcaccgtcgccatcagcttcgccgtcggcatgacatgcgctttcactagcggaaaaatcattttggaggctgccattcttacagcggtggtggtgaacagcttaactgcttacactttctgggctgcgaagaggggccatgacttcaactttctcggccccttcctaattgctgctatcatggtgctcatggtgttttcactaatccagatctttttcccactgggcaagatctctgtgatgatatatggtggattggcatctcttatcttctgtggctatatcatctatgacacagacaatatcatcaagcgccacacatatgatcaatacatatgggcagctgtttcactctacctcgacgtcatcaacttgttcctgtctctgctgcagctgctgagggcagccgatagctgagctcattaatggagtgtttggtttgaggaatgatatagtccatcatcttctcactcacttttttgtttggtttgtggaatgaagtgagttaatccatcaccacctcattctcatagttagttgtttagtattaatatgtggaatagagtcatcccactaaatttgatgaatggacccatgatgcaccccttcattttggataaagtgattcattaaaccaaacacttcataagtttttacttcgatcttattcacacgtacatatctcacagactaatgatcatggatactccaatttatagttaggctccaatttataattagattctgtcagtgcgaccttagtttaaatgtcatgtgtcgcttagccgagaagatcagttttgtgtatggaactgcaagagtccacgactgtttaccagctttcgaccagacgaaatgtacctgtacttctacgcacgatcccagtaaagcactgcgtttaatctgatttgtcctattttat

SEQ ID NO: 47506 - DNA, 1144 bp, Zea Mays
cgtggctgtcctgccgaaccccgttggcggctgcggcggcatgactcgccagtgctacgccgaccggccgcgccgttcgaaatgttggtgcgcctttccatctgacgccctaggcagcggcgcggtggcggacggctgcacgctactaccgacgatcgatacagtggcagctggttttgtatccaaatttcaactatgatgaggaaggaatgattcagagctttggctagctgctacgatacgagcccgggagcaaagacatgaacttccataggaaaaatcattttggaggctgccattcttacagcggtggtggtgaacagcttaactgcttacactttctgggctgcgaagaggggccatgacttcaactttctcggccccttcctaattgctgctatcatggtgctcatggtgttttcactaatccagatctttttcccactgggcaagatctctgtgatgatatatggtggattggcatctcttatcttctgtggctatatcatctatgacacagacaatatcatcaagcgccacacatatgatcaatacatatgggcagctgtttcactctacctcgacgtcatcaacttgttcctgtctctgctgcagctgctgagggcagccgatagctgagctcattaatggagtgtttggtttgaggaatgatatagtccatcatcttctcactcacttttttgtttggtttgtggaatgaagtgagttaatccatcaccacctcattctcatagttagttgtttagtattaatatgtggaatagagtcatcccactaaatttgatgaatggacccatgatgcaccccttcattttggataaagtgattcattaaaccaaacacttcataagtttttacttcgatcttattcacacgtacatatctcacagactaatgatcatggatactccaatttatagttaggctccaatttataattagattctgtcagtgcgaccttagtttaaatgtcatgtgtcgcttagccgagaagatcagttttgtgtatggaactgcaagagtccacgactgtttaccagctttcgaccagacgaaatgtacctgtacttctacgcacgatcccagtaaagcactgcgtttaatctgatttgtcctattttat

SEQ ID NO: 47507 - DNA, 1661 bp, Zea Mays
gccgaaccccgttggcggctgcggcggcatgactcgccagtgctacgccgaccggccgcgccgttcgaaatgttggtgcgcctttccatctgacgccctaggcagcggcgcggtggcggacggctgcacgctactaccgacgatcgatacagtggcagctggttttgtatccaaatttcaactatgatgaggaaggaatgattcagagctttggctagctgctacgatacgagcccgggagcaaagacatgaacttccataggcgaggtgaactaattaagtggctgagctagagcatgttgtacttgcataatagagtccagatatgttgtgaacaaagtagatattcatgttagcaaaaaaataaaaaaaggtgccgccatgaagcctgaaatttgggtgtagtagcatggtaggcggaagaactgtcgaggtaggcgaatatacaatggtcgctgctgatgtgacccaaacgtccgaatgcatgcactgattaagtcgtagtcaggcccttcaatttgtgggcaggagacagagacgctgctctggtgtttgcagccgctacatttcacacttttcacggatgcagaagtgctcctgctttgcgttagtgtcgtggcttggcttcactggaggttctgtgctcatgtttatccgcaagccatctgagtagagtaggactacacggactctctatatcaaaataagtatatgacgtttttatttcagacatcttactcaggatgtttttgttcgtcttcctgaacttagatttgttgtcaacatttagaatctcaactaaacagatacaataagaatagattcttgtaaatctatagatttctattgttcaattcagaataactttcaactctataaagtttctatatctctagtttaatttagaattaccttctaatctagattttctagacttttatcatccatgcatattactatatgtcatattcttataatatatatagttctcagttgtataaaccaaatataaattttagttttttttcataattattagctcacatcaactttgtcacaactcacaattaaaatctaccgttaacagatccttaacgttttatcttattcgatttttagtataaatattatttattttgtcataactcaattttatctagaaatactttaataatgacatacctattttgtattttataaaaaaaacttatatacaaacgatgatatctaaaagtcagaagcacggcatgtttgctacctaattcattccctcaataccctcctgctattcagtactggcttagccttagaaaatttatttacgagactagttgaagttttttttttgtttttttaaaaagcatgccctctgtcgtggtgcctaacttaacattatattctaagtcacctgattctatttatacgaatattagacctatttgctaccgtctagattttattgtaaattttcggcttggggttccgttctataatttagtgcagtaaaacttaactaaaatccatagcttgtaaaacttaattaaataaattaaacaaagggtgcatattcatgtaggtttgatccggctcaggtgagctaaaatgttaattcagattgttggaaaatacaaaccagctaaaagctacgtagatgcgagatc

SEQ ID NO: 47508 - DNA, 1400 bp, Zea Mays
atcgcgaaggtcgtttggtcccttgcccatccaatccgagcattcccagtgcgcgaaccaactgttcgtttgcttttcagtcttcgtcctctcttttgcggcccagggccagttgtcgcccgcccgcgtcgtcgtctccgccggccggtcggcctcccaaaccctagcgagccgagcgagagagaaactagacgccatgttcgggtacaggaaggcggacccggacctcgaggccggcgggtcctcgctgctgtacccggggatgacggagagtcccgaactgcggtgggcgttcgtccgcaagatctacgtcatcctcacggtccagctcgccatgacggcagccgtctcggccttcgtcgtcaaggtgcccgccgtctccaattttttcgtctcctccaacgccgggatcgcgctctacatcttcctcatcgtcctgcccttcatcgtgctgtgccctctgcactactaccaccagaagcatccgatcaatctgctgctgctcggcctcttcaccgtcgccatcagcttcgccgtcggcatgacatgcgctttcactagcgcggtggtggtgaacagcttaactgcttacactttctgggctgcgaagaggggccatgacttcaactttctcggccccttcctaattgctgctatcatggtgctcatggtgttttcactaatccagatctttttcccactgggcaagatctctgtgatgatatatggtggattggcatctcttatcttctgtggctatatcatctatgacacagacaatatcatcaagcgccacacatatgatcaatacatatgggcagctgtttcactctacctcgacgtcatcaacttgttcctgtctctgctgcagctgctgagggcagccgatagctgagctcattaatggagtgtttggtttgaggaatgatatagtccatcatcttctcactcacttttttgtttggtttgtggaatgaagtgagttaatccatcaccacctcattctcatagttagttgtttagtattaatatgtggaatagagtcatcccactaaatttgatgaatggacccatgatgcaccccttcattttggataaagtgattcattaaaccaaacacttcataagtttttacttcgatcttattcacacgtacatatctcacagactaatgatcatggatactccaatttatagttaggctccaatttataattagattctgtcagtgcgaccttagtttaaatgtcatgtgtcgcttagccgagaagatcagttttgtgtatggaactgcaagagtccacgactgtttaccagctttcgaccagacgaaatgtacctgtacttctacgcacgatcccagtaaagcactgcgtttaatctgatttgtcctattttat

SEQ ID NO: 47509 - DNA, 1324 bp, Zea Mays
atcgcgaaggtcgtttggtcccttgcccatccaatccgagcattcccagtgcgcgaaccaactgttcgtttgcttttcagtcttcgtcctctcttttgcggcccagggccagttgtcgcccgcccgcgtcgtcgtctccgccggccggtcggcctcccaaaccctagcgagccgagcgagagagaaactagacgccatgttcgggtacaggaaggcggacccggacctcgaggccggcgggtcctcgctgctgtacccggggatgacggagagtcccgaactgcggtgggcgttcgtccgcaagatctacgtcatcctcacggtccagctcgccatgacggcagccgtctcggccttcgtcgtcaaggtgcccgccgtctccaattttttcgtctcctccaacgccgggatcgcgctctacatcttcctcatcgtcctgcccttcatcgtgctgtgccctctgcactactaccaccagaagcatccgatcaatctgctgctgctcggcctcttcaccgtcgccatcagcttcgccgtcggcatgacttcaactttctcggccccttcctaattgctgctatcatggtgctcatggtgttttcactaatccagatctttttcccactgggcaagatctctgtgatgatatatggtggattggcatctcttatcttctgtggctatatcatctatgacacagacaatatcatcaagcgccacacatatgatcaatacatatgggcagctgtttcactctacctcgacgtcatcaacttgttcctgtctctgctgcagctgctgagggcagccgatagctgagctcattaatggagtgtttggtttgaggaatgatatagtccatcatcttctcactcacttttttgtttggtttgtggaatgaagtgagttaatccatcaccacctcattctcatagttagttgtttagtattaatatgtggaatagagtcatcccactaaatttgatgaatggacccatgatgcaccccttcattttggataaagtgattcattaaaccaaacacttcataagtttttacttcgatcttattcacacgtacatatctcacagactaatgatcatggatactccaatttatagttaggctccaatttataattagattctgtcagtgcgaccttagtttaaatgtcatgtgtcgcttagccgagaagatcagttttgtgtatggaactgcaagagtccacgactgtttaccagctttcgaccagacgaaatgtacctgtacttctacgcacgatcccagtaaagcactgcgtttaatctgatttgtcctattttat

SEQ ID NO: 47510 - DNA, 2048 bp, Zea Mays
cacgtcggtccgaaccaaatccagcaccctgcaccctcttcctccatcgcaccctatcctcctcctccccggtccggcggtccccaccggtccaccacggcaccaccgtctccccgccccccgcgtccgatcaccgcaccggcgaactcggcgagccgctcgtcgctgcacgctaagctgggaatggccgctgcgctcgccagctcaccgcttgttcacctatccacctcccgcctccgcctccccaggccccgggcctcctccagttccgctccaggctgctcgatcggcgtgtgcttgggatggaggctgaaggtcgggtggagggctctgaggcggtgcgaccggcttcgatgcttctccaccgacggcgacggcgtggaggagggggagaagcgtggcgaggaggaggcctcggcgacggcggccccggccccggacccagccccagcggagacacaggtgggcgctgcggaggagctggcgtctgagcggagccgatcagggagcttttcgtcctcatcctcgtccgggaatcctggtgtatcaagcgagccaccactgttgagttttagtgttgataatatcgatacagttaaactattggaacttctaggcccggaaaaggttgacccagttgatgtcatggcaattaaggaaaaactctttggttatacgacattctggttgacaaaagaagagccttttggtgatctcggtgaaggagtccttttcattgggaatctccgtgggaagagggaggaaatctttgcaaaacttcaaaggcaactacgcgaacttgctggtgaaaaatacaatctttttatggtggaggaacccaattcagaaggggatgacccacgtgggggaccacgtgttagttttggtttgcttaggaaggaagtttctgagcctggacctactaccctatggcagtatgtcatttctctgtcacttttccttctcactatgttctcctgtgttgagctaggaattgcatcaaagattagcagtcttccaccagaaattgtttcatatttcactgatccaaattctactggaccccctcctgatatgcaacttctgctcccatttgtggaatcggctttgccagtggcttacggtgtcttggctatccaattatttcatgaaattggacactttttggcagcatttccaaaaaatgtgaaactaggcattcctttctttattccgaacttcacccttggaacttttggtgcaattactcagttcaagtccattcttccggatcgaaagacaatgtttgacatatcaatggctggtcctgtggctggagctgcactttccttttcaatgttctttgtaggcttattactctcttcaaatcctgttggggcaagtgatttagtagaagtacctagccagctgttccagggttcattattgcttggactcattagtagagcaacacttggatacagagctatgcatgctgctacagtttcgatccaccctctagtgattgcaggctggtgtggtttaactactactgcatttaatatgcttcctgttggatgtcttgatggtggaagagcattacagggtgcttttggcaaggatgctttgtttggatttggcctcacaacatactcgttgcttggactaggagtgagaacaccggagaaaccatgcttgaacgacgtaagcgatattggaggttggaggaggacggccttgatagcttcagtgtttcttgttgttttgactctcatcccgttgtgggatgaactcgcggaggaactaggtgtagggcttgttacttcgttctgagatacggtccttaccgatagaattaggccgtgatgtagctcaattttgtattgaaatgtagcgtcccatagcgggactgctgtaaaggcatgtgcagtttcctgattaggtgagcaatgatatcacctatgcgagtgtcatgaaattgtgccaagacgctgacgattattatcaattacatacatgtacgcacattttgaccatacgagtacagatacacacaacctacccttcta

SEQ ID NO: 47511 - DNA, 2122 bp, Zea Mays
aaatccagcaccctgcaccctcttcctccatcgcaccctatcctcctcctccccggtccggcggtccccaccggtccaccacggcaccaccgtctccccgccccccgcgtccgatcaccgcaccggcgaactcggcgagccgctcgtcgctgcacgctaagctgggaatggccgctgcgctcgccagctcaccgcttgttcacctatccacctcccgcctccgcctccccaggccccgggcctcctccagttccgctccaggctgctcgatcggcgtgtgcttgggatggaggctgaaggtcgggtggagggctctgaggcggtgcgaccggcttcgatgcttctccaccgacggcgacggcgtggaggagggggagaagcgtggcgaggaggaggcctcggcgacggcggccccggccccggacccagccccagcggagacacaggtgggcgctgcggaggagctggcgtctgagcggagccgatcagggagcttttcgtcctcatcctcgtccgggaatcctggtgtatcaagcgagccaccactgttgagttttagtgttgataatatcgatacagttaaactattggaacttctaggcccggaaaaggttgacccagttgatgtcatggcaattaaggaaaaactctttggttatacgacattctggttgacaaaagaagagccttttggtgatctcggtgaaggagtccttttcattgggaatctccgtgggaagagggaggaaatctttgcaaaacttcaaaggcaactacgcgaacttgctggtgaaaaatacaatctttttatggtggaggaacccaattcagaaggggatgacccacgtgggggaccacgtgttagttttggtttgcttaggaaggaagtttctgagcctggacctactaccctatggcagtatgtcatttctctgtcacttttccttctcactatgttctcctgtgttgagctaggaattgcatcaaagattagcagtcttccaccagaaattgtttcatatttcactgatccaaattctactggaccccctcctgatatgcaacttctgctcccatttgtggaatcggctttgccagtggcttacggtgtcttggctatccaattatttcatgaaattggacactttttggcagcatttccaaaaaatgtgaaactaggcattcctttctttattccgaacttcacccttggaacttttggtgcaattactcagttcaagtccattcttccggatcgaaagacaatgtttgacatatcaatggctggtcctgtggctggagctgcactttccttttcaatgttctttgtaggcttattactctcttcaaatcctgttggggcaagtgatttagtagaagtacctagccagctgttccagggttcattattgcttggactcattagtagagcaacacttggatacagagctatgcatgctgctacagtttcgatccaccctctagtgattgcaggctggtgtggtttaactactactgcatttaatatgcttcctgttggatgtcttgatggtggaagagcattacaggttatgatgttgctgctgaggaagaacaggacactagagggtgcttttggcaaggatgctttgtttggatttggcctcacaacatactcgttgcttggactaggagtgcttggaggaccactgtctcttccttggggtttgtacgtgctaatttgccagagaacaccggagaaaccatgcttgaacgacgtaagcgatattggaggttggaggaggacggccttgatagcttcagtgtttcttgttgttttgactctcatcccgttgtgggatgaactcgcggaggaactaggtgtagggcttgttacttcgttctgagatacggtccttaccgatagaattaggccgtgatgtagctcaattttgtattgaaatgtagcgtcccatagcgggactgctgtaaaggcatgtgcagtttcctgattaggtgagcaatgatatcacctatgcgagtgtcatgaaattgtgccaagacgctgacgattattatcaattacatacatgtacgcacattttgaccatacgagtacagatacacacaacctacccttcta

SEQ ID NO: 47512 - DNA, 2173 bp, Zea Mays
aaatccagcaccctgcaccctcttcctccatcgcaccctatcctcctcctccccggtccggcggtccccaccggtccaccacggcaccaccgtctccccgccccccgcgtccgatcaccgcaccggcgaactcggcgagccgctcgtcgctgcacgctaagctgggaatggccgctgcgctcgccagctcaccgcttgttcacctatccacctcccgcctccgcctccccaggccccgggcctcctccagttccgctccaggctgctcgatcggcgtgtgcttgggatggaggctgaaggtcgggtggagggctctgaggcggtgcgaccggcttcgatgcttctccaccgacggcgacggcgtggaggagggggagaagcgtggcgaggaggaggcctcggcgacggcggccccggccccggacccagccccagcggagacacaggtgggcgctgcggaggagctggcgtctgagcggagccgatcagggagcttttcgtcctcatcctcgtccgggaatcctggtgtatcaagcgagccaccactgttgagttttagtgttgataatatcgatacagttaaactattggaacttctaggcccggaaaaggttgacccagttgatgtcatggcaattaaggaaaaactctttggttatacgacattctggttgacaaaagaagagccttttggtgatctcggtgaaggagtccttttcattgggaatctccgtgggaagagggaggaaatctttgcaaaacttcaaaggcaactacgcgaacttgctggtgaaaaatacaatctttttatggtggaggaacccaattcagaaggggatgacccacgtgggggaccacgtgttagttttggtttgcttaggaaggaagtttctgagcctggacctactaccctatggcagtatgtcatttctctgtcacttttccttctcactatgttctcctgtgttgagctaggaattgcatcaaagattagcagtcttccaccagaaattgtttcatatttcactgatccaaattctactggaccccctcctgatatgcaacttctgctcccatttgtggaatcggctttgccagtggcttacggtgtcttggctatccaattatttcatgaaattggacactttttggcagcatttccaaaaaatgtgaaactaggcattcctttctttattccgaacttcacccttggaacttttggtgcaattactcagttcaagtccattcttccggatcgaaagacaatgtttgacatatcaatggctggtcctgtggctggagctgcactttccttttcaatgttctttgtaggcttattactctcttcaaatcctgttggggcaagtgatttagtagaagtacctagccagctgttccagggttcattattgcttggactcattagtagagcaacacttggatacagagctatgcatgctgctacagtttcgatccaccctctagtgattgcaggctggtgtggtttaactactactgcatttaatatgcttcctgttggatgtcttgatggtggaagagcattacaggaatgctcggtgcttagccgcacatcacgctacgaacgtgttcatccctacgttcatgatgcagctaattcactggtcattgtgtgcgagctaatctcgccacaccctcctacagcatggccatcgcagaactgaaaacagggtgcttttggcaaggatgctttgtttggatttggcctcacaacatactcgttgcttggactaggagtgagaacaccggagaaaccatgcttgaacgacgtaagcgatattggaggttggaggaggacggccttgatagcttcagtgtttcttgttgttttgactctcatcccgttgtgggatgaactcgcggaggaactaggtgtagggcttgttacttcgttctgagatacggtccttaccgatagaattaggccgtgatgtagctcaattttgtattgaaatgtagcgtcccatagcgggactgctgtaaaggcatgtgcagtttcctgattaggtgagcaatgatatcacctatgcgagtgtcatgaaattgtgccaagacgctgacgattattatcaattacatacatgtacgcacattttgaccatacgagtacagatacacacaacctacccttcta

SEQ ID NO: 47513 - DNA, 591 bp, Zea Mays
gcaggctggtggtttaactactactgcatttaatatgcttcctgttggatgtcttgatggtggaagagcattacagggtgcttttggcaaggatgctttgtttggatttggcctcacaacatactcgttgcttggactaggagtgcttggaggaccactgtctcttccttggggtttgtacgtgctaatttgccagagaacaccggagaaaccatgcttgaacgacgtaagcgatattggaggttggaggaggacggccttgatagcttcagtgtttcttgttgttttgactctcatcccgttgtgggatgaactcgcggaggaactaggtgtagggcttgttacttcgttctgagatacggtccttaccgatagaattaggccgtgatgtagctcaattttgtattgaaatgtagcgtcccatagcgggactgctgtaaaggcatgtgcagtttcctgattaggtgagcaatgatatcacctatgcgagtgtcatgaaattgtgccaagacgctgacgattattatcaattacatacatgtacgcacattttgaccatacgagtacagatacacacaacctacccttcta

SEQ ID NO: 47514 - DNA, 721 bp, Zea Mays
gccaaatctggccttgaattcaccaaatagcacagagaaccaacaatgaacctataccgaggagcgtcaacagcagggacaaagcttgacttagcttcaacctgggctccattggggtgttgcttggattgcagcctgacaaaccctagatcactcatctggcttacagtgatccccatctcagattgtgccacctccaggccaagggtgcttttggcaaggatgctttgtttggatttggcctcacaacatactcgttgcttggactaggagtgcttggaggaccactgtctcttccttggggtttgtacgtgctaatttgccagagaacaccggagaaaccatgcttgaacgacgtaagcgatattggaggttggaggaggacggccttgatagcttcagtgtttcttgttgttttgactctcatcccgttgtgggatgaactcgcggaggaactaggtgtagggcttgttacttcgttctgagatacggtccttaccgatagaattaggccgtgatgtagctcaattttgtattgaaatgtagcgtcccatagcgggactgctgtaaaggcatgtgcagtttcctgattaggtgagcaatgatatcacctatgcgagtgtcatgaaattgtgccaagacgctgacgattattatcaattacatacatgtacgcacattttgaccatacgagtacagatacacacaacctacccttcta

SEQ ID NO: 47515 - DNA, 654 bp, Zea Mays
cctagatcactcatctggcttacagtgatccccatctcagattgtgccacctccaggccaagctaattcactggtcattgtgtgcgagctaatctcgccacaccctcctacagcatggccatcgcagaactgaaaacagggtgcttttggcaaggatgctttgtttggatttggcctcacaacatactcgttgcttggactaggagtgcttggaggaccactgtctcttccttggggtttgtacgtgctaatttgccagagaacaccggagaaaccatgcttgaacgacgtaagcgatattggaggttggaggaggacggccttgatagcttcagtgtttcttgttgttttgactctcatcccgttgtgggatgaactcgcggaggaactaggtgtagggcttgttacttcgttctgagatacggtccttaccgatagaattaggccgtgatgtagctcaattttgtattgaaatgtagcgtcccatagcgggactgctgtaaaggcatgtgcagtttcctgattaggtgagcaatgatatcacctatgcgagtgtcatgaaattgtgccaagacgctgacgattattatcaattacatacatgtacgcacattttgaccatacgagtacagatacacacaacctacccttcta

SEQ ID NO: 47516 - DNA, 469 bp, Zea Mays
aataactccatgatacggttaatcttggaggaccactgtctcttccttggggtttgtacgtgctaatttgccagagaacaccggagaaaccatgcttgaacgacgtaagcgatattggaggttggaggaggacggccttgatagcttcagtgtttcttgttgttttgactctcatcccgttgtgggatgaactcgcggaggaactaggtgtagggcttgttacttcgttctgagatacggtccttaccgatagaattaggccgtgatgtagctcaattttgtattgaaatgtagcgtcccatagcgggactgctgtaaaggcatgtgcagtttcctgattaggtgagcaatgatatcacctatgcgagtgtcatgaaattgtgccaagacgctgacgattattatcaattacatacatgtacgcacattttgaccatacgagtacagatacacacaacctacccttcta

SEQ ID NO: 47517 - DNA, 1745 bp, Zea Mays
cgaaattgtcttgctcacttgtcgcgactccggcccatttcattccatttcattccactctacattttcaccctgcaagtctcctgtttcagctctcttcccttcactccatcggctcgtctgtacagcatcccgtgtagcgtgtatccacctcgtcgccacctcaatcctcattccccaatcccgtccgcttctctccccgtcccttacctcgcccaggaggggagcctcccgcttacaaaccctagcctctactcctctgagcttccaccgctccgctccccatggaggacgaggacaccggccccggcgatgggggcgaggcctctcctccgcaccacgtcgcggcgtcgagcgaccgggcgcgcgacatggtggcgtccccgaccagctcgcgctctgtgacgcagacggtgaacgggtcccaccacttcgtgatccagggctactcgctcgctaagggcatgggcgtggggaagcacatcgccagcgagacattcaccgtgggcggttaccagtgggcgatctacttctaccccgacgggaagaaccccgaggacaactccacctacgtctccgtcttcatcgcgctcgcgtccgacggcaccgacgtgcgcgcgctcttcgagctcacgctcctcgaccagagcggaaagggcaagcataaggggctacaaaaggttctttcggcgtactgctcttgagcaatcagattttcttaaagatgattgcttgaagataaactgtactgtgggtgttgtagtatcaactatggattattctaggccacattcaatagaggttccagagtctgacataggctttcattttggaacgcttttggacactcaggaaggtgtagatgttatttttagtgtagcaggagagaagtttcatgcccataagttggtattggctgcccgatctcccttttttagatctgaatttttcgatcatgaattgggtgaagagaagaacggaactgatacgggggatgaaatcaaagagatcgttattgatgacatggatcctgtagtgttcaaggctgtgcttcattttatctacagggacaatcttgttaatgatgacgagttgtctgcatcaagctctgactgctctatctttgatcgtttgtccgggaagttaatggctgcagcagacaaatatgagttgccaaggttaagattgttgtgtgaatcttacttgtgcaagcatatttctgtaaattccgtggcaactactctagcattggctgatcggcaccatgctatggagcttaaatccgtttgcctcaaatttgctgccgaaaacctgtcagctgtgatccggactgagggtttcgactatctcaaagacaactgcccatctctgcagtcagagatactgcggacagttgccgggtgtgaggagccatgtagcagcggcttgaaaagccagagcgtgtgggcgcagctctctgacggcggcgacaccagcgggcgcagggtgaggccaagggtctgagacgcaaaccccggaagcactgacctttgtaatcaaaagctgttgtggtgtaaatgggacggcttttcttaattttcacttgagacaacgatttaaataacatgattgacgtgtttgtggtgctcgcagtcattatttggttctgaattctgagtctgccgcacattaaggatattctctttaaccgagcgaaatgatttcttatcgtgtcgtcatcaacgtctacgtcttcacaggctgtt

SEQ ID NO: 47518 - DNA, 1243 bp, Zea Mays
tcctgtttcagctctcttcccttcactccatcggctcgtctgtacagcatcccgtgtagcgtgtatccacctcgtcgccacctcaatcctcattccccaatcccgtccgcttctctccccgtcccttacctcgcccaggaggggagcctcccgcttacaaaccctagcctctactcctctgagcttccaccgctccgctccccatggaggacgaggacaccggccccggcgatgggggcgaggcctctcctccgcaccacgtcgcggcgtcgagcgaccgggcgcgcgacatggtggcgtccccgaccagctcgcgctctgtgacgcagacggtgaacgggtcccaccacttcgtgatccagggctactcgctcgctaagggcatgggcgtggggaagcacatcgccagcgagacattcaccgtgggcggttaccagtgggcgatctacttctaccccgacgggaagaaccccgaggacaactccacctacgtctccgtcttcatcgcgctcgcgtccgacggcaccgacgtgcgcgcgctcttcgagctcacgctcctcgaccagagcggaaagggcaagcataaggggctacaaaaggttctttcggcgtactgctcttgagcaatcagattttcttaaagatgattgcttgaagataaactgtactgtgggtgttgtagtatcaactatggattattctaggccacattcaatagaggttccagagtctgacataggctttcattttggaacgcttttggacactcaggaaggtgtagatgttatttttagtgtagcaggagagaagtttcatgcccataagttggtattggctgcccgatctcccttttttagatctgaatttttcgatcatgaattgggtgaagagaagaacggaactgatacgggggatgaaatcaaagagatcgttattgatgacatggatcctgtagtgttcaaggctgtgcttcattttatctacagggacaatcttgttaatgatgacgagttgtctgcatcaagctctgactgctctatctttgatcgtttgtccgggaagttaatggctgcagcagacaaatatgagttgccaaggttaagattgttgtgtgaatcttacttgtgcaagcatatttctgtaaattccgtggcaactactctagcattggctgatcggcaccatgctatggagcttaaatccgtttgcctcaaatttgctgccgaaaacctgtcagatgccc

SEQ ID NO: 47519 - DNA, 2436 bp, Zea Mays
caaccgcccacttcctccactccccacctccgcctctgcttcgcgacacggcggcgctatccatgcaccgtccgcccatcacatcggcgtaactcccaccgattgctgctgctgttggcggtcccgagccggccgcggagttcttgccgtctgcctcctctatagtacctcatctctgctccggattcaaaagctcctattcttccaccgtttgcctcctcccgcgtcttaattgcggtcactgtccagccgtcgatctcccccccctcttcctttcctcgttcgcttcttgcgattttcgtcactcgcatgtgaaacctctccctccctccctctcccgcctccgtgtttctgtcacaaggatcgggtggggcggaacctcgaaaccgcgtttcgtgtacagcctgccacccttcgcacctccaaccatcttccctccgtttctttcaagtagcccttccttctcaatcgcttctccgccaaaaaaatcctttcttgtctggggtccagctttgtcacgagccactgcatccaggaggaggaggcggcggcggcgttacctgccctgctccggtcgactggctcccgggagttcggagccgagatctcgccaggccccggtcggcggcggcgttgtgggaaacaggatggggggatctgccccgcgctgcgcctgtggctctgcttgctggcggcaatggcgggcggccgcgtcggcgccctggccggcggatgcgctggggatgaactgggggcacgcaggccacgcacccgctgccgcccaaagatcgtggcgcagctcctcagggacaacggcatcaagaaggtgaagctgttcgacgccgaccagggcaacgcctcagcgcgctcgccggcaccggcatcgaggtcatggtcgccatccccaacgtcatgctcgacaccatgacggactacgacaccgccaaggagtgggtgcgccggaacgtgtcccgctacaacttcgacggcggcgtcaccatcaagtacgtggccgtgggcaacgagccgttccttgcggcctacaacggcacgttcgacaaggtgacgttcccggcgctgcagaacatccagaacgcgctgaacgaggccgggctcggcgacaccgtgaaggccaccgtcccgctgaacgccgacgtgtacatgtccccgaaggacaacccggtgccgtcggcggggcgatggtgcaagtttcctgaagcaaaaacaggcgcgcccttcacggtgaaccatctaccccgttcatcaccctgttctgaaacgacgacttccccggtggacttcgcctttttcgacggggggcgccgcgccgctgggtgggacccgggcagcggcgtgtcgtacaccaacgtgttcgacgccaacttcgacaccctggtggcggcgctcaagtcggtggggcacggcgacatgcccgtcgtggtgggcgaggtcggctggcccaccgacggcgacaagcacgccaccaacgcgtacgcgcagcggttctacaacggcctgctgaggcggctggcggcgaacgccggcacgcccgcgcggccgaaccagtacattgaggtgtacctgttcgggctcctggacgaggacgtgaagagcgtggcgccgggcaacttcgagcggcactggggcatcctccggtacgacgggcagcccaagtacccgatggacctgagcgggcaggggcagaacgcgatgctggtgccggcgcgcggcgtggagtacctgccccggacgtggtgcgtcgtcaacaccaacgccggcaacatggacaagctcgccgacaacatcaactacgcgtgcacgttcgccgactgcaccgcgctgggctacggctccacgtgcggcggcatggacagcaacggcaacgcgtcctacgcattcaacgccttcttccaggtgcagaaccagaaggaggaggcctgcggcttccagggcctcgccgtgcccacgcagacggacccgtccaccgccgcctgcaacttcaccatacagatcgccaccacctcggcgggtcaccggcggccgctcggcgtgggcgtgctcgccttcgccttggcccagctggtgctgctccttctgcattgattagggataggctggcgcgttttttgctgttactcatgtttggctggcatttggattatttggataggactggtacactactgcagtttgaggttgctgcctgcctggcgccattcgattagtttgttgggtttttttttctttgggggctgaaataattggagtggtagaaagtgttgtactggagatactgtacatgtatactgcttcaggttcaggattataaacaacagcagatgactgaagacttcagttcatcgttcatgggctaggacgcagggctgcaggcgatccaggcttgcttggtcctaaagactaaggccttgctcgttt

SEQ ID NO: 47520 - DNA, 3292 bp, Zea Mays
aaagaatcttcgtcgtcgtcgtagtagtagttagtacgtgtagtgtaggcttcaccgtatgttcactgcaccagatttaacatgcaaccgcaggccgtgccgtgacgtgctcatatggatgtacatttgaaatagcgagtagcatatagaggctgctggtctggttgccctttccaattttcttgggacgtcagccgtcttacggacgcgccatgaagctgagagcccccaccccacccagtcccagccatctagcctgctttcttgccaaaacacacccaagggcagacgaagaaaccaaacatacagtcgcaaggctcacagcacccagattgaagaccactctgttttcggcaggcccgcagcacctagatcaaattcctgctcttcaggtcttcgtcatatatcagcagaacaccagcaaaagcagcaaagaaggaaccctttttttcctcgaaatttcaggctcagttattgcgaccttccatcacaaattggcacctttacaccctgcatatcaggtggctgcggagcatgcgttgtgcttgtctcgaagtacgacccagccaccgacgaggtgaccgagttctcagcgagctcctgcctgacgctgctccatagcgtggaccggtgctcggtgaccaccagcgagggcattggcaacaccaaggatggctaccaccctgtgcagcagcgcctctccggcttccacgcctcccagtgcggtttctgcacgcccggcatgtgcatgtccatcttctctgcgcttgtcaaagccgacaaggcggccaaccggccagccccaccggccggcttctccaagctcacttcctcggaggctgagaaggctgtctctggcaacctgtgccgctgcacagggtacaggcccatcgtcgacgcctgtaagagcttcgcagccgatgttgatcttgaggacctgggcctcaactgcttctggaagaagggtgatgagcctgcagatgtcagcaagctgccaggctacaacagtggtgacgtctgcactttccctgactttctcaaatctgagatcaagtcctcaattcagcaggctaacagcgctccagttcctgtttctgacgatggctggtaccgtcctaggagcattgacgagcttcacaggttgtttcaatctagctccttcgatgaaaattccgtgaagatagtggcttcaaacactgggtctggagtgtacaaggatcaggacctttatgacaagtacattgacatcaaaggaatcccagagctttcagtcatcaacagaagcagcaaaggaattgagcttggatcagttgtgtccatctctaaagctattgaggtgctgtcagatggaaatctcgtcttcagaaagattgctggtcacctgaacaaagtggcttcaccgtttgttcggaacactgcaaccataggtggaaacatagtcatggcacaaagattgccattcgcatcggacattgcaaccatactactagctgcaggttcaacagtcacaatccaggtggcttccaaaaggctgtgcttcactctggaggagttcttgcagcagcctccatgcgattctaggaccctgctgctgagcatatttatcccggaatggggctcaaatgatgtcacctttgagactttccgagcagcacctcgtccacttggcaatgctgtctcatatgtcaattcagctttcttggcaaggacttcattggatgcagcatcaaaggaccatctcatcgaggatatatgtctggcgttcggtgcttatggagctgatcatgctattagaactagaaaggttgaggattacctgaagggcaaaacagtgagctcgtctgtcatacttgaagctgttcggttgcttaaagggtctattaaaccatcagaaggctcaacacatcctgagtatagaattagcttggctgtcagtttcttgtttaccttcctatcctcccttgccaatagcttgaatgaatctgcaaaggttaatggtaccaacgagcactcaccagagaagcaactcaagttggacatcaatgatttgccaatacgatcaagacaagaaatatttttcactgatgcatataagccagttggcaaagcaattaagaaagctggggtagagatccaagcttcaggggaagctgtgtacgttgatgatatccctgctcccaaagattgcctctatggggcatttatttatagcacacaccctcatgcacatgtaaagtcaatcaactttaaaccatctttggcttcacagaagatcatcacagttatcactgcaaaggatattcccagcggtggacaaaatgttggttatagcttcccgatgattggagaagaagcactttttgcagatccagttgctgaatttgctggtcaaaatattggtgttgtgattgctcaaacacagaagtatgcctacatggcggcaaagcaagccgtcattgagtatagcacagaaaatctgcagccaccaattctgacaatagaagatgcaatcgaacgaagcagcttcttccaaaccctcccatttgtagctcctaagccagttggtgattacgacaaagggatgtctgaagctgatcacaagattttatcggcagaggtaaaaattgaatcccaatactttttctacatggagccacaagtggcgctagctattcctgatgaagataactgcataaccatctattcttcaacacaattacctgagtccacacaaaatgtggttgcaaagtgcgttggcattccatttcacaatgtccgcgtaatcaccagaagggtcggaggaggctttggtggaaaagcattgaaatcaatgcatgttgcatgtgcatgtgcagttgctgcattgaagctacaacgtccagttcggatgtacctcgatcgcaagacagacatgataatggcaggcgggcggcatcctatgaaggtgaagtactctgttgggttcaagtcaaacggcaagatcacagccttacatcttgatcttgggatcaatggtggaatatctccagatatgagtccaatgattgcagcacctgtcataggttctctcaaaaagtacaactggggcaatcttgcatttgacaccaaggtctgcaaaacaaatgtctcatcaaaatcgtcaatgagagctcctggagatgcgcagggctctttcattgctgaagccatcatcgagcatgttgcctcggcactttcagccgacactaataccataaggagaaagaaccttcatgactttgagagccttgcagtgttctttggagatagtgca

SEQ ID NO: 47521 - DNA, 2024 bp, Zea Mays
aagcttctacatacagccttgtcaccatgttcgataaattggcctcctctccagaataccagcaccgagctgcaatggtggaacaattcaacagaagcaacaagtggaagaagcgtggcatttcttgtgtgcctgtaacatatgaggtgcagcttcggccaactccaggaaaggtgtctatcatgaatgatggttccattgctgttgaggctggaggggttgagctaggccaagggttgtggacaaaagtgaagcagatgacggcattcggactgggacagctgtgtcctgacggcggtgaaagccttctagacaaggtgcgggtcatccaggccgacacattgagcatgatccaaggaggggtcactggtgggagcaccacttctgaaactagctgtgaagcagttcgtaagtcgtgtgttgcactcgtcgagaggctgaagccaatcaaggagaatctggaggctaaaactggcacagttgaatggagtgccttgattgcacaggtgaggataagctttgtaaattccaattttctcattgccatgccaagaataacatctcattgtttaaaactttgcctccttcctttgagtcattaacaaatgacaagcaatagcagtagtaattaagggaggagatcctacagttctgaggaacacagtatttgttagtacttcaattggccatgtcattttgctgatcacttgcaggcaagtatggcgagcgttaacttatcggcacatgcatactggacccctgatccaactttcacaagctatttgaactacggagccggcactagcgaggtggaaattgatgtcctgacaggagcaacaacaattctaaggagtgaccttgtctacgattgcgggcaaagcttgaaccctgctgtcgatttgggccaggtggaaggtgcattcgtccaaggagtaggcttcttcacaaacgaggagtacgcaaccaactctgacgggttggtcatccacgatggcacatggacgtacaagatccccacggtcgacaccatcccaaagcagttcaacgttgagctgatcaacagcgcccgtgaccagaagcgcgtcctctcttccaaagcatcgggcgagcctccgcttctcctagcttcctctgtgcactgcgcaatgagggaggccatcagggccgccaggaaggaattctcggtctgcactggtccagcgaactccgccatcacgttccagatggacgtgcccgcaacgatgcctgtcgtcaaggagctctgcggcctggatgtcgtggagaggtacctggagagcgtgtcggctgccagcccaacaaacaccgctaaagcatagatccagtaggcgctctacccatggtgtgagggcttaatcaatctgtaaaacactaagcggcgtgacatgccgagctttcagtgttagctatgatgtacagaagaagaggtaccaatggcgagttgtggccatgcgaatcaggattcaggaatcatgaacaatagagggggggaaataaagtaaataagtgttgcgcaggcgaatgtggggacgaaatcatgtgatttcaactagaatttgaagaaatttgctaggttcgtactacttaccttctggatatatggggtcagattggatggaccagccacctaggttaagcctcgtcgcgactttcgctggcagcttctcccccgcgcgctgggtggatggaggataacttctctcccggctatgttttgcctcacactccccgcgcgctgtaacctgtaggctggcgagcaagtgatggcgacatcgcgcctattcgaactatggggtcagtggcggggttgagaacttgagatcagactctacttgatttcgcgggatgtgtagctgtgtgctcttgcccatgacgcacgagagagctgatgctgtgtgggtgttgccggatcgccgctgccgttgggttaggcccaatgtttggcatggccgtggcggaggatttcggccgccaacgcctgaaccctgcaactgcaaccaagcctc

SEQ ID NO: 47522 - DNA, 2072 bp, Zea Mays
cgctgagatctggtaacgcctcgcctcgtcagcatctctataaacgtagaattcagttgctggccccgttgctcctccacctgggcttctctcaccaacacccgcgatgtcatcctcctcgccgccgccgccgcacgtcgtcgaggacatgccccatgtcctccagcttctcagcgacggcacggtggtccgcttcgccgactacgacacgctccctcccccgtccgtgcctcccgcgccgctgcccgtccggtggaaggacgtcgtgtacgacgccacccacggcctcaagctccgcgtgtacagtcccagtccgccggcctcctgcggcaagctgcccgtgctggtctacttccacggcggcgggtacgtcctcggcaccttcgcgctgcccagcttccacgcctgctgcctccgcctggccggcgagctcccggccgtcgtgctttccgccgactaccgcctcgcgccggagcaccgcctccccgcagccctcgacgacgcggcggccgtcatgcgctgggtgcgcgcccaggccgtcgcggcggggggaggggacccctggctcgccgactcggctgacccgggccgggtgttcgtcgccggcgactcagcgggcgggaacatcgtccaccacgtcgccgtccgccgcctcggctcggcggcctcgggcgagctcgacccggtacgcgtcgccgggcacgtcatgctctgcccgttcttcggcggggccgagaggacggcgtccgagtcggagttcccgcccggcccgttcctgacgctgccgtggtacgaccaggcttggcggctggcgctgccgccgggcgccacgagggaccacccgttcgcgaacccgttcgggccggagagccccgcgctgctgggcctgcgcgacgtcgcgctcccgccgacgctcgtcgtggccgcggggcaggacctgctgcgcgaccgccaggcggactacgtcgcgcggctcaaggcgatgggacagcacgtggagcatgtcgagttcgagggtcagcaccacgggttcttcaccgtggagccggccagcgacgccagcagcgagttggtccggctcgtcaagcgcttcgtgtatggcgacggcgacggcaactccatctaaactggactcatgagccatcatgatcatgacctttgttgttagcttagcacgagtactcgcgtgacacgaacagagctgaagttggcctaacctgccacgcgcaccaagctggatgttcgatcagcgacaagccatgttaggtacggcgccaccatcagtccaccagcactgttcgaatctgacatcagttggcttaggcctatgtttcctccagctttttatcagttcagatatgaacagctaggaaagttttatttcacagtgtcatcgtcgatctcgccgattagtaaatgaataaatttgtgcatgctagtaattgctaaagacatgtttcgtcaacgaggagacctgtctggctgtccgcctgtccccgacgaaataatcacccggcgcggcgaccacacgaagaaatggcgaaactcagcagcagtttccgccaccgaatcgcgaaacatcctagcgctggtttccggcgttccacatgcaaacggccgcgaaaaaattatacacgagactgccgtggctagctactgtttcctgccgccggcgacgtgaaattcgcaccggcaccgaattctttcctcgcacgactttccgcggctagtggccgttcgcccgttcaccctcgacatggtgggagcgtgacgccgaatcacacaaccgccaggccaccagctccgactcgttgcagttggcagttgctggtgcagcaggccgcagcgcctttcccttccatttcgcctttgctccgcctccgtgttagttagtttcagagtttagttaagtctgcatctttcatttcagtgtctgtaaaataatagttggctgagtcagggagctgtcctgatcgccacggagtggaggtccgcgcaaagcgtgctcacgtgagagttcatgccggtcttctcgcccactgatggtgtgcgcggcgtggtagtcatggcgc

SEQ ID NO: 47523 - DNA, 1807 bp, Zea Mays
gcttcagtgtaggcgtgcacactttgtgttctgcctccgacaccctctcgcccgccctccgtcaatcacgcaaggtctgccacccgaccaccccatccgcagcgccaacacctccgtcggccgccagatccggatcccgtccccatcatcaacgcctccgcccccgtcaagctccctctacgcgtctgcctcctcctcggcctggatccgcggcggccctagagcgcgggcgcgcaggcacggccggcgcggctacacggcggcgcggacgccgcgtccccggccccggtcatggcgcgggtgcaggagacctgccatggcggcaccggtcccaagccctagccctggtggcggcgcggcatcaagccccggccccaccggcgggcgtggtcccgacggcgggcgcgatccctgcgcaggccttctcctggaggccctagagacgctcgacctcggcgcggagcatggcggcctcgctctcgttggtggcgacgacttgctcggcggcggcgacctcctcgcgggcctggacacaactagccgtcgccttttttgatgtgacgctctctgcaagacatgctgatatacgacaccggcgacattcgccagccgccctgcgccccgttcgtgaagaatgcgtcagccatgttcagtttctcgcagggctgcctttgttggaggcaagaagtgcccgcagatatctggggtaagccaagagaggttcaccaattggagttattgtctgaagaacctacctggtggatcttcaggtatctggatcagcttcggtacaacacaaagagctactgcagacagaccttggttggaggcaactatggcctgctcaacacaagtacatttgaaccaaaccctgactattatagtgctttgttgtggcaccgcctcatgcatgggcaccaaggtcctctcgacgctcgacggcattcaacggcacaaacaagatccgtgcctacgcacactgcgcgaaaaactcggaagagatcgctctgctcctgatcaacctggacggcatcagcacgaaccgcatctacgtgacgagccaaggcgcgcacgcccggagcggaaggaagaaggagagcaggacgtccgacgtccacatcatccctgcagggctcggcgaagcagcagccgcgctcacgagacaggagtaccatctaactcccaaggacgggaacctgcagagccagcagctgctgctgaacggcaacgtcctggcaaccgacgccgacggggagatcccggagctggagcccgtgcaggtggaggggacgcagcccataaccgtgggcccttactctatcgtgtttgctcacgtccccagcttctacgctcctgcgtgcctgtagctagagttttcgactggattttttttcagcctttctcggtgtgcatctcgtaggttaggtaagtctgtccgggtgaacggcgaagcttgttcatctctgcccatagtccgtgaagtgtaagctgctaggctggaaggtttgtggtttatgattgtttgggaaaggagtggtcagatatataatgtgtgagcaaaagaaggaaggaagctggaaatgagataataaaagaaagggttttgagttttagtctcattttgtttgagagagcagcagaaaaagcgtggatggaaccatgtgaagaagaaagagacgggagggcacaaccgcacgagacgcctccacccggaattccggttgccgaagacaaggcaaaaatatgtacaaggacacaagcagggatctcagcctaatcaatagtaacaagttacgtgctgcacaga

SEQ ID NO: 47524 - DNA, 1117 bp, Zea Mays
agcaaatgcactagatgcaagtgtctcgttaagataatcaatcgaatttgagggagaaatctgtaaatcaaggtttactggtatctggatcagcttcggtacaacacaaagagctactgcagacagaccttggttggaggcaactatggcctgctcaacacaagtacatttgaaccaaaccctgactattatagtgctttgttgtggcaccgcctcatgcatgggcaccaaggtcctctcgacgctcgacggcattcaacggcacaaacaagatccgtgcctacgcacactgcgcgaaaaactcggaagagatcgctctgctcctgatcaacctggacggcatcagcacgaaccgcatctacgtgacgagccaaggcgcgcacgcccggagcggaaggaagaaggagagcaggacgtccgacgtccacatcatccctgcagggctcggcgaagcagcagccgcgctcacgagacaggagtaccatctaactcccaaggacgggaacctgcagagccagcagctgctgctgaacggcaacgtcctggcaaccgacgccgacggggagatcccggagctggagcccgtgcaggtggaggggacgcagcccataaccgtgggcccttactctatcgtgtttgctcacgtccccagcttctacgctcctgcgtgcctgtagctagagttttcgactggattttttttcagcctttctcggtgtgcatctcgtaggttaggtaagtctgtccgggtgaacggcgaagcttgttcatctctgcccatagtccgtgaagtgtaagctgctaggctggaaggtttgtggtttatgattgtttgggaaaggagtggtcagatatataatgtgtgagcaaaagaaggaaggaagctggaaatgagataataaaagaaagggttttgagttttagtctcattttgtttgagagagcagcagaaaaagcgtggatggaaccatgtgaagaagaaagagacgggagggcacaaccgcacgagacgcctccacccggaattccggttgccgaagacaaggcaaaaatatgtacaaggacacaagcagggatctcagcctaatcaatagtaacaagttacgtgctgcacaga

SEQ ID NO: 47525 - DNA, 2149 bp, Zea Mays
tcactcactcgcatccgaacgccggaacgcgaagctggctgacagacggccccatacgagtcggacccacacgaatccgctacccgggacggcgggacgcacttcggctccgttccattcgtcggttcctcctcctcggttcctccccttccgccccgcttgtacggttgatccaacctgaaccacccaaccggtaaacgcctcctcgccgcccccgcgtccaatgccaccgccaccgccgccgccggccgggagttcgcctgcaagtccattgccaaacggaagctgatcacggaggaggatgtcgaagacgtgcgccgcgagatacagatcatgcaccacctcgcgggtcatgccaacgtcgtctccatcgttggcgcatacgaggacgccgtcgccgtgcagctcgtcatggagctctgcgccggtggggaactcttcgacaggatcatcaagagggggcactattccgagaaggcggccgcgcagctggccagggtgatcgtcggcgtcgtcgagtcgtgccactcgctcggcgtcatgcacagggatcttaagccggagaatttcttgtttgtcaatcaaaaggaggactcgcccctgatgaccatcgattttggactgtccatcttcttcaagccaggcgagatgtttacagatgtcgttggaagcccatattatgttgcacctgaggttctgctaaaatactatggccgtgaggttgatgtctggagcgctggtgtcataatatatatcctgttgagtggagtccctcctttctgggatgaaagtgaacaaggaatatttgaacaagttttgagaggtgacctggacttttcgtcggagccctggcctagcatctcagagagtgcaaaggatttggtcaggaaaatgcttattcgtgacccaaagaagagattaactgcccatgaagccttatgtcacccttgggtttgtgttgatggtgttgctcctgacaagcctcttgattctgctgttctaagccggttgaaacaattttctgcaatgaataaactgaagaaaatggccctgagggttattgctgagagtttatctgaggaagaaattgcaggattaaaagaaatgttcaaaatgattgacactgacaacagtggccatatcacattggaggaactaaaaactggcttgcagagagttggcgctaatttgatggactcagaaatcaatgctctgatggaagcagcggatatcgacaatagtggcacaattgattatggggagttcattgctgcaactttgcatataaacaaagttgagaaggaggataagctctttgctgctttctcatactttgacaaagacggcagcggttacataactcaagatgagctccaaaaggcatgtgaggagtttggtataggggatacccgacttgaggatattatcggggacatcgatcaggacaatgatggacggatcgactacaatgagtttgttgcaatgatgcagaagggagataatcctctggggagaaagggataccaaagtaatggtaatttcggtcttggagatgcacttaagcttcggtaaaataggagcagatgtttcccgttatagcaaacgtagcattcagcaactaagaaatttggaccaaacaacagctccaaaagcttgtaccatgccagtacactggtcaccaagattcaatgacgccctatcaaaatccggggtcgctgaagcaatctaggaagtgtgaacttttgccggaacgcatcaacctcacagaatgaacaatagggtcctcatgctcaacatgtcatattctgatatccctcctttctagtttacatgtagtggcagtgaaaccagccgactgtgtatctgcgctgtaatttaagcaagcatgagagtaggtgagattgcttttatctgccccctttattcttccattgggaatcaatgacaggaagagagtgaaccatcctgcgtctgcattccaagactaatgtttcagttatgttcgtccatgttggataggtgtagttcttagtgcctgtaagaatataagattatattgttgtaggagtctgaccaatgaagcaattcttctgtgttgattttcctttgttaccaaaacatggtgaatgattacgggagccgctttgtg

SEQ ID NO: 47526 - DNA, 2296 bp, Zea Mays
tggcaaactgcctgcattagcatgactagataaggcgagcccagcattggccagccccacctgtcattggttcaaggggaggcgggggagccacggcggcggagggaattgtttaatcccccgtcaccgtctcctatcgccatcaccccacccgtcccccttggtccaggcgcaggcgcgagcgcgacgtccggcgtccggcttcggcggcggagtggagcgatcccgatccccacaaggaattccatcgctgtcgtggcgtttggtggcgctcctcccggccggcaagcaggatcagtcgacgccctcttggcttgcctttggctgtaggaaatcgcacggaggtgaggatacacgggtgcggaacgagagctaggcgaacctgtctggtacctcgcggcggagatggacgagaaggcgacgatggagagcaagctgtcctcggcggcggccttcgtggaggggggcgtgcaggacgcctgcgacgacgcctgcagcatctgcctcgacgccttctgcgacagcaacccctccacgatgaccaagtgcaagcatgactaccatcttcagtgcattcttgaatggtgtatattataattcatgtaataatttaggtgccagagaagctcccagtgccccatgtgttggcagcatatcagcatgaaagatcctatgagccaagagctactagaggctgttgaacaagagaggaacatccgagctaatccttcacgtaatactgctgttttccaccatcaaatgctgggtgattttgagatccctgtaggtgcagatgatgcagaacttgaagaacgcattattcagcacttggctgccgcagctgcagtgcgtaggtcacaccgtcatcataatagaagagatgggcaccagagcagatcagaagcaagtagccacccacagtttctggtgctctcagcagacgagcgcacaatctcaggtcaagaaggggactacgaacaagcatctgctgtagcttctggccgccctttacgtacacttgttgaacaagaacgcactcgagggttagcggatgcttccagtccatctctccgttgttctactcctgctgatagtactggtagatcaaacaataggatttctgggatcgaatctacacctgtggatcaagacggaactggaccatccgctttacaatcaatggcagtacagggatttcataatcaaagtgcaagtggatggagggagaggtggttttctcggagcaactctttactggatcttggttctgaggtgaggagggaggtcaacgcggggattgctgcggtgtctcgcatgatggaatggcacgatgcaagggacgggacgggagcggggccttctcctacctctgcatcaagatctggttctcagtgaaacactctgcacttgaaaggaccgatgcaaatgtaaagattaaggcaagctgctggaagcgacgtgccaagtggctgggctcttcggtcagcggtcgcgattcgcaagctgccagtagacggagaaggggctgtgataccgaaagacgaacgaactgaactggtgggctggggctgccctggagaggcagagggagccgtccacattattacttggtttctttcttttttttgtttattattgagaataatgatgaatcaggtcaggtgggtgggggatgtggctgtaaactcggtgggctgtcggtgtgtccagggggaaaaaaagagagaaaaggcagcgaaagaaattgtccatacatgaagaagcccagggtcgtcgtctgtgtataggaagggattaaaaaagatgttttgttttcttctgtctttctttgctttgcttgtgttcccgttttgacaatgagaaatatcgggtaaacacacaaccttccctattatacatttcccttcattttattatacatatatactctctctctctctctctctctttctttgtcaagaatgcaacagtccgggcagtggggattgaggaatcttcaggaggatctagtttttttttatatcataaatacaatcaggtgaattcctactttagatttattggaggagaatgataaactctacatataaaccagagatgctccaactcagaagctgctggtgctagtatagtattgatgaagcaggagacagctaatccctgatggctttgcatgactgtagtatactagtggcgaacaactataactcaaaaggaacgccatgtttgctgcgagtttaatttagatgtgacttctatagtatcatgttcgctgtgagtttaatttagatgtgat

SEQ ID NO: 47527 - DNA, 2169 bp, Zea Mays
ggccagccccacctgtcattggttcaaggggaggcgggggagccacggcggcggagggaattgtttaatcccccgtcaccgtctcctatcgccatcaccccacccgtcccccttggtccaggcgcaggcgcgagcgcgacgtccggcgtccggcttcggcggcggagtggagcgatcccgatccccacaaggaattccatcgctgtcgtggcgtttggtggcgctcctcccggccggcaagcaggatcaggaaatcgcacggaggtgaggatacacgggtgcggaacgagagctaggcgaacctgtctggtacctcgcggcggagatggacgagaaggcgacgatggagagcaagctgtcctcggcggcggccttcgtggaggggggcgtgcaggacgcctgcgacgacgcctgcagcatctgcctcgacgccttctgcgacagcaacccctccacgatgaccaagtgcaagcatgactaccatcttcagtgcattcttgaatggtgtatattataattcatgtaataatttaggtgccagagaagctcccagtgccccatgtgttggcagcatatcagcatgaaagatcctatgagccaagagctactagaggctgttgaacaagagaggaacatccgagctaatccttcacatccctgtaggtgcagatgatgcagaacttgaagaacgcattattcagcacttggctgccgcagctgcagtgcgtaggtcacaccgtcatcataatagaagagatgggcaccagagcagatcagaagcaagtagccacccacagtttctggtgctctcagcagacgagcgcacaatctcaggtcaagaaggggactacgaacaagcatctgctgtagcttctggccgccctttacgtacacttgttgaacaagaacgcactcgagggttagcggatgcttccagtccatctctccgttgttctactcctgctgatagtactggtagatcaaacaataggatttctgggatcgaatctacacctgtggatcaagacggaactggaccatccgctttacaatcaatggtacagggatttcataatcaaagtgcaagtggatggagggagaggtggttttctcggagcaactctttactggatcttggttctgaggtgaggagggaggtcaacgcggggattgctgcggtgtctcgcatgatggaatggcacgatgcaagggacgggacgggagcggggccttctcctacctctgcatcaagatctggttctcagtgaaacactctgcacttgaaaggaccgatgcaaatgtaaagattaaggcaagctgctggaagcgacgtgccaagtggctgggctcttcggtcagcggtcgcgattcgcaagctgccagtagacggagaaggggctgtgataccgaaagacgaacgaactgaactggtgggctggggctgccctggagaggcagagggagccgtccacattattacttggtttctttcttttttttgtttattattgagaataatgatgaatcaggtcaggtgggtgggggatgtggctgtaaactcggtgggctgtcggtgtgtccagggggaaaaaaagagagaaaaggcagcgaaagaaattgtccatacatgaagaagcccagggtcgtcgtctgtgtataggaagggattaaaaaagatgttttgttttcttctgtctttctttgctttgcttgtgttcccgttttgacaatgagaaatatcgggtaaacacacaaccttccctattatacatttcccttcattttattatacatatatactctctctctctctctctctctttctttgtcaagaatgcaacagtccgggcagtggggattgaggaatcttcaggaggatctagtttttttttatatcataaatacaatcaggtgaattcctactttagatttattggaggagaatgataaactctacatataaaccagagatgctccaactcagaagctgctggtgctagtatagtattgatgaagcaggagacagctaatccctgatggctttgcatgactgtagtatactagtggcgaacaactataactcaaaaggaacgccatgtttgctgcgagtttaatttagatgtgacttctatagtatcatgttcgctgtgagtttaatttagatgtgat

SEQ ID NO: 47528 - DNA, 1746 bp, Zea Mays
gttcaaggggaggcgggggagccacggcggcggagggaattgtttaatcccccgtcaccgtctcctatcgccatcaccccacccgtcccccttggtccaggcgcaggcgcgagcgcgacgtccggcgtccggcttcggcggcggagtggagcgatcccgatccccacaaggaattccatcgctgtcgtggcgtttggtggcgctcctcccggccggcaagcaggatcaggaaatcgcacggaggtgaggatacacgggtgcggaacgagagctaggcgaacctgtctggtacctcgcggcggagatggacgagaaggcgacgatggagagcaagctgtcctcggcggcggccttcgtggaggggggcgtgcaggacgcctgcgacgacgcctgcagcatctgcctcgacgccttctgcgacagcaacccctccacgatgaccaagtgcaagcatgactaccatcttcagtgcattcttgaatggtgccagagaagctcccagtgccccatgtgttggcagcatatcagcatgaaagatcctatgagccaagagctactagaggctgttgaacaagagaggaacatccgagctaatccttcacgtaatactgctgttttccaccatcaaatgctgggtgattttgagatccctgtaggtgcagatgatgcagaacttgaagaacgcattattcagcacttggctgccgcagctgcagtgcgtaggtcacaccgtcatcataatagaagagatgggcaccagagcagatcagaagcaagtagccacccacagtttctggtgctctcagcagacgagcgcacaatctcaggtcaagaaggggactacgaacaagcatctgctgtagcttctggccgccctttacgtacacttgttgaacaagaacgcactcgagggttagcggatgcttccagtccatctctccgttgttctactcctgctgatagtactggtagatcaaacaataggatttctgggatcgaatctacacctgtggatcaagacggaactggaccatccgctttacaatcaatggcagtacagggatttcataatcaaagtgcaagtggatggagggagaggtggttttctcggagcaactctttactggatcttggttctgaggtgaggagggaggtcaacgcggggattgctgcggtgtctcgcatgatggaatggcacgatgcaagggacgggacgggagcggggccttctcctacctctgcatcaagatctggttctcagtgaaacactctgcacttgaaaggaccgatgcaaatgtaaagattaaggtatgtgctcatgctgtgctaatgaaagccttaaattcagtgttttgttttttttctggtggcgtactgtcactgttgactggcctacggatctgagtttttgtgtaattgtttggaagcaattccattgtcgccgaaatggcgcggtagtttctctgactgctgctgctaaatactaggaactttagttttcttcaagtccaaagggtcagagttgagagcacctgagatccggcgatgcttcatggccacggtcccccagaggctattcgcaatagttgactctaaatttctctctatatatcagttttttgtgtcacattatcaacatttcataccttactttttttaggagcagctattgtttgaggagcactttaggaagacaatcaccttgcaacttctctagcatatatgaatttttgaaaaccaccttag

SEQ ID NO: 47529 - DNA, 1599 bp, Zea Mays
gttcaaggggaggcgggggagccacggcggcggagggaattgtttaatcccccgtcaccgtctcctatcgccatcaccccacccgtcccccttggtccaggcgcaggcgcgagcgcgacgtccggcgtccggcttcggcggcggagtggagcgatcccgatccccacaaggaattccatcgctgtcgtggcgtttggtggcgctcctcccggccggcaagcaggatcagtcgacgccctcttggcttgcctttggctgtaggaaatcgcacggaggtgaggatacacgggtgcggaacgagagctaggcgaacctgtctggtacctcgcggcggagatggacgagaaggcgacgatggagagcaagctgtcctcggcggcggccttcgtggaggggggcgtgcaggacgcctgcgacgacgcctgcagcatctgcctcgacgccttctgcgacagcaacccctccacgatgaccaagtgcaagcatgactaccatcttcagtgcattcttgaatggtgccagagaagctcccagtgccccatgtgttggcagcatatcagcatgaaagatcctatgagccaagagctactagaggctgttgaacaagagaggaacatccgagctaatccttcacgtaatactgctgttttccaccatcaaatgctgggtgattttgagatccctgtaggtgcagatgatgcagaacttgaagaacgcattattcagcacttggctgccgcagctgcagtgcgtaggtcacaccgtcatcataatagaagagatgggcaccagagcagatcagaagcaagtagccacccacagtttctggtgctctcagcagacgagcgcacaatctcaggtcaagaaggggactacgaacaagcatctgctgtagcttctggccgccctttacgtacacttgttgaacaagaacgcactcgagggttagcggatgcttccagtccatctctccgttgttctactcctgctgatagtactggtagatcaaacaataggatttctgggatcgaatctacacctgtggatcaagacggaactggaccatccgctttacaatcaatggcagtacagggatttcataatcaaagtgcaagtggatggagggagaggtggttttctcggagcaactctttactggatcttggttctgaggtgaggagggaggtcaacgcggggattgctgcggtgtctcgcatgatggaatggcacgatgcaagggacgggacgggagcggggccttctcctacctctgcatcaagatctggttctcagtgaaacactctgcacttgaaaggaccgatgcaaatgtaaagattaaggaactttagttttcttcaagtccaaagggtcagagttgagagcacctgagatccggcgatgcttcatggccacggtcccccagaggctattcgcaatagttgactctaaatttctctctatatatcagttttttgtgtcacattatcaacatttcataccttactttttttaggagcagctattgtttgaggagcactttaggaagacaatcaccttgcaacttctctagcatatatgaatttttgaaaaccaccttag

SEQ ID NO: 47530 - DNA, 1539 bp, Zea Mays
gttcaaggggaggcgggggagccacggcggcggagggaattgtttaatcccccgtcaccgtctcctatcgccatcaccccacccgtcccccttggtccaggcgcaggcgcgagcgcgacgtccggcgtccggcttcggcggcggagtggagcgatcccgatccccacaaggaattccatcgctgtcgtggcgtttggtggcgctcctcccggccggcaagcaggatcaggaaatcgcacggaggtgaggatacacgggtgcggaacgagagctaggcgaacctgtctggtacctcgcggcggagatggacgagaaggcgacgatggagagcaagctgtcctcggcggcggccttcgtggaggggggcgtgcaggacgcctgcgacgacgcctgcagcatctgcctcgacgccttctgcgacagcaacccctccacgatgaccaagtgcaagcatgactaccatcttcagtgcattcttgaatggtgccagagaagctcccagtgccccatgtgttggcagcatatcagcatgaaagatcctatgagccaagagctactagaggctgttgaacaagagaggaacatccgagctaatccttcacgtaatactgctgttttccaccatcaaatgctgggtgattttgagatccctgtaggtgcagatgatgcagaacttgaagaacgcattattcagcacttggctgccgcagctgcagtgcgtaggtcacaccgtcatcataatagaagagatgggcaccagagcagatcagaagcaagtagccacccacagtttctggtgctctcagcagacgagcgcacaatctcaggtcaagaaggggactacgaacaagcatctgctgtagcttctggccgccctttacgtacacttgttgaacaagaacgcactcgagggttagcggatgcttccagtccatctctccgttgttctactcctgctgatagtactggtagatcaaacaataggatttctgggatcgaatctacacctgtggatcaagacggaactggaccatccgctttacaatcaatggtacagggatttcataatcaaagtgcaagtggatggagggagaggtggttttctcggagcaactctttactggatcttggttctgaggtgaggagggaggtcaacgcggggattgctgcggtgtctcgcatgatggaatggcacgatgcaagggacgggacgggagcggggccttctcctacctctgcatcaagatctggttctcagtgaaacactctgcacttgaaaggaccgatgcaaatgtaaagattaagagcatgcaaggctagatgaagcagaggtttgacggcacggaggcaaaacggccttgtcacgtggccagcccatctcgaattcctcgaagcaggcaagtagtagaagagcacgtgcaagcgccagagacggggcaatgtgtatagggatggagccagacagcgcgcaaaggtgcgccgccagtgacaatccgcaacacagccagcgcggttagtagcgagcgtgacagacacgag

SEQ ID NO: 47531 - DNA, 2165 bp, Zea Mays
gttcaaggggaggcgggggagccacggcggcggagggaattgtttaatcccccgtcaccgtctcctatcgccatcaccccacccgtcccccttggtccaggcgcaggcgcgagcgcgacgtccggcgtccggcttcggcggcggagtggagcgatcccgatccccacaaggaattccatcgctgtcgtggcgtttggtggcgctcctcccggccggcaagcaggatcaggaaatcgcacggaggtgaggatacacgggtgcggaacgagagctaggcgaacctgtctggtacctcgcggcggagatggacgagaaggcgacgatggagagcaagctgtcctcggcggcggccttcgtggaggggggcgtgcaggacgcctgcgacgacgcctgcagcatctgcctcgacgccttctgcgacagcaacccctccacgatgaccaagtgcaagcatgactaccatcttcagtgcattcttgaatggtgccagagaagctcccagtgccccatgtgttggcagcatatcagcatgaaagatcctatgagccaagagctactagaggctgttgaacaagagaggaacatccgagctaatccttcacgtaatactgctgttttccaccatcaaatgctgggtgattttgagatccctgtaggtgcagatgatgcagaacttgaagaacgcattattcagcacttggctgccgcagctgcagtgcgtaggtcacaccgtcatcataatagaagagatgggcaccagagcagatcagaagcaagtagccacccacagtttctggtgctctcagcagacgagcgcacaatctcaggtcaagaaggggactacgaacaagcatctgctgtagcttctggccgccctttacgtacacttgttgaacaagaacgcactcgagggttagcggatgcttccagtccatctctccgttgttctactcctgctgatagtactggtagatcaaacaataggatttctgggatcgaatctacacctgtggatcaagacggaactggaccatccgctttacaatcaatggcagtacagggatttcataatcaaagtgcaagtggatggagggagaggtggttttctcggagcaactctttactggatcttggttctgaggtgaggagggaggtcaacgcggggattgctgcggtgtctcgcatgatggaatggcacgatgcaagggacgggacgggagcggggccttctcctacctctgcatcaagatctggttctcagtgaaacactctgcacttgaaaggaccgatgcaaatgtaaagattaaggcaagctgctggaagcgacgtgccaagtggctgggctcttcggtcagcggtcgcgattcgcaagctgccagtagacggagaaggggctgtgataccgaaagacgaacgaactgaactggtgggctggggctgccctggagaggcagagggagccgtccacattattacttggtttctttcttttttttgtttattattgagaataatgatgaatcaggtcaggtgggtgggggatgtggctgtaaactcggtgggctgtcggtgtgtccagggggaaaaaaagagagaaaaggcagcgaaagaaattgtccatacatgaagaagcccagggtcgtcgtctgtgtataggaagggattaaaaaagatgttttgttttcttctgtctttctttgctttgcttgtgttcccgttttgacaatgagaaatatcgggtaaacacacaaccttccctattatacatttcccttcattttattatacatatatactctctctctctctctctctctttctttgtcaagaatgcaacagtccgggcagtggggattgaggaatcttcaggaggatctagtttttttttatatcataaatacaatcaggtgaattcctactttagatttattggaggagaatgataaactctacatataaaccagagatgctccaactcagaagctgctggtgctagtatagtattgatgaagcaggagacagctaatccctgatggctttgcatgactgtagtatactagtggcgaacaactataactcaaaaggaacgccatgtttgctgcgagtttaatttagatgtgacttctatagtatcatgttcgctgtgagtttaatttagatgtgat

SEQ ID NO: 47532 - DNA, 1908 bp, Zea Mays
gttcaaggggaggcgggggagccacggcggcggagggaattgtttaatcccccgtcaccgtctcctatcgccatcaccccacccgtcccccttggtccaggcgcaggcgcgagcgcgacgtccggcgtccggcttcggcggcggagtggagcgatcccgatccccacaaggaattccatcgctgtcgtggcgtttggtggcgctcctcccggccggcaagcaggatcaggtgccagagaagctcccagtgccccatgtgttggcagcatatcagcatgaaagatcctatgagccaagagctactagaggctgttgaacaagagaggaacatccgagctaatccttcacgtaatactgctgttttccaccatcaaatgctgggtgattttgagatccctgtaggtgcagatgatgcagaacttgaagaacgcattattcagcacttggctgccgcagctgcagtgcgtaggtcacaccgtcatcataatagaagagatgggcaccagagcagatcagaagcaagtagccacccacagtttctggtgctctcagcagacgagcgcacaatctcaggtcaagaaggggactacgaacaagcatctgctgtagcttctggccgccctttacgtacacttgttgaacaagaacgcactcgagggttagcggatgcttccagtccatctctccgttgttctactcctgctgatagtactggtagatcaaacaataggatttctgggatcgaatctacacctgtggatcaagacggaactggaccatccgctttacaatcaatggtacagggatttcataatcaaagtgcaagtggatggagggagaggtggttttctcggagcaactctttactggatcttggttctgaggtgaggagggaggtcaacgcggggattgctgcggtgtctcgcatgatggaatggcacgatgcaagggacgggacgggagcggggccttctcctacctctgcatcaagatctggttctcagtgaaacactctgcacttgaaaggaccgatgcaaatgtaaagattaaggcaagctgctggaagcgacgtgccaagtggctgggctcttcggtcagcggtcgcgattcgcaagctgccagtagacggagaaggggctgtgataccgaaagacgaacgaactgaactggtgggctggggctgccctggagaggcagagggagccgtccacattattacttggtttctttcttttttttgtttattattgagaataatgatgaatcaggtcaggtgggtgggggatgtggctgtaaactcggtgggctgtcggtgtgtccagggggaaaaaaagagagaaaaggcagcgaaagaaattgtccatacatgaagaagcccagggtcgtcgtctgtgtataggaagggattaaaaaagatgttttgttttcttctgtctttctttgctttgcttgtgttcccgttttgacaatgagaaatatcgggtaaacacacaaccttccctattatacatttcccttcattttattatacatatatactctctctctctctctctctctttctttgtcaagaatgcaacagtccgggcagtggggattgaggaatcttcaggaggatctagtttttttttatatcataaatacaatcaggtgaattcctactttagatttattggaggagaatgataaactctacatataaaccagagatgctccaactcagaagctgctggtgctagtatagtattgatgaagcaggagacagctaatccctgatggctttgcatgactgtagtatactagtggcgaacaactataactcaaaaggaacgccatgtttgctgcgagtttaatttagatgtgacttctatagtatcatgttcgctgtgagtttaatttagatgtgat

SEQ ID NO: 47533 - DNA, 2224 bp, Zea Mays
gttcaaggggaggcgggggagccacggcggcggagggaattgtttaatcccccgtcaccgtctcctatcgccatcaccccacccgtcccccttggtccaggcgcaggcgcgagcgcgacgtccggcgtccggcttcggcggcggagtggagcgatcccgatccccacaaggaattccatcgctgtcgtggcgtttggtggcgctcctcccggccggcaagcaggatcagtcgacgccctcttggcttgcctttggctgtaggaaatcgcacggaggtgaggatacacgggtgcggaacgagagctaggcgaacctgtctggtacctcgcggcggagatggacgagaaggcgacgatggagagcaagctgtcctcggcggcggccttcgtggaggggggcgtgcaggacgcctgcgacgacgcctgcagcatctgcctcgacgccttctgcgacagcaacccctccacgatgaccaagtgcaagcatgactaccatcttcagtgcattcttgaatggtgtatattataattcatgtaataatttaggtgccagagaagctcccagtgccccatgtgttggcagcatatcagcatgaaagatcctatgagccaagagctactagaggctgttgaacaagagaggaacatccgagctaatccttcacgtaatactgctgttttccaccatcaaatgctgggtgattttgagatccctgtaggtgcagatgatgcagaacttgaagaacgcattattcagcacttggctgccgcagctgcagtgcgtaggtcacaccgtcatcataatagaagagatgggcaccagagcagatcagaagcaagtagccacccacagtttctggtgctctcagcagacgagcgcacaatctcaggtcaagaaggggactacgaacaagcatctgctgtagcttctggccgccctttacgtacacttgttgaacaagaacgcactcgagggttagcggatgcttccagtccatctctccgttgttctactcctgctgatagtactggtagatcaaacaataggatttctgggatcgaatctacacctgtggatcaagacggaactggaccatccgctttacaatcaatggtacagggatttcataatcaaagtgcaagtggatggagggagaggtggttttctcggagcaactctttactggatcttggttctgaggtgaggagggaggtcaacgcggggattgctgcggtgtctcgcatgatggaatggcacgatgcaagggacgggacgggagcggggccttctcctacctctgcatcaagatctggttctcagtgaaacactctgcacttgaaaggaccgatgcaaatgtaaagattaaggcaagctgctggaagcgacgtgccaagtggctgggctcttcggtcagcggtcgcgattcgcaagctgccagtagacggagaaggggctgtgataccgaaagacgaacgaactgaactggtgggctggggctgccctggagaggcagagggagccgtccacattattacttggtttctttcttttttttgtttattattgagaataatgatgaatcaggtcaggtgggtgggggatgtggctgtaaactcggtgggctgtcggtgtgtccagggggaaaaaaagagagaaaaggcagcgaaagaaattgtccatacatgaagaagcccagggtcgtcgtctgtgtataggaagggattaaaaaagatgttttgttttcttctgtctttctttgctttgcttgtgttcccgttttgacaatgagaaatatcgggtaaacacacaaccttccctattatacatttcccttcattttattatacatatatactctctctctctctctctctctttctttgtcaagaatgcaacagtccgggcagtggggattgaggaatcttcaggaggatctagtttttttttatatcataaatacaatcaggtgaattcctactttagatttattggaggagaatgataaactctacatataaaccagagatgctccaactcagaagctgctggtgctagtatagtattgatgaagcaggagacagctaatccctgatggctttgcatgactgtagtatactagtggcgaacaactataactcaaaaggaacgccatgtttgctgcgagtttaatttagatgtgacttctatagtatcatgttcgctgtgagtttaatttagatgtgat

SEQ ID NO: 47534 - DNA, 2162 bp, Zea Mays
gttcaaggggaggcgggggagccacggcggcggagggaattgtttaatcccccgtcaccgtctcctatcgccatcaccccacccgtcccccttggtccaggcgcaggcgcgagcgcgacgtccggcgtccggcttcggcggcggagtggagcgatcccgatccccacaaggaattccatcgctgtcgtggcgtttggtggcgctcctcccggccggcaagcaggatcaggaaatcgcacggaggtgaggatacacgggtgcggaacgagagctaggcgaacctgtctggtacctcgcggcggagatggacgagaaggcgacgatggagagcaagctgtcctcggcggcggccttcgtggaggggggcgtgcaggacgcctgcgacgacgcctgcagcatctgcctcgacgccttctgcgacagcaacccctccacgatgaccaagtgcaagcatgactaccatcttcagtgcattcttgaatggtgccagagaagctcccagtgccccatgtgttggcagcatatcagcatgaaagatcctatgagccaagagctactagaggctgttgaacaagagaggaacatccgagctaatccttcacgtaatactgctgttttccaccatcaaatgctgggtgattttgagatccctgtaggtgcagatgatgcagaacttgaagaacgcattattcagcacttggctgccgcagctgcagtgcgtaggtcacaccgtcatcataatagaagagatgggcaccagagcagatcagaagcaagtagccacccacagtttctggtgctctcagcagacgagcgcacaatctcaggtcaagaaggggactacgaacaagcatctgctgtagcttctggccgccctttacgtacacttgttgaacaagaacgcactcgagggttagcggatgcttccagtccatctctccgttgttctactcctgctgatagtactggtagatcaaacaataggatttctgggatcgaatctacacctgtggatcaagacggaactggaccatccgctttacaatcaatggtacagggatttcataatcaaagtgcaagtggatggagggagaggtggttttctcggagcaactctttactggatcttggttctgaggtgaggagggaggtcaacgcggggattgctgcggtgtctcgcatgatggaatggcacgatgcaagggacgggacgggagcggggccttctcctacctctgcatcaagatctggttctcagtgaaacactctgcacttgaaaggaccgatgcaaatgtaaagattaaggcaagctgctggaagcgacgtgccaagtggctgggctcttcggtcagcggtcgcgattcgcaagctgccagtagacggagaaggggctgtgataccgaaagacgaacgaactgaactggtgggctggggctgccctggagaggcagagggagccgtccacattattacttggtttctttcttttttttgtttattattgagaataatgatgaatcaggtcaggtgggtgggggatgtggctgtaaactcggtgggctgtcggtgtgtccagggggaaaaaaagagagaaaaggcagcgaaagaaattgtccatacatgaagaagcccagggtcgtcgtctgtgtataggaagggattaaaaaagatgttttgttttcttctgtctttctttgctttgcttgtgttcccgttttgacaatgagaaatatcgggtaaacacacaaccttccctattatacatttcccttcattttattatacatatatactctctctctctctctctctctttctttgtcaagaatgcaacagtccgggcagtggggattgaggaatcttcaggaggatctagtttttttttatatcataaatacaatcaggtgaattcctactttagatttattggaggagaatgataaactctacatataaaccagagatgctccaactcagaagctgctggtgctagtatagtattgatgaagcaggagacagctaatccctgatggctttgcatgactgtagtatactagtggcgaacaactataactcaaaaggaacgccatgtttgctgcgagtttaatttagatgtgacttctatagtatcatgttcgctgtgagtttaatttagatgtgat

SEQ ID NO: 47535 - DNA, 2197 bp, Zea Mays
gttcaaggggaggcgggggagccacggcggcggagggaattgtttaatcccccgtcaccgtctcctatcgccatcaccccacccgtcccccttggtccaggcgcaggcgcgagcgcgacgtccggcgtccggcttcggcggcggagtggagcgatcccgatccccacaaggaattccatcgctgtcgtggcgtttggtggcgctcctcccggccggcaagcaggatcagtcgacgccctcttggcttgcctttggctgtaggaaatcgcacggaggtgaggatacacgggtgcggaacgagagctaggcgaacctgtctggtacctcgcggcggagatggacgagaaggcgacgatggagagcaagctgtcctcggcggcggccttcgtggaggggggcgtgcaggacgcctgcgacgacgcctgcagcatctgcctcgacgccttctgcgacagcaacccctccacgatgaccaagtgcaagcatgactaccatcttcagtgcattcttgaatggtgccagagaagctcccagtgccccatgtgttggcagcatatcagcatgaaagatcctatgagccaagagctactagaggctgttgaacaagagaggaacatccgagctaatccttcacgtaatactgctgttttccaccatcaaatgctgggtgattttgagatccctgtaggtgcagatgatgcagaacttgaagaacgcattattcagcacttggctgccgcagctgcagtgcgtaggtcacaccgtcatcataatagaagagatgggcaccagagcagatcagaagcaagtagccacccacagtttctggtgctctcagcagacgagcgcacaatctcaggtcaagaaggggactacgaacaagcatctgctgtagcttctggccgccctttacgtacacttgttgaacaagaacgcactcgagggttagcggatgcttccagtccatctctccgttgttctactcctgctgatagtactggtagatcaaacaataggatttctgggatcgaatctacacctgtggatcaagacggaactggaccatccgctttacaatcaatggcagtacagggatttcataatcaaagtgcaagtggatggagggagaggtggttttctcggagcaactctttactggatcttggttctgaggtgaggagggaggtcaacgcggggattgctgcggtgtctcgcatgatggaatggcacgatgcaagggacgggacgggagcggggccttctcctacctctgcatcaagatctggttctcagtgaaacactctgcacttgaaaggaccgatgcaaatgtaaagattaaggcaagctgctggaagcgacgtgccaagtggctgggctcttcggtcagcggtcgcgattcgcaagctgccagtagacggagaaggggctgtgataccgaaagacgaacgaactgaactggtgggctggggctgccctggagaggcagagggagccgtccacattattacttggtttctttcttttttttgtttattattgagaataatgatgaatcaggtcaggtgggtgggggatgtggctgtaaactcggtgggctgtcggtgtgtccagggggaaaaaaagagagaaaaggcagcgaaagaaattgtccatacatgaagaagcccagggtcgtcgtctgtgtataggaagggattaaaaaagatgttttgttttcttctgtctttctttgctttgcttgtgttcccgttttgacaatgagaaatatcgggtaaacacacaaccttccctattatacatttcccttcattttattatacatatatactctctctctctctctctctctttctttgtcaagaatgcaacagtccgggcagtggggattgaggaatcttcaggaggatctagtttttttttatatcataaatacaatcaggtgaattcctactttagatttattggaggagaatgataaactctacatataaaccagagatgctccaactcagaagctgctggtgctagtatagtattgatgaagcaggagacagctaatccctgatggctttgcatgactgtagtatactagtggcgaacaactataactcaaaaggaacgccatgtttgctgcgagtttaatttagatgtgacttctatagtatcatgttcgctgtgagtttaatttagatgtgat

SEQ ID NO: 47536 - DNA, 1680 bp, Zea Mays
caaaaagggcgcctgaaattccacgggatgaagagaaaacggcaacaaaagggtccatctctttccgacatgcggtgcagaaagtgaaaacgcgagaaaggcgccgtcttccaccccccttttctctttgtcctcgtccgtgccgttgccactgttgccacgccacgcaggcggcagcgagcgcaataatgcgcacgcagaggagcacagcggcgtcactgctgcggcagtaatggccgcctggttctcccacggcgtctactagcgatacaccgagaccacttttctcttgcttccttcgaccccgccccctccggcctccggatcgcgcaccgcgcctgccctccacccaaaaccgctccggagcctttgcgaagcggcgccgcttactggccggcaaggcgaccccgtctctcggcggcctgcgttgatctggttgctgctgttgaggtgggcagagcggcggccgcgatgggcatctcggcgaggtggctcaagtcattagttgggctgaggaaggtggagcagcagccgcgtaaggagagtgcagatgttggacgaatgaaaagtgatgtcgccgatcagtttcattttcagaatcagcgctctcaagatgacagcagcattgctgcacaagaagaaattccagaggttccttatggaaatgatccacctgaagatgattctaatgcaccttcatgcttggaacccacttatagttcagctgatgtgccactgtttcaaactgaagaggaactgaaagagatctgggctgctacaattattcagacaacattcagagctttcctggctaggagagcccatcgagctttaaaagggttggttaggcttcaagcccttgtaagaggtcacatagtaagaaagcaagctgatacgacactccgttgtatgcaagctttggtcagggttcaggcccgtgttagagcaaggcgagttcgcatggctttggaaaaccagactgatcagcaaaatacttcaccagagcacacgaccgtggcacgtgtcagagaaattgaggatggctggtgtgatagtattggttctgtggaagatatccaagcaaaacttttaaagaggcaggaagcagcagctaaacgtgagcgagccatggcctatgctctagctcatcaggttcagaagctggtagacacctgacaaagaaaggcacagttaaccgatccctgaaggccacaaaagattcccacatgctggggtcaagacatcatcttgccagttgcattgatccagttcccactagagttgagctggagacttagaaggcatgtgatgcttgaacatcgccatggattgcacttagcatagcaagtagcaacttggatgccattcatgtctgcatggctgcatcgtttgtactggcggcagcggcttctttcaacaccgaatatgcacgtcagcatgtccatacatgctgaggttaccccattgggcctttgagatgtaaattatgtcgttcagtcgagtggtatgcttatcatgtgtttatcggtgtatgatgttggtatagttgtaacttggaaggctaagcgaagttgtactgttgtatttggtattgccgtattgatatatagattgcacatgcgtcttgcagttgaatttctaccattttagacaaaatttgctaaaaaaacattgggtgcg

SEQ ID NO: 47537 - DNA, 1554 bp, Zea Mays
gagaaaggcgccgtcttccaccccccttttctctttgtcctcgtccgtgccgttgccactgttgccacgccacgcaggcggcagcgagcgcaataatgcgcacgcagaggagcacagcggcgtcactgctgcggcagtaatggccgcctggttctcccacggcgtctactagcgatacaccgagaccacttttctcttgcttccttcgaccccgccccctccggcctccggatcgcgcaccgcgcctgccctccacccaaaaccgctccggagcctttgcgaagcggcgccgcttactggccggcaaggcgaccccgtctctcggcggcctgcgttgatctggttgctgctgttgaggtgggcagagcggcggccgcgatgggcatctcggcgaggtggctcaagtcattagttgggctgaggaaggtggagcagcagccgcgtaaggagagtgcagatgttggacgaatgaatcagcgctctcaagatgacagcagcattgctgcacaagaagaaattccagaggttccttatggaaatgatccacctgaagatgattctaatgcaccttcatgcttggaacccacttatagttcagctgatgtgccactgtttcaaactgaagaggaactgaaagagatctgggctgctacaattattcagacaacattcagagctttcctggctaggagagcccatcgagctttaaaagggttggttaggcttcaagcccttgtaagaggtcacatagtaagaaagcaagctgatacgacactccgttgtatgcaagctttggtcagggttcaggcccgtgttagagcaaggcgagttcgcatggctttggaaaaccagactgatcagcaaaatacttcaccagagcacacgaccgtggcacgtgtcagagaaattgaggatggctggtgtgatagtattggttctgtggaagatatccaagcaaaacttttaaagaggcaggaagcagcagctaaacgtgagcgagccatggcctatgctctagctcatcaggttcagaagctggtagacacctgacaaagaaaggcacagttaaccgatccctgaaggccacaaaagattcccacatgctggggtcaagacatcatcttgccagttgcattgatccagttcccactagagttgagctggagacttagaaggcatgtgatgcttgaacatcgccatggattgcacttagcatagcaagtagcaacttggatgccattcatgtctgcatggctgcatcgtttgtactggcggcagcggcttctttcaacaccgaatatgcacgtcagcatgtccatacatgctgaggttaccccattgggcctttgagatgtaaattatgtcgttcagtcgagtggtatgcttatcatgtgtttatcggtgtatgatgttggtatagttgtaacttggaaggctaagcgaagttgtactgttgtatttggtattgccgtattgatatatagattgcacatgcgtcttgcagttgaatttctaccattttagacaaaatttgctaaaaaaacattgggtgcg

SEQ ID NO: 47538 - DNA, 1880 bp, Zea Mays
ccgtcttccaccccccttttctctttgtcctcgtccgtgccgttgccactgttgccacgccacgcaggcggcagcgagcgcaataatgcgcacgcagaggagcacagcggcgtcactgctgcggcagtaatggccgcctggttctcccacggcgtctactagcgatacaccgagaccacttttctcttgcttccttcgaccccgccccctccggcctccggatcgcgcaccgcgcctgccctccacccaaaaccgctccggagcctttgcgaagcggcgccgcttactggccggcaaggcgaccccgtctctcggcggcctgcgttgatctggttgctgctgttgaggtgggcagagcggcggccgcgatgggcatctcggcgaggtggctcaagtcattagttgggctgaggaaggtggagcagcagccgcgtaaggagagtgcagatgttggacgaatgaaaagtgatgtcgccgatcagtttcattttcagaatcagcgctctcaagatgacagcagcattgctgcacaagaagaaattccagaggttccttatggaaatgatccacctgaagatgattctaatgcaccttcatgcttggaacccacttatagttcagctgatgtgccactgtttcaaactgaagaggaactgaaagagatctgggctgctacaattattcagacaacattcagagctttcctggctaggagagcccatcgagctttaaaagggttggttaggcttcaagcccttgtaagaggtcacatagtaagaaagcaagctgatacgacactccgttgtatgcaagctttggtcagggttcaggcccgtgttagagcaaggcgagttcgcatggctttggaaaaccagactgatcagcaaaatacttcaccagagcacacgaccgtggcacgtgtcagagaaattgaggatggctggtgtgatagtattggttctgtggaagatatccaagcaaaacttttaaagaggcaggaagcagcagctaaacgtgagcgagccatggcctatgctctagctcatcagtggcaagcaagttcaagacaaattacagcatttgagcctgacaagaacagctggggctggaattggctggagagatggatggctgttcggccatgggagagtcggttccttggcacttacactgcagatgggattttcgtagtcaatgaaaccaagcaacctgacagaagtgcaaccaagaccccctacagaaaacctgttaaaaagcatgattcaacccttcaatcaaacatgttgaaccagaagggcttcccatcaaactcagagggtgttggctcctcggcaaaccgacccagtggtttggttcagaagctggtagacacctgacaaagaaaggcacagttaaccgatccctgaaggccacaaaagattcccacatgctggggtcaagacatcatcttgccagttgcattgatccagttcccactagagttgagctggagacttagaaggcatgtgatgcttgaacatcgccatggattgcacttagcatagcaagtagcaacttggatgccattcatgtctgcatggctgcatcgtttgtactggcggcagcggcttctttcaacaccgaatatgcacgtcagcatgtccatacatgctgaggttaccccattgggcctttgagatgtaaattatgtcgttcagtcgagtggtatgcttatcatgtgtttatcggtgtatgatgttggtatagttgtaacttggaaggctaagcgaagttgtactgttgtatttggtattgccgtattgatatatagattgcacatgcgtcttgcagttgaatttctaccattttagacaaaatttgctaaaaaaacattgggtgcg

SEQ ID NO: 47539 - DNA, 1544 bp, Zea Mays
ccccttttctctttgtcctcgtccgtgccgttgccactgttgccacgccacgcaggcggcagcgagcgcaataatgcgcacgcagaggagcacagcggcgtcactgctgcggcagtaatggccgcctggttctcccacggcgtctactagcgatacaccgagaccacttttctcttgcttccttcgaccccgccccctccggcctccggatcgcgcaccgcgcctgccctccacccaaaaccgctccggagcctttgcgaagcggcgccgcttactggccggcaaggcgaccccgtctctcggcggcctgcgttgatctggttgctgctgttgaggtgggcagagcggcggccgcgatgggcatctcggcgaggtggctcaagtcattagttgggctgaggaaggtggagcagcagccgcgtaaggagagtgcagatgttggacgaatgtttcattttcagaatcagcgctctcaagatgacagcagcattgctgcacaagaagaaattccagaggttccttatggaaatgatccacctgaagatgattctaatgcaccttcatgcttggaacccacttatagttcagctgatgtgccactgtttcaaactgaagaggaactgaaagagatctgggctgctacaattattcagacaacattcagagctttcctggctaggagagcccatcgagctttaaaagggttggttaggcttcaagcccttgtaagaggtcacatagtaagaaagcaagctgatacgacactccgttgtatgcaagctttggtcagggttcaggcccgtgttagagcaaggcgagttcgcatggctttggaaaaccagactgatcagcaaaatacttcaccagagcacacgaccgtggcacgtgtcagagaaattgaggatggctggtgtgatagtattggttctgtggaagatatccaagcaaaacttttaaagaggcaggaagcagcagctaaacgtgagcgagccatggcctatgctctagctcatcaggttcagaagctggtagacacctgacaaagaaaggcacagttaaccgatccctgaaggccacaaaagattcccacatgctggggtcaagacatcatcttgccagttgcattgatccagttcccactagagttgagctggagacttagaaggcatgtgatgcttgaacatcgccatggattgcacttagcatagcaagtagcaacttggatgccattcatgtctgcatggctgcatcgtttgtactggcggcagcggcttctttcaacaccgaatatgcacgtcagcatgtccatacatgctgaggttaccccattgggcctttgagatgtaaattatgtcgttcagtcgagtggtatgcttatcatgtgtttatcggtgtatgatgttggtatagttgtaacttggaaggctaagcgaagttgtactgttgtatttggtattgccgtattgatatatagattgcacatgcgtcttgcagttgaatttctaccattttagacaaaatttgctaaaaaaacattgggtgcg

SEQ ID NO: 47540 - DNA, 1473 bp, Zea Mays
gcgcacgcagaggagcacagcggcgtcactgctgcggcagtaatggccgcctggttctcccacggcgtctactagcgatacaccgagaccacttttctcttgcttccttcgaccccgccccctccggcctccggatcgcgcaccgcgcctgccctccacccaaaaccgctccggagcctttgcgaagcggcgccgcttactggccggcaaggcgaccccgtctctcggcggcctgcgttgatctggttgctgctgttgaggtgggcagagcggcggccgcgatgggcatctcggcgaggtggctcaagtcattagttgggctgaggaaggtggagcagcagccgcgtaaggagagtgcagatgttggacgaatgaaaagtgatgtcgccgatcagtttcattttcagaatcagcgctctcaagatgacagcagcattgctgcacaagaagaaattccagaggttccttatggaaatgatccacctgaagatgattctaatgcaccttcatgcttggaacccacttatagttcagctgatgtgccactgtttcaaactgaagaggaactgaaagagatctgggctgctacaattattcagacaacattcagagctttcctggctaggagagcccatcgagctttaaaagggttggttaggcttcaagcccttgtaagaggtcacatagtaagaaagcaagctgatacgacactccgttgtatgcaagctttggtcagggttcaggcccgtgttagagcaaggcgagttcgcatggctttggaaaaccagactgatcagcaaaatacttcaccagagcacacgaccgtggcacgtgtcagagaaattgagtattggttctgtggaagatatccaagcaaaacttttaaagaggcaggaagcagcagctaaacgtgagcgagccatggcctatgctctagctcatcaggttcagaagctggtagacacctgacaaagaaaggcacagttaaccgatccctgaaggccacaaaagattcccacatgctggggtcaagacatcatcttgccagttgcattgatccagttcccactagagttgagctggagacttagaaggcatgtgatgcttgaacatcgccatggattgcacttagcatagcaagtagcaacttggatgccattcatgtctgcatggctgcatcgtttgtactggcggcagcggcttctttcaacaccgaatatgcacgtcagcatgtccatacatgctgaggttaccccattgggcctttgagatgtaaattatgtcgttcagtcgagtggtatgcttatcatgtgtttatcggtgtatgatgttggtatagttgtaacttggaaggctaagcgaagttgtactgttgtatttggtattgccgtattgatatatagattgcacatgcgtcttgcagttgaatttctaccattttagacaaaatttgctaaaaaaacattgggtgcg

SEQ ID NO: 47541 - DNA, 1351 bp, Zea Mays
gcgcacgcagaggagcacagcggcgtcactgctgcggcagtaatggccgcctggttctcccacggcgtctactagcgatacaccgagaccacttttctcttgcttccttcgaccccgccccctccggcctccggatcgcgcaccgcgcctgccctccacccaaaaccgctccggagcctttgcgaagcggcgccgcttactggccggcaaggcgaccccgtctctcggcggcctgcgttgatctggttgctgctgttgaggtgggcagagcggcggccgcgatgggcatctcggcgaggtggctcaagtcattagttgggctgaggaaggtggagcagcagccgcgtaaggagagtgcagatgttggacgaatgaatcagcgctctcaagatgacagcagcattgctgcacaagaagaaattccagaggttccttatggaaatgatccacctgaagatgattctaatgcaccttcatgcttggaacccacttatagttcagctgatgtgccactgtttcaaactgaagaggaactgaaagagatctgggctgctacaattattcagacaacattcagagctttcctgctttggtcagggttcaggcccgtgttagagcaaggcgagttcgcatggctttggaaaaccagactgatcagcaaaatacttcaccagagcacacgaccgtggcacgtgtcagagaaattgaggatggctggtgtgatagtattggttctgtggaagatatccaagcaaaacttttaaagaggcaggaagcagcagctaaacgtgagcgagccatggcctatgctctagctcatcaggttcagaagctggtagacacctgacaaagaaaggcacagttaaccgatccctgaaggccacaaaagattcccacatgctggggtcaagacatcatcttgccagttgcattgatccagttcccactagagttgagctggagacttagaaggcatgtgatgcttgaacatcgccatggattgcacttagcatagcaagtagcaacttggatgccattcatgtctgcatggctgcatcgtttgtactggcggcagcggcttctttcaacaccgaatatgcacgtcagcatgtccatacatgctgaggttaccccattgggcctttgagatgtaaattatgtcgttcagtcgagtggtatgcttatcatgtgtttatcggtgtatgatgttggtatagttgtaacttggaaggctaagcgaagttgtactgttgtatttggtattgccgtattgatatatagattgcacatgcgtcttgcagttgaatttctaccattttagacaaaatttgctaaaaaaacattgggtgcg

SEQ ID NO: 47542 - DNA, 1760 bp, Zea Mays
gcgcacgcagaggagcacagcggcgtcactgctgcggcagtaatggccgcctggttctcccacggcgtctactagcgatacaccgagaccacttttctcttgcttccttcgaccccgccccctccggcctccggatcgcgcaccgcgcctgccctccacccaaaaccgctccggagcctttgcgaagcggcgccgcttactggccggcaaggcgaccccgtctctcggcggcctgcgttgatctggttgctgctgttgaggtgggcagagcggcggccgcgatgggcatctcggcgaggtggctcaagtcattagttgggctgaggaaggtggagcagcagccgcgtaaggagagtgcagatgttggacgaatgaatcagcgctctcaagatgacagcagcattgctgcacaagaagaaattccagaggttccttatggaaatgatccacctgaagatgattctaatgcaccttcatgcttggaacccacttatagttcagctgatgtgccactgtttcaaactgaagaggaactgaaagagatctgggctgctacaattattcagacaacattcagagctttcctggctaggagagcccatcgagctttaaaagggttggttaggcttcaagcccttgtaagaggtcacatagtaagaaagcaagctgatacgacactccgttgtatgcaagctttggtcagggttcaggcccgtgttagagcaaggcgagttcgcatggctttggaaaaccagactgatcagcaaaatacttcaccagagcacacgaccgtggcacgtgtcagagaaattgaggatggctggtgtgatagtattggttctgtggaagatatccaagcaaaacttttaaagaggcaggaagcagcagctaaacgtgagcgagccatggcctatgctctagctcatcagtggcaagcaagttcaagacaaattacagcatttgagcctgacaagaacagctggggctggaattggctggagagatggatggctgttcggccatgggagagtcggttccttggcacttacactgcagatgggattttcgtagtcaatgaaaccaagcaacctgacagaagtgcaaccaagaccccctacagaaaacctgttaaaaagcatgattcaacccttcaatcaaacatgttgaaccagaagggcttcccatcaaactcagagggtgttggctcctcggcaaaccgacccagtggtttggttcagaagctggtagacacctgacaaagaaaggcacagttaaccgatccctgaaggccacaaaagattcccacatgctggggtcaagacatcatcttgccagttgcattgatccagttcccactagagttgagctggagacttagaaggcatgtgatgcttgaacatcgccatggattgcacttagcatagcaagtagcaacttggatgccattcatgtctgcatggctgcatcgtttgtactggcggcagcggcttctttcaacaccgaatatgcacgtcagcatgtccatacatgctgaggttaccccattgggcctttgagatgtaaattatgtcgttcagtcgagtggtatgcttatcatgtgtttatcggtgtatgatgttggtatagttgtaacttggaaggctaagcgaagttgtactgttgtatttggtattgccgtattgatatatagattgcacatgcgtcttgcagttgaatttctaccattttagacaaaatttgctaaaaaaacattgggtgcg

SEQ ID NO: 47543 - DNA, 1884 bp, Zea Mays
gcgcacgcagaggagcacagcggcgtcactgctgcggcagtaatggccgcctggttctcccacggcgtctactagcgatacaccgagaccacttttctcttgcttccttcgaccccgccccctccggcctccggatcgcgcaccgcgcctgccctccacccaaaaccgctccggagcctttgcgaagcggcgccgcttactggccggcaaggcgaccccgtctctcggcggcctgcgttgatctggttgctgctgttgaggtgggcagagcggcggccgcgatgggcatctcggcgaggtggctcaagtcattagttgggctgaggaaggtggagcagcagccgcgtaaggagagtgcagatgttggacgaatgtttcattttcagaatcagcgctctcaagatgacagcagcattgctgcacaagaagaaattccagaggttccttatggaaatgatccacctgaagatgattctaatgcaccttcatgcttggaacccacttatagttcagctgatgtgccactgtttcaaactgaagaggaactgaaagagatctgggctgctacaattattcagacaacattcagagctttcctggctaggagagcccatcgagctttaaaagggttggttaggcttcaagcccttgtaagaggtcacatagtaagaaagcaagctgatacgacactccgttgtatgcaagctttggtcagggttcaggcccgtgttagagcaaggcgagttcgcatggctttggaaaaccagactgatcagcaaaatacttcaccagagcacacgaccgtggcacgtgtcagagaaattgaggatggctggtgtgatagtattggttctgtggaagatatccaagcaaaacttttaaagaggcaggaagcagcagctaaacgtgagcgagccatggcctatgctctagctcatcagtggcaagcaagttcaagacaaattacagcatttgagcctgacaagaacagctggggctggaattggctggagagatggatggctgttcggccatgggagagtcggttccttggcacttacactgcagatgggattttcgtagtcaatgaaaccaagcaacctgacagaagtgcaaccaagaccccctacagaaaacctgttaaaaagcatgattcaacccttcaatcaaacatgttgaaccagaagggcttcccatcaaactcagagggtgttggctcctcggcaaaccgacccagtggtttggtatctactaaatctagactcaaggttttacccagagaaggtcctgaggaagccccatctcgtccttcgccacttgtgcggtccgctagtaatccgaaggagaggacttccggttcagaagctggtagacacctgacaaagaaaggcacagttaaccgatccctgaaggccacaaaagattcccacatgctggggtcaagacatcatcttgccagttgcattgatccagttcccactagagttgagctggagacttagaaggcatgtgatgcttgaacatcgccatggattgcacttagcatagcaagtagcaacttggatgccattcatgtctgcatggctgcatcgtttgtactggcggcagcggcttctttcaacaccgaatatgcacgtcagcatgtccatacatgctgaggttaccccattgggcctttgagatgtaaattatgtcgttcagtcgagtggtatgcttatcatgtgtttatcggtgtatgatgttggtatagttgtaacttggaaggctaagcgaagttgtactgttgtatttggtattgccgtattgatatatagattgcacatgcgtcttgcagttgaatttctaccattttagacaaaatttgctaaaaaaacattgggtgcg

SEQ ID NO: 47544 - DNA, 1363 bp, Zea Mays
gcgcacgcagaggagcacagcggcgtcactgctgcggcagtaatggccgcctggttctcccacggcgtctactagcgatacaccgagaccacttttctcttgcttccttcgaccccgccccctccggcctccggatcgcgcaccgcgcctgccctccacccaaaaccgctccggagcctttgcgaagcggcgccgcttactggccggcaaggcgaccccgtctctcggcggcctgcgttgatctggttgctgctgttgaggtgggcagagcggcggccgcgatgggcatctcggcgaggtggctcaagtcattagttgggctgaggaaggtggagcagcagccgcgtaaggagagtgcagatgttggacgaatgtttcattttcagaatcagcgctctcaagatgacagcagcattgctgcacaagaagaaattccagaggttccttatggaaatgatccacctgaagatgattctaatgcaccttcatgcttggaacccacttatagttcagctgatgtgccactgtttcaaactgaagaggaactgaaagagatctgggctgctacaattattcagacaacattcagagctttcctgctttggtcagggttcaggcccgtgttagagcaaggcgagttcgcatggctttggaaaaccagactgatcagcaaaatacttcaccagagcacacgaccgtggcacgtgtcagagaaattgaggatggctggtgtgatagtattggttctgtggaagatatccaagcaaaacttttaaagaggcaggaagcagcagctaaacgtgagcgagccatggcctatgctctagctcatcaggttcagaagctggtagacacctgacaaagaaaggcacagttaaccgatccctgaaggccacaaaagattcccacatgctggggtcaagacatcatcttgccagttgcattgatccagttcccactagagttgagctggagacttagaaggcatgtgatgcttgaacatcgccatggattgcacttagcatagcaagtagcaacttggatgccattcatgtctgcatggctgcatcgtttgtactggcggcagcggcttctttcaacaccgaatatgcacgtcagcatgtccatacatgctgaggttaccccattgggcctttgagatgtaaattatgtcgttcagtcgagtggtatgcttatcatgtgtttatcggtgtatgatgttggtatagttgtaacttggaaggctaagcgaagttgtactgttgtatttggtattgccgtattgatatatagattgcacatgcgtcttgcagttgaatttctaccattttagacaaaatttgctaaaaaaacattgggtgcg

SEQ ID NO: 47545 - DNA, 729 bp, Zea Mays
taggagtacagactgcctcggtaagatgtcgggtatctcggtttaacccgaacccgaacccgaaatttcggggggtatcaagtaatatcgggttgagttcgggttcaactgctgaatacccgaatttttaaaaacccgaactacccgacccgaattttcgggtatacccgaacgcccagccctactccttgcctggcattggttcagaagctggtagacacctgacaaagaaaggcacagttaaccgatccctgaaggccacaaaagattcccacatgctggggtcaagacatcatcttgccagttgcattgatccagttcccactagagttgagctggagacttagaaggcatgtgatgcttgaacatcgccatggattgcacttagcatagcaagtagcaacttggatgccattcatgtctgcatggctgcatcgtttgtactggcggcagcggcttctttcaacaccgaatatgcacgtcagcatgtccatacatgctgaggttaccccattgggcctttgagatgtaaattatgtcgttcagtcgagtggtatgcttatcatgtgtttatcggtgtatgatgttggtatagttgtaacttggaaggctaagcgaagttgtactgttgtatttggtattgccgtattgatatatagattgcacatgcgtcttgcagttgaatttctaccattttagacaaaatttgctaaaaaaacattgggtgcg

SEQ ID NO: 47546 - DNA, 282 bp, Zea Mays
acggcgaatatttccacctgattggaattcgtcagaaaatttggaggcttcgaattctgcaagtgatggagattctgagtcttgcagtgacgcagagtttagtgataatgatgaggatcatgacgttgatgacttgtgacataatatcgagacagttttaacctttctccaattcctcactaccgcttcaatgacggttaaactatcaaggctacttgcttgtggcctgccaagaggaaggtttggaatcttattgtgattttaagcgtgagccatctgcac

SEQ ID NO: 47547 - DNA, 2871 bp, Zea Mays
tgtggagaggcatacaagcactttagatagtttgaatcatccttacgagaaaaaaagaagacaacagaagtttgttggtgtagaaaccatgcatgttgctttggactttgcttttcttacataccaattagcttttaaggtattcctcaagtgtcagtgaaatatcattatcaaaaataataatattataacacttccatcatgctagtttggatgtgtgaaacacaaggttgacttgttccttgtggttcggattgatgatgaatgattgtcaacgggtaacactctggggtaatcagtggactgatcagagtgtaagattatgcttgtacaaccatgtcggtcggcttgtgttgtgcatgtgtggagcacagagacagtggtcgatggctgaggtgaaggtcatgcgggctcgtgcttatggaccgggagcgatggaggacaagtactgggtcttgactgacggattggagcagccggataaccagccgtggtggctgacaattgggacaagcactgacgtggtggagtggaccgcgttgccggcgtggttgaggactagcgggacacgtgtctggtcgtggaggacgcgcacgtggtgcggtactcatggcgtgtttggtggtttatgttgagtttgtgatccaaattctgaagaaggcggccaagttggcgagcgaagcggatcgttttagggtttcacctctataaatatctttgtaagccgcaggagatatctatctcaattgtaaatctcctgcgatctgtaaccacccgaaaatagtgagaagttgtcggccggcgcccgtggttttttccccttcactttggaggggttttccacgttaaatccgtgtcttctctgtgattgatcctatttgtgtcgcatttatttataacagtttaggcctcaaaagcaaccagcgctacagatgacggattttgaagagtttgggcctcaaaactcggcggcggcggttccgaagggattttgggttgaactgggatttggggttgaactttgggatcaaagtcacatactcgtaggacgagaatttttagtggctctcattcatcctcctctggtcacctcactagtcctacaggatgaatcttctacctatttaattccagaaaaatgcaataaaccatgtgattccagcatacataaatacataattacatacagtcctgtaagactagaaagctaaggtctcagatggggaaacttgataacaaacaaaagtaacttctggtagttaggaagtataacaaacaacaacaaacgcccaggattgtgctatgaagtctacgtctgaaaccaggaagtaatgttacagcatctgatggaaagctacgttcaatcaataaggctggaagtgtctagcccacttaggagtttggaactctggatagctcagtgcaagcaaagcaccagaaatggtagcatatatcaaaaaataaagaccgaatcttgacaacaactacttaacaacagtacaatttaacagatttcaacacagaacatttagagatgaacaaggtttgtgtggataatggacgaaattagtttccttagacatgctgggaatgatctataggagaaaaaaggtacttaatgaactggtatcaccaaggtcaccaaactacaataatattcaaagacttctctctgaatagagtacacaagcattttgttgataccaacgctcttagtcaagttttgctggtaacactgtactaagtacattttttcttgtgatgggacacaaagtacaaactgaccaatgatcatacagaagtacagttgaatgcttaatatatgaggggtcctactaccatcgtcatgtatcacgaaaaagttaaatcttactggctagtcatgtttaagatcatagagcaagctgaatcaagtatggccgggcttctgcttgcaggagctctaatcttgagccaacacccaatcaaagccctactatgcacttggcagagtaagcagcaaagcatggcttgcatgatcagatcaccaacaccaaatagattcatgggtcatgacaagtaataaggtagtttcgcgtgaaagtggaacagcttatggtttgtaagtccataattagggttttagccgattgcatttgtcttcggattccttgtcatctaagctaagcttgtacgaactctcaaagttggtatcacaattcagcgagctttaactgagagtccatattatcataccagatcaagtggaagaccatgttctatcacaaaccaaagatctcagatcacctacatcaatagtcatccaaggggataaaaccacttgttgatgtgaactgctacggtacaaaatagatattactgcattatctaggcaaaaaaaaaactgtgatatgaacagaaactagcttcagttaagatctgttgcgtattactaagccttttatgcatgcaaatgtagtgttcgatcccttttcagtaatgctacgtagctacagcctacagcacacagcaaagcaatttaatacaataaaaatgcagtgcatgccaatcagatgccatgtgatcatgcaaaatcctctccagtgaggagtgaatgacacctgtaagactacatcatgcaaagccgaggtaaatggacgccctggagttctgaaaccggtaaagtcaactggaacagaagaaggctggacacgaggctacctcgagtaccacgaagaaggtagatcatgccgaaatgacagtttgagaacatcacaggcgacagagataaaaagtttccagattctaattctaagagtacagcggttagcatcttaccgttgaagaatgagcaatcagtttttgctcttctccttcatgccggagtgccgg

SEQ ID NO: 47548 - DNA, 1114 bp, Zea Mays
ggagtattatcagtactgatcttgcataccttcaccaaccctttttcaatgatatcacgaatgaagtgatagcgaatatcaatatgtttggatttctcagtaatcatctgatctttggtgagatgaatggcactctggctatcacaatagatggtaatgcaagacttaattccacatagctctgaatatatacctttcaaccataaggcttccttagtaacttctgcaattgccatatactcagcttctgtggtagacaaagcaacagtatcctgtaaacgagctttccaactcacagcacaatctccaatagtaaagacataacctgaaagagatctcctcctgtctaaatcaccaccataatctgaatcaacatagccaatcagaccatctccagatttaccaaaacataaacaagcactagaagaaccacgtagatatctgaaaatccactgaacagctttccaatgctctttaccaggattagacatgtatctagcaacaacgctcatagcatgagacaaatcaggacgagaacaaaccatagcatacatgagtgacccaacagcactagagtatggaacttttgacatatattcaagctcagcatcagtttcagcacactgtttagtagacagtttaaaatgaggagccaacggagtactcacaggtttagtattttgcatgttgaaacgacgaaggaccttctcaatataattcttctggctcaagtacagcagtccagacttcctatccctgactatctctatgccaaggattttctttgcagcacccagatccttcatatcaaattcgctactaagctgtgcctttaaagcagtgatttccttcatgctcttggcagcaatcaacatatcatcaacatatagcagcaaatatgtaggtgatccattaacaaattttagataaacacaactatcatattgagacctctgaaagcccttagaaagcataaatgaatcaaacctcttataccattgtctgggagattgtttcagaccatataaggacttcttcaacctgcacacatagtcttcttttccaggaacaatgaacccctctggctggtccatataaatgtcctcctccaaat

SEQ ID NO: 47549 - DNA, 1666 bp, Zea Mays
ggtcttacattcccaaataactcgtcggagtcagtacggtgctctctccgtctcagccgtcgccaactaatctatccccgatcacgcggcgaaccgccgcaacaccactatcaccaatcgcaatggagaaccctccaccgtcctccgccggtccgtactcggcgcccgcgccggcagcgcagcatcaggacgcggcgaaggaggatcaggacgtggcgcagctcgtgctcaacctctgcatcccggagctccgcgagaaggccatcatcatcctttccaagaagcgagaaaaatgtgaagatcttgctctactactatggcactcttttggtacaatggctgcactactccaggaaattgtgtcaatttatcgattactttcacccccacaattatcttttgaccaatcaactcgagtctgcaatgtgcttgtactccttaagtgtgtggcatcacaccctgatactaggatgccatttttaaatgcacagtttccactgtacctgtaccctttcttgaacactacctacaaaacaagagaatatgagttcttgaggattagtagcctgagcgtgatcggtgctcttgtgaagtccgatgatcatgaagtcattgtgaatttgctgtgttctgaaatagttcctttgtgtctgcgtgctattgagatgggcagtgaactttcaaaaaaggtatttaccaacctgcccaaccattactcaaaacataatgatctttcatgtttgcttctatgctgactgctcaattggctggcacactcctttcttgtactattctccatatatcttgttcaatgtttgagagatggcaaactatttcagtgatcaggaccatgttgcgacctatttttacttttctagctgacaaagtagcctcgtttattgtttgcattggacgcaatactccattccattcttcagtacttgtcataattgttccttgaaatgtaatccgtcctgtcatgaatttaaccatgtcgtttgatctaccactctagttatacttgcattgcaggtggccacttttattctccaaaagattatgcttgacgacacagggcttgcgtacgtatgcgcttcttctgaacgtttctgcgctgttgccaatgtgctagctcagatggtcgaagcacttgctgaacagccttccccgaggacgcttaagaacacaatccgctgctacctcaggctgacagatgatcgaagggcctgccaagcgttacgtgactacctccccatcgcgttgagggacgggacattcaacggcttaatcgaggtcgatctcacagcaaggctatggctccaccagctgctgcataacgtcatgatgtcagacagtggaggcggccctcgccctgccccgggtcctgtgatggggatgtgaatgaagccggtcgccacgcctcatcatctgtgaagatccaagagcgtgcgttgtagctgtaggtagcgaagtagtaacccacagggaagggaaagcaatcgtggtggtgttcacacccttttggagggaacaaacacaaacagctgagctttgtgccgtttggatggcgaagaagcaacgataacacgcgtcttcttgatacaagtctggctggccattggtcgttgggattttgaaatgatatacaggtaaaatttgcactgtg

SEQ ID NO: 47550 - DNA, 1275 bp, Zea Mays
ggtcttacattcccaaataactcgtcggagtcagtacggtgctctctccgtctcagccgtcgccaactaatctatccccgatcacgcggcgaaccgccgcaacaccactatcaccaatcgcaatggagaaccctccaccgtcctccgccggtccgtactcggcgcccgcgccggcagcgcagcatcaggacgcggcgaaggaggatcaggacgtggcgcagctcgtgctcaacctctgcatcccggagctccgcgagaaggccatcatcatcctttccaagaagcgagaaaaatgtgaagatcttgctctactactatggcactcttttggtacaatggctgcactactccaggaaattgtgtcaatttatcgattactttcacccccacaattatcttttgaccaatcaactcgagtctgcaatgtgcttgtactccttaagtttccactgtacctgtaccctttcttgaacactacctacaaaacaagagaatatgagttcttgaggattagtagcctgagcgtgatcggtgctcttgtgaagtccgatgatcatgaagtcattgtgaatttgctgtgttctgaaatagttcctttgtgtctgcgtgctattgagatgggcagtgaactttcaaaaaaggtggccacttttattctccaaaagattatgcttgacgacacagggcttgcgtacgtatgcgcttcttctgaacgtttctgcgctgttgccaatgtgctagctcagatggtcgaagcacttgctgaacagccttccccgaggacgcttaagaacacaatccgctgctacctcaggctgacagatgatcgaagggcctgccaagcgttacgtgactacctccccatcgcgttgagggacgggacattcaacggcttaatcgaggtcgatctcacagcaaggctatggctccaccagctgctgcataacgtcatgatgtcagacagtggaggcggccctcgccctgccccgggtcctgtgatggggatgtgaatgaagccggtcgccacgcctcatcatctgtgaagatccaagagcgtgcgttgtagctgtaggtagcgaagtagtaacccacagggaagggaaagcaatcgtggtggtgttcacacccttttggagggaacaaacacaaacagctgagctttgtgccgtttggatggcgaagaagcaacgataacacgcgtcttcttgatacaagtctggctggccattggtcgttgggattttgaaatgatatacaggtaaaatttgcactgtg

SEQ ID NO: 47551 - DNA, 1248 bp, Zea Mays
caaataactcgtcggagtcagtacggtgctctctccgtctcagccgtcgccaactaatctatccccgatcacgcggcgaaccgccgcaacaccactatcaccaatcgcaatggagaaccctccaccgtcctccgccggtccgtactcggcgcccgcgccggcagcgcagcatcaggacgcggcgaaggaggatcaggacgtggcgcagctcgtgctcaacctctgcatcccggagctccgcgagaaggccatcatcatcctttccaagaagcgagaaaaatgtgaagatcttgctctactactatggcactcttttggtacaatggctgcactactccaggaaattgtgtcaatttatcgattactttcacccccacaattatcttttgaccaatcaactcgagtctgcaatgtgcttgtactccttaagtgtgtggcatcacaccctgatactaggatgccatttttaaatgcacagtttccactgtacctgtaccctttcttgaacactacctacaaaacaagagaatatgagttcttgaggattagtagcctgagcgtgatcggtgctcttgtgaagtccgatgatcatgaagtcattgtgaatttgctgtgttctgaaatagttcctttgtgtctgcgtgctattgagatgggcagtgaactttcaaaaaagttatacttgcattgcaggtggccacttttattctccaaaagattatgcttgacgacacagggcttgcccttccccgaggacgcttaagaacacaatccgctgctacctcaggctgacagatgatcgaagggcctgccaagcgttacgtgactacctccccatcgcgttgagggacgggacattcaacggcttaatcgaggtcgatctcacagcaaggctatggctccaccagctgctgcataacgtcatgatgtcagacagtggaggcggccctcgccctgccccgggtcctgtgatggggatgtgaatgaagccggtcgccacgcctcatcatctgtgaagatccaagagcgtgcgttgtagctgtaggtagcgaagtagtaacccacagggaagggaaagcaatcgtggtggtgttcacacccttttggagggaacaaacacaaacagctgagctttgtgccgtttggatggcgaagaagcaacgataacacgcgtcttcttgatacaagtctggctggccattggtcgttgggattttgaaatgatatacaggtaaaatttgcactgtg

SEQ ID NO: 47552 - DNA, 434 bp, Zea Mays
aaataactcgtcggagtcagtacggtgctctctccgtctcagccgtcgccaactaatctatccccgatcacgcggcgaaccgccgcaacaccactatcaccaatcgcaatggagaaccctccaccgtcctccgccggtccgtactcggcgcccgcgccggcagcgcagcatcaggacgcggcgaaggaggatcaggacgtggcgcagctcgtgctcaacctctgcatcccggagctccgcgagaaggccatcatcatcctttccaagaagcgagaaaaatgtgaagatcttgctctactactatggcactcttttggtacaatggctgcactactccaggaaattgtgtcaatttatcgattactttcacccccacaattatcttttgaccaatcaactcgagtctgcaatgtgcttgtactccttaaggtgtg

SEQ ID NO: 47553 - DNA, 1283 bp, Zea Mays
aaataactcgtcggagtcagtacggtgctctctccgtctcagccgtcgccaactaatctatccccgatcacgcggcgaaccgccgcaacaccactatcaccaatcgcaatggagaaccctccaccgtcctccgccggtccgtactcggcgcccgcgccggcagcgcagcatcaggacgcggcgaaggaggatcaggacgtggcgcagctcgtgctcaacctctgcatcccggagctccgcgagaaggccatcatcatcctttccaagaagcgagaaaaatgtgaagatcttgctctactactatggcactcttttggtacaatggctgcactactccaggaaattgtgtcaatttatcgattactttcacccccacaattatcttttgaccaatcaactcgagtctgcaatgtgcttgtactccttaagcacagtttccactgtacctgtaccctttcttgaacactacctacaaaacaagagaatatgagttcttgaggattagtagcctgagcgtgatcggtgctcttgtgaagtccgatgatcatgaagtcattgtgaatttgctgtgttctgaaatagttcctttgtgtctgcgtgctattgagatgggcagtgaactttcaaaaaagttatacttgcattgcaggtggccacttttattctccaaaagattatgcttgacgacacagggcttgcgtacgtatgcgcttcttctgaacgtttctgcgctgttgccaatgtgctagctcagatggtcgaagcacttgctgaacagccttccccgaggacgcttaagaacacaatccgctgctacctcaggctgacagatgatcgaagggcctgccaagcgttacgtgactacctccccatcgcgttgagggacgggacattcaacggcttaatcgaggtcgatctcacagcaaggctatggctccaccagctgctgcataacgtcatgatgtcagacagtggaggcggccctcgccctgccccgggtcctgtgatggggatgtgaatgaagccggtcgccacgcctcatcatctgtgaagatccaagagcgtgcgttgtagctgtaggtagcgaagtagtaacccacagggaagggaaagcaatcgtggtggtgttcacacccttttggagggaacaaacacaaacagctgagctttgtgccgtttggatggcgaagaagcaacgataacacgcgtcttcttgatacaagtctggctggccattggtcgttgggattttgaaatgatatacaggtaaaatttgcactgtg

SEQ ID NO: 47554 - DNA, 1266 bp, Zea Mays
aaataactcgtcggagtcagtacggtgctctctccgtctcagccgtcgccaactaatctatccccgatcacgcggcgaaccgccgcaacaccactatcaccaatcgcaatggagaaccctccaccgtcctccgccggtccgtactcggcgcccgcgccggcagcgcagcatcaggacgcggcgaaggaggatcaggacgtggcgcagctcgtgctcaacctctgcatcccggagctccgcgagaaggccatcatcatcctttccaagaagcgagaaaaatgtgaagatcttgctctactactatggcactcttttggtacaatggctgcactactccaggaaattgtgtcaatttatcgattactttcacccccacaattatcttttgaccaatcaactcgagtctgcaatgtgcttgtactccttaagcacagtttccactgtacctgtaccctttcttgaacactacctacaaaacaagagaatatgagttcttgaggattagtagcctgagcgtgatcggtgctcttgtgaagtccgatgatcatgaagtcattgtgaatttgctgtgttctgaaatagttcctttgtgtctgcgtgctattgagatgggcagtgaactttcaaaaaaggtggccacttttattctccaaaagattatgcttgacgacacagggcttgcgtacgtatgcgcttcttctgaacgtttctgcgctgttgccaatgtgctagctcagatggtcgaagcacttgctgaacagccttccccgaggacgcttaagaacacaatccgctgctacctcaggctgacagatgatcgaagggcctgccaagcgttacgtgactacctccccatcgcgttgagggacgggacattcaacggcttaatcgaggtcgatctcacagcaaggctatggctccaccagctgctgcataacgtcatgatgtcagacagtggaggcggccctcgccctgccccgggtcctgtgatggggatgtgaatgaagccggtcgccacgcctcatcatctgtgaagatccaagagcgtgcgttgtagctgtaggtagcgaagtagtaacccacagggaagggaaagcaatcgtggtggtgttcacacccttttggagggaacaaacacaaacagctgagctttgtgccgtttggatggcgaagaagcaacgataacacgcgtcttcttgatacaagtctggctggccattggtcgttgggattttgaaatgatatacaggtaaaatttgcactgtg

SEQ ID NO: 47555 - DNA, 1230 bp, Zea Mays
aaataactcgtcggagtcagtacggtgctctctccgtctcagccgtcgccaactaatctatccccgatcacgcggcgaaccgccgcaacaccactatcaccaatcgcaatggagaaccctccaccgtcctccgccggtccgtactcggcgcccgcgccggcagcgcagcatcaggacgcggcgaaggaggatcaggacgtggcgcagctcgtgctcaacctctgcatcccggagctccgcgagaaggccatcatcatcctttccaagaagcgagaaaaatgtgaagatcttgctctactactatggcactcttttggtacaatggctgcactactccaggaaattgtgtcaatttatcgattactttcacccccacaattatcttttgaccaatcaactcgagtctgcaatgtgcttgtactccttaagtgtgtggcatcacaccctgatactaggatgccatttttaaatgcacagtttccactgtacctgtaccctttcttgaacactacctacaaaacaagagaatatgagttcttgaggattagtagcctgagcgtgatcggtgctcttgtgaagtccgatgatcatgaagtcattgtgaatttgctgtgttctgaaatagttcctttgtgtctgcgtgctattgagatgggcagtgaactttcaaaaaaggtggccacttttattctccaaaagattatgcttgacgacacagggcttgcccttccccgaggacgcttaagaacacaatccgctgctacctcaggctgacagatgatcgaagggcctgccaagcgttacgtgactacctccccatcgcgttgagggacgggacattcaacggcttaatcgaggtcgatctcacagcaaggctatggctccaccagctgctgcataacgtcatgatgtcagacagtggaggcggccctcgccctgccccgggtcctgtgatggggatgtgaatgaagccggtcgccacgcctcatcatctgtgaagatccaagagcgtgcgttgtagctgtaggtagcgaagtagtaacccacagggaagggaaagcaatcgtggtggtgttcacacccttttggagggaacaaacacaaacagctgagctttgtgccgtttggatggcgaagaagcaacgataacacgcgtcttcttgatacaagtctggctggccattggtcgttgggattttgaaatgatatacaggtaaaatttgcactgtg

SEQ ID NO: 47556 - DNA, 1304 bp, Zea Mays
aaataactcgtcggagtcagtacggtgctctctccgtctcagccgtcgccaactaatctatccccgatcacgcggcgaaccgccgcaacaccactatcaccaatcgcaatggagaaccctccaccgtcctccgccggtccgtactcggcgcccgcgccggcagcgcagcatcaggacgcggcgaaggaggatcaggacgtggcgcagctcgtgctcaacctctgcatcccggagctccgcgagaaggccatcatcatcctttccaagaagcgagaaaaatgtgaagatcttgctctactactatggcactcttttggtacaatggctgcactactccaggaaattgtgtcaatttatcgattactttcacccccacaattatcttttgaccaatcaactcgagtctgcaatgtgcttgtactccttaagtgtgtggcatcacaccctgatactaggatgccatttttaaatgtttccactgtacctgtaccctttcttgaacactacctacaaaacaagagaatatgagttcttgaggattagtagcctgagcgtgatcggtgctcttgtgaagtccgatgatcatgaagtcattgtgaatttgctgtgttctgaaatagttcctttgtgtctgcgtgctattgagatgggcagtgaactttcaaaaaaggtggccacttttattctccaaaagattatgcttgacgacacagggcttgcgtacgtatgcgcttcttctgaacgtttctgcgctgttgccaatgtgctagctcagatggtcgaagcacttgctgaacagccttccccgaggacgcttaagaacacaatccgctgctacctcaggctgacagatgatcgaagggcctgccaagcgttacgtgactacctccccatcgcgttgagggacgggacattcaacggcttaatcgaggtcgatctcacagcaaggctatggctccaccagctgctgcataacgtcatgatgtcagacagtggaggcggccctcgccctgccccgggtcctgtgatggggatgtgaatgaagccggtcgccacgcctcatcatctgtgaagatccaagagcgtgcgttgtagctgtaggtagcgaagtagtaacccacagggaagggaaagcaatcgtggtggtgttcacacccttttggagggaacaaacacaaacagctgagctttgtgccgtttggatggcgaagaagcaacgataacacgcgtcttcttgatacaagtctggctggccattggtcgttgggattttgaaatgatatacaggtaaaatttgcactgtg

SEQ ID NO: 47557 - DNA, 1161 bp, Zea Mays
aaataactcgtcggagtcagtacggtgctctctccgtctcagccgtcgccaactaatctatccccgatcacgcggcgaaccgccgcaacaccactatcaccaatcgcaatggagaaccctccaccgtcctccgccggtccgtactcggcgcccgcgccggcagcgcagcatcaggacgcggcgaaggaggatcaggacgtggcgcagctcgtgctcaacctctgcatcccggagctccgcgagaaggccatcatcatcctttccaagaagcgagaaaaatgtgaagatcttgctctactactatggcactcttttggtacaatggctgcactactccaggaaattgtgtcaatttatcgattactttcacccccacaattatcttttgaccaatcaactcgagtctgcaatgtgcttgtactccttaagcacagtttccactgtacctgtaccctttcttgaacactacctacaaaacaagagaatatgagttcttgaggattagtagcctgagcgtgatcggtgctcttgtgaagtccgatgatcatgaagtcattgtgaatttgctgtgttctgaaatagttcctttgtgtctgcgtgctattgagatgggcagtgaactttcaaaaaagatggtcgaagcacttgctgaacagccttccccgaggacgcttaagaacacaatccgctgctacctcaggctgacagatgatcgaagggcctgccaagcgttacgtgactacctccccatcgcgttgagggacgggacattcaacggcttaatcgaggtcgatctcacagcaaggctatggctccaccagctgctgcataacgtcatgatgtcagacagtggaggcggccctcgccctgccccgggtcctgtgatggggatgtgaatgaagccggtcgccacgcctcatcatctgtgaagatccaagagcgtgcgttgtagctgtaggtagcgaagtagtaacccacagggaagggaaagcaatcgtggtggtgttcacacccttttggagggaacaaacacaaacagctgagctttgtgccgtttggatggcgaagaagcaacgataacacgcgtcttcttgatacaagtctggctggccattggtcgttgggattttgaaatgatatacaggtaaaatttgcactgtg

SEQ ID NO: 47558 - DNA, 1609 bp, Zea Mays
aaataactcgtcggagtcagtacggtgctctctccgtctcagccgtcgccaactaatctatccccgatcacgcggcgaaccgccgcaacaccactatcaccaatcgcaatggagaaccctccaccgtcctccgccggtccgtactcggcgcccgcgccggcagcgcagcatcaggacgcggcgaaggaggatcaggacgtggcgcagctcgtgctcaacctctgcatcccggagctccgcgagaaggccatcatcatcctttccaagaagcgagaaaaatgtgaagatcttgctctactactatggcactcttttggtacaatggctgcactactccaggaaattgtgtcaatttatcgattactttcacccccacaattatcttttgaccaatcaactcgagtctgcaatgtgcttgtactccttaagcacagtttccactgtacctgtaccctttcttgaacactacctacaaaacaagagaatatgagttcttgaggattagtagcctgagcgtgatcggtgctcttgtgaagtccgatgatcatgaagtcattgtgaatttgctgtgttctgaaatagttcctttgtgtctgcgtgctattgagatgggcagtgaactttcaaaaaaggtatttaccaacctgcccaaccattactcaaaacataatgatctttcatgtttgcttctatgctgactgctcaattggctggcacactcctttcttgtactattctccatatatcttgttcaatgtttgagagatggcaaactatttcagtgatcaggaccatgttgcgacctatttttacttttctagctgacaaagtagcctcgtttattgtttgcattggacgcaatactccattccattcttcagtacttgtcataattgttccttgaaatgtaatccgtcctgtcatgaatttaaccatgtcgtttgatctaccactctagttatacttgcattgcaggtggccacttttattctccaaaagattatgcttgacgacacagggcttgcgtacgtatgcgcttcttctgaacgtttctgcgctgttgccaatgtgctagctcagatggtcgaagcacttgctgaacagccttccccgaggacgcttaagaacacaatccgctgctacctcaggctgacagatgatcgaagggcctgccaagcgttacgtgactacctccccatcgcgttgagggacgggacattcaacggcttaatcgaggtcgatctcacagcaaggctatggctccaccagctgctgcataacgtcatgatgtcagacagtggaggcggccctcgccctgccccgggtcctgtgatggggatgtgaatgaagccggtcgccacgcctcatcatctgtgaagatccaagagcgtgcgttgtagctgtaggtagcgaagtagtaacccacagggaagggaaagcaatcgtggtggtgttcacacccttttggagggaacaaacacaaacagctgagctttgtgccgtttggatggcgaagaagcaacgataacacgcgtcttcttgatacaagtctggctggccattggtcgttgggattttgaaatgatatacaggtaaaatttgcactgtg

SEQ ID NO: 47559 - DNA, 2563 bp, Zea Mays
ctccggtctccccatctacccccgtcccactcccatgcctcctgagtcctgactgagtcctgagacccacgcggccgccacgccacttcgctgatcacacgcgggcgcgcgcattactccgcttcactcctttccgtcaccgtcgcccgccgccctggtctcccgcttcctctgatcctccgacctccgcctcttaaccttcacagcccttgtctttggcacgaaccaattcgctggcatggcgcggcggttacctgccgctgactcgctctagtggtgaggacctgctgcagtggacgtctgccgtggacgtggtggcggagaggggtgctggcggcgagcgacggcggagcagccatggaagcggtgcagacgatgattgaagcgaggcgttctgagctctaaaaggctgaagccaaggttgtgatattgggcgacaagatcgctgcgcacttaagcctccttcaaaagatatatttggctcttgatgcttactctcctacattgcagcagcatcctggtgggttcgagggttttctcgacctgcgtgagaaggtcttcttcttattaaaatgcccgggggctgtcttacccccacaggtcgagtttcaggccgcagcgcacaggagtcccgatctcgactcccgactcgaactcgacgactcccagtcccagttcctctcgtccgcaaccgcaaaatccaagaccctggccgccggagccgaactggcccgcgcctcgggccctgcccgatttgtgtgctttgcggcctgtgggcatgctagccagccggcggcggcaccggagtccatagcagcaaccacgcggctacgagctacgacgggctggctaaggcgcaggttgagcgctgaaggctacccagctgtggtctcacgcgggtggccggtgagagcagccaagcggcaggtacatctcccctctgccgctccaccctccgaggcggccctccctctcaatccctccagcatctggtatctctctattatctgtagaatcataaatctaaaaattatagattattcacaattaaaagtagaagtgtactatgtaatgttattaacaattttatgtgaaacatgcggcttaatcgtcgtatcaattagtttttttttaaaaaaaaattgtagctactttccgtcgctggctagagtcctactctttgtcaaattctaggtgcgctggacgctggacgaaccctaccacgcgcaccgtcacgttgtgaattgaatcactctctgttgatgggcagcctgagcgctccgccagtgctgtcgccgctcgtttctgggctcatcttttcatctgacagagtcctcaaatctagagggttaactaccagtagcgtgatgaagtcatgtaggctatccgagctcagcaatgctgaggttagcagcctcaaggctcgtcctcgcatcgattcctcgtccatgtccatatttggcacggtgaatccaattgttgagggtgtctgtgtcagaggtgatgcagcagataagcagtaccaggtgaaaaactgcagatggaggccaacttttgccttggagactgatgggccatctaacactgatggccaagactttgatgaggacagtggttttcttggtaggactagactgggaagactcatccaagctgctgcaagggagctacttgacaagctgaactctgcgagaaccaattcgccaacaaagatattccttgtcctccttggtttttacacagccaatgccttggcaacaatactagggcagaccggtgactgggatgttcttgttgctggtgttgtagtggctgccattgagggaattggcatgctcatgtacagaaaaccaattgccaggcctcctggtaggttccaatctttgatttcaatggtgaactactggaaagccggtgtatgcctgggcctttttgtggatgccttcaagctgggtagctgagtttatacaatcatctgctgctatctgcctatggtaattttttgggtatattgggatcacaataacgccatgatatggttccatgatggccattgctcgttgctcgaattctaatagctgcatttggctctaattctgggagcattggctgctgaggtatcagatttcttcaaagttaatgaagatgtttggagcagatattattctgaggtgactattcatttttccataatcgaaggccatgtttgtcaaccattgtttggcccgtaaactgtagatatgctgtagtttttccacctccatgtcatttagccctaatatgcatttatgcgtactgagagaagtaaaaaaaaaaaaagatgtgctgctttaagggcatgtttgggagcaaggggatattgaatagcaatgggattttagccccttcaatccccttgctccttagataggatgtatttcttctacggatatatggtacttgtacgtgcgtgtcagcatgtgatgagttgaatacttctttcatccaggattattctatatcttgcactatatgtcattgttaccaaaaatgttttctctcttcaaccatatgaaaaagaaaa

SEQ ID NO: 47560 - DNA, 2724 bp, Zea Mays
cccatgcctcctgagtcctgactgagtcctgagacccacgcggccgccacgccacttcgctgatcacacgcgggcgcgcgcattactccgcttcactcctttccgtcaccgtcgcccgccgccctggtctcccgcttcctctgatcctccgacctccgcctcttaaccttcacagcccttgtctttggcacgaaccaattcgctggcatggcgcggcggttacctgccgctgactcgctctagtggtgaggacctgctgcagtggacgtctgccgtggacgtggtggcggagaggggtgctggcggcgagcgacggcggagcagccatggaagcggtgcagacgatgattgaagcgaggcgttctgagctctaaaaggctgaagccaaggttgtgatattgggcgacaagatcgctgcgcacttaagcctccttcaaaagatatatttggctcttgatgcttactctcctacattgcagcagcatcctggtctgctagacgttttcttaaagacatgcaagcttgttgcagatttgagaattagacagaacggaggcgatatgacatgaatgaggtggcggtatggtgagatctccgttggtagctaatgctgctcatgtgcttaaccatgttccacgcctgcagatgcagaccaagtgaaggattctatttaagtgaggtttcagtttcaggtcctgatgcgaaagggcctctagctgagttggttaggtggtctaagtagcactcctcaggtcctgggttcgacttcccgtgggagcgaatttcaggctgtggttaaaaaaatcccctcgtctgtctcatgccaaagcacaggtctaaggctcagccccggtcgcggtcgttctcatatgggcttcgatgccgctgtgtatgggtggggcaggggttcgagggttttctcgacctgcgtgagaaggtcttcttcttattaaaatgcccgggggctgtcttacccccacaggtcgagtttcaggccgcagcgcacaggagtcccgatctcgactcccgactcgaactcgacgactcccagtcccagttcctctcgtccgcaaccgcaaaatccaagaccctggccgccggagccgaactggcccgcgcctcgggccctgcccgatttgtgtgctttgcggcctgtgggcatgctagccagccggcggcggcaccggagtccatagcagcaaccacgcggctacgagctacgacgggctggctaaggcgcaggttgagcgctgaaggctacccagctgtggtctcacgcgggtggccggtgagagcagccaagcggcagctactttccgtcgctggctagagtcctactctttgtcaaattctaggtgcgctggacgctggacgaaccctaccacgcgcaccgtcacgttgtgaattgaatcactctctgttgatgggcagcctgagcgctccgccagtgctgtcgccgctcgtttctgggctcatcttttcatctgacagagtcctcaaatctagagggttaactaccagtagcgtgatgaagtcatgtaggctatccgagctcagcaatgctgaggttagcagcctcaaggctcgtcctcgcatcgattcctcgtccatgtccatatttggcacggtgaatccaattgttgagggtgtctgtgtcagaggtgatgcagcagataagcagtaccaggtgaaaaactgcagatggaggccaacttttgccttggagactgatgggccatctaacactgatggccaagactttgatgaggacagtggttttcttggtaggactagactgggaagactcatccaagctgctgcaagggagctacttgacaagctgaactctgcgagaaccaattcgccaacaaagatattccttgtcctccttggtttttacacagccaatgccttggcaacaatactagggcagaccggtgactgggatgttcttgttgctggtgttgtagtggctgccattgagggaattggcatgctcatgtacagaaaaccaattgccaggcctcctggtaggttccaatctttgatttcaatggtgaactactggaaagccggtgtatgcctgggcctttttgtggatgccttcaagctgggtagctgagtttatacaatcatctgctgctatctgcctatggtaattttttgggtatattgggatcacaataacgccatgatatggttccatgatggccattgctcgttgctcgaattctaatagctgcatttggctctaattctgggagcattggctgctgaggtatcagatttcttcaaagttaatgaagatgtttggagcagatattattctgaggtgactattcatttttccataatcgaaggccatgtttgtcaaccattgtttggcccgtaaactgtagatatgctgtagtttttccacctccatgtcatttagccctaatatgcatttatgcgtactgagagaagtaaaaaaaaaaaaagatgtgctgctttaagggcatgtttgggagcaaggggatattgaatagcaatgggattttagccccttcaatccccttgctccttagataggatgtatttcttctacggatatatggtacttgtacgtgcgtgtcagcatgtgatgagttgaatacttctttcatccaggattattctatatcttgcactatatgtcattgttaccaaaaatgttttctctcttcaaccatatgaaaaagaaaa

SEQ ID NO: 47561 - DNA, 2211 bp, Zea Mays
ttccgtcaccgtcgcccgccgccctggtctcccgcttcctctgatcctccgacctccgcctcttaaccttcacagcccttgtctttggcacgaaccaattcgctggcatggcgcggcggttacctgccgctgactcgctctagtggtgaggacctgctgcagtggacgtctgccgtggacgtggtggcggagaggggtgctggcggcgagcgacggcggagcagccatggaagcggtgcagacgatgattgaagcgaggcgttctgagctctaaaaggctgaagccaaggttgtgatattgggcgacaagatcgctgcgcacttaagcctccttcaaaagatatatttggctcttgatgcttactctcctacattgcagcagcatcctggtgggttcgagggttttctcgacctgcgtgagaaggtcttcttcttattaaaatgcccgggggctgtcttacccccacaggtcgagtttcaggccgcagcgcacaggagtcccgatctcgactcccgactcgaactcgacgactcccagtcccagttcctctcgtccgcaaccgcaaaatccaagaccctggccgccggagccgaactggcccgcgcctcgggccctgcccgatttgtgtgctttgcggcctgtgggcatgctagccagccggcggcggcaccggagtccatagcagcaaccacgcggctacgagctacgacgggctggctaaggcgcaggttgagcgctgaaggctacccagctgtggtctcacgcgggtggccggtgagagcagccaagcggcagctactttccgtcgctggctagagtcctactctttgtcaaattctaggtgcgctggacgctggacgaaccctaccacgcgcaccgtcacgttgtgaattgaatcactctctgttgatgggcagcctgagcgctccgccagtgctgtcgccgctcgtttctgggctcatcttttcatctgacagagtcctcaaatctagagggttaactaccagtagcgtgatgaagtcatgtaggctatccgagctcagcaatgctgaggttagcagcctcaaggctcgtcctcgcatcgattcctcgtccatgtccatatttggcacggtgaatccaattgttgagggtgtctgtgtcagaggtgatgcagcagataagcagtaccaggtgaaaaactgcagatggaggccaacttttgccttggagactgatgggccatctaacactgatggccaagactttgatgaggacagtggttttcttggtaggactagactgggaagactcatccaagctgctgcaagggagctacttgacaagctgaactctgcgagaaccaattcgccaacaaagatattccttgtcctccttggtttttacacagccaatgccttggcaacaatactagggcagaccggtgactgggatgttcttgttgctggtgttgtagtggctgccattgagggaattggcatgctcatgtacagaaaaccaattgccaggcctcctggtaggttccaatctttgatttcaatggtgaactactggaaagccggtgtatgcctgggcctttttgtggatgccttcaagctgggtagctgagtttatacaatcatctgctgctatctgcctatggtaattttttgggtatattgggatcacaataacgccatgatatggttccatgatggccattgctcgttgctcgaattctaatagctgcatttggctctaattctgggagcattggctgctgaggtatcagatttcttcaaagttaatgaagatgtttggagcagatattattctgaggtgactattcatttttccataatcgaaggccatgtttgtcaaccattgtttggcccgtaaactgtagatatgctgtagtttttccacctccatgtcatttagccctaatatgcatttatgcgtactgagagaagtaaaaaaaaaaaaagatgtgctgctttaagggcatgtttgggagcaaggggatattgaatagcaatgggattttagccccttcaatccccttgctccttagataggatgtatttcttctacggatatatggtacttgtacgtgcgtgtcagcatgtgatgagttgaatacttctttcatccaggattattctatatcttgcactatatgtcattgttaccaaaaatgttttctctcttcaaccatatgaaaaagaaaa

SEQ ID NO: 47562 - DNA, 1797 bp, Zea Mays
aattcgctggcatggcgcggcggttacctgccgctgactcgctctagtggtgaggacctgctgcagtggacgtctgccgtggacgtggtggcggagaggggtgctggcggcgagcgacggcggagcagccatggaagcggtgcagacgatgattgaagcgaggcgttctgagctctaaaaggctgaagccaaggttgtgatattgggcgacaagatcgctgcgcacttaagcctccttcaaaagatatatttggctcttgatgcttactctcctacattgcagcagcatcctggtctgctagacgttttcttaaagacatgcaagcttgttgcagatttgagaattagacagaacggaggcgatatgacatgaatgaggtggcggtatggtgagatctccgttggtagctaatgctgctcatgtgcttaaccatgttccacgcctgcagatgcagaccaagtgaaggattctatttaagtgaggtttcagtttcaggtcctgatttgctgtacatctgaacagtttgtgccaagtgaaccgggtgtttggttgccctctagtaatgtttagcccatgtcacatcgaatgcttaaataataattacggatattaaatatagtctaattacgaaattaatttcacagatgaagactaaaagacgagacaaatttattaaatttaattaaatctatttcatactcctaattaatattcaaacgtttgatgtgacacgaactaaactttagttagagagagggaaacaactgaaaagttgtccaaacatgctgatgacttgatgccaactgaaattgacactcttgaatattcactagctagaagctgagccatgtgataatctagtaggatcatttcaggccattcagatatgtgattccttgttcctctctccgagatacttttctcaagtcaattgacatcctgaatttccaaagataaaatgttacaggcctgcattagggacattcactatgttcagtttaaattcgacacaaagatattcactatgttccagcgcgtccattgtttttacacaattataattttctggtcgtgccttattttagaccagacatcgtctctaattggattgtatctattgaggtttggctaatggttcatcaacttatacttgctaccatacttatttttaaattatatgtcatttttataggtcacgtttttttagaacatctgtttggcacaggcacacaacgagtagcaggtgccctggctaattgtaacactccgtctaatattggaccgacggtacttactcctggcaggtcactaggaggatatattgtctccacataccagcacgtgtcttttgtgcacactttgtcctaactcatgtgcacccgagaaaacttctcggtcggtcacacatactaaatttctccaagccaagaatgcttaactcggaggttctttttagatagactttcaaaaaagaagatgcaccttattgatatgaatactgtattaattctattaagttttggactagtatatcgccatctcagagggccaggatatcacaatccacccccttagaaaactggcgtcatcgtcggtcaaccccaatccaggaacctcccatcttagtcacgtctgtgtgtctagtgtcgtcatgctatgtcatgtgaccactctgggcccacatacgctatgcgtcatatacgcgaacccctaccccacacaggcccgtaaaaccgcgagggtcgactctgataccacttgtaacaccccgtccaatcctggaccggcggtattta

SEQ ID NO: 47563 - DNA, 2398 bp, Zea Mays
aattcgctggcatggcgcggcggttacctgccgctgactcgctctagtggtgaggacctgctgcagtggacgtctgccgtggacgtggtggcggagaggggtgctggcggcgagcgacggcggagcagccatggaagcggtgcagacgatgattgaagcgaggcgttctgagctctaaaaggctgaagccaaggttgtgatattgggcgacaagatcgctgcgcacttaagcctccttcaaaagatatatttggctcttgatgcttactctcctacattgcagcagcatcctggtgggttcgagggttttctcgacctgcgtgagaaggtcttcttcttattaaaatgcccgggggctgtcttacccccacaggtcgagtttcaggccgcagcgcacaggagtcccgatctcgactcccgactcgaactcgacgactcccagtcccagttcctctcgtccgcaaccgcaaaatccaagaccctggccgccggagccgaactggcccgcgcctcgggccctgcccgatttgtgtgctttgcggcctgtgggcatgctagccagccggcggcggcaccggagtccatagcagcaaccacgcggctacgagctacgacgggctggctaaggcgcaggttgagcgctgaaggctacccagctgtggtctcacgcgggtggccggtgagagcagccaagcggcaggtgcgctggacgctggacgaaccctaccacgcgcaccgtcacgttgtggtctgtctctccctctacctccattcccccgcgatctcggtttctgttcaattttcgcgctcccttcccctcgcatatgacactctgtgacattgcagaattgaatcactctctgttgatgggcagcctgagcgctccgccagtgctgtcgccgctcgtttctgggctcatcttttcatctgacagagtcctcaaatctagagggttaactaccagtagcgtgatgaagtcatgtaggctatccgagctcagcaatgctgaggttagcagcctcaaggctcgtcctcgcatcgattcctcgtccatgtccatatttggcacggtgaatccaattgttgagggtgtctgtgtcagaggtgatgcagcagataagcagtaccaggtgaaaaactgcagatggaggccaacttttgccttggagactgatgggccatctaacactgatggccaagactttgatgaggacagtggttttcttggtaggactagactgggaagactcatccaagctgctgcaagggagctacttgacaagctgaactctgcgagaaccaattcgccaacaaagatattccttgtcctccttggtttttacacagccaatgccttggcaacaatactagggcagaccggtgactgggatgttcttgttgctggtgttgtagtggctgccattgagggaattggcatgctcatgtacagaaaaccaattgccaggcctcctggtaggttccaatctttgatttcaatggtgaactactggaaagccggtgtatgcctgggcctttttgtggatgccttcaagctgggtagctgagtttatacaatcatctgctgctatctgcctatggtaattttttgggtatattgggatcacaataacgccatgatatggttccatgatggccattgctcgttgctcgaattctaatagctgcatttggctctaattctgggagcattggctgctgaggtatcagatttcttcaaagttaatgaagatgtttggagcagatattattctgaggtgactattcatttttccataatcgaaggccatgtttgtcaaccattgtttggcccgtaaactgtagatatgctgtagtttttccacctccatgtcatttagccctaatatgcatttatgcgtactgagagaagtaaaaaaaaaaaaagatgtgctgctttaagggcatgtttgggagcaaggggatattgaatagcaatgggattttagccccttcaatccccttgctccttagataggatgtatttcttctacggatatatggtacttgtacgtgcgtgtcagcatgtgatgagttgaatacttctttcatccaggattattctatatcttgcactatatgtcattgttaccaaaaatgttttctctctgtatactccttttaattgtgcaagtgccagtggtattttcggtggattaactgttactaaaaatgttttcactctgtatactctttttagccgtgtaagtgttgaagtcattggattgtgtgaagttgttttacttctcttaaacataccactcgtttgtatctagatgtatcgaataaagtggatcttgtttctatctttgatgatgtagattttctttgcaaggcttaacgaaaccatggaccagttgag

SEQ ID NO: 47564 - DNA, 2847 bp, Zea Mays
aattcgctggcatggcgcggcggttacctgccgctgactcgctctagtggtgaggacctgctgcagtggacgtctgccgtggacgtggtggcggagaggggtgctggcggcgagcgacggcggagcagccatggaagcggtgcagacgatgattgaagcgaggcgttctgagctctaaaaggctgaagccaaggttgtgatattgggcgacaagatcgctgcgcacttaagcctccttcaaaagatatatttggctcttgatgcttactctcctacattgcagcagcatcctggtctgctagacgttttcttaaagacatgcaagcttgttgcagatttgagaattagacagaacggaggcgatatgacatgaatgaggtggcggtatggtgagatctccgttggtagctaatgctgctcatgtgcttaaccatgttccacgcctgcagatgcagaccaagtgaaggattctatttaagtgaggtttcagtttcaggtcctgatgcgaaagggcctctagctgagttggttaggtggtctaagtagcactcctcaggtcctgggttcgacttcccgtgggagcgaatttcaggctgtggttaaaaaaatcccctcgtctgtctcatgccaaagcacaggtctaaggctcagccccggtcgcggtcgttctcatatgggcttcgatgccgctgtgtatgggtggggcaggggttcgagggttttctcgacctgcgtgagaaggtcttcttcttattaaaatgcccgggggctgtcttacccccacaggtcgagtttcaggccgcagcgcacaggagtcccgatctcgactcccgactcgaactcgacgactcccagtcccagttcctctcgtccgcaaccgcaaaatccaagaccctggccgccggagccgaactggcccgcgcctcgggccctgcccgatttgtgtgctttgcggcctgtgggcatgctagccagccggcggcggcaccggagtccatagcagcaaccacgcggctacgagctacgacgggctggctaaggcgcaggttgagcgctgaaggctacccagctgtggtctcacgcgggtggccggtgagagcagccaagcggcaggtacatctcccctctgccgctccaccctccgaggcggccctccctctcaatccctccagcatctggtatctctctattatctgtagaatcataaatctaaaaattatagattattcacaattaaaagtagaagtgtactatgtaatgttattaacaattttatgtgaaacatgcggcttaatcgtcgtatcaattagtttttttttaaaaaaaaattgtagctactttccgtcgctggctagagtcctactctttgtcaaattctaggtgcgctggacgctggacgaaccctaccacgcgcaccgtcacgttgtggtctgtctctccctctacctccattcccccgcgatctcggtttctgttcaattttcgcgctcccttcccctcgcatatgacactctgtgacattgcagaattgaatcactctctgttgatgggcagcctgagcgctccgccagtgctgtcgccgctcgtttctgggctcatcttttcatctgacagagtcctcaaatctagagggttaactaccagtagcgtgatgaagtcatgtaggctatccgagctcagcaatgctgaggttagcagcctcaaggctcgtcctcgcatcgattcctcgtccatgtccatatttggcacggtgaatccaattgttgagggtgtctgtgtcagaggtgatgcagcagataagcagtaccaggtgaaaaactgcagatggaggccaacttttgccttggagactgatgggccatctaacactgatggccaagactttgatgaggacagtggttttcttggtaggactagactgggaagactcatccaagctgctgcaagggagctacttgacaagctgaactctgcgagaaccaattcgccaacaaagatattccttgtcctccttggtttttacacagccaatgccttggcaacaatactagggcagaccggtgactgggatgttcttgttgctggtgttgtagtggctgccattgagggaattggcatgctcatgtacagaaaaccaattgccaggcctcctggtaggttccaatctttgatttcaatggtgaactactggaaagccggtgtatgcctgggcctttttgtggatgccttcaagctgggtagctgagtttatacaatcatctgctgctatctgcctatggtaattttttgggtatattgggatcacaataacgccatgatatggttccatgatggccattgctcgttgctcgaattctaatagctgcatttggctctaattctgggagcattggctgctgaggtatcagatttcttcaaagttaatgaagatgtttggagcagatattattctgaggtgactattcatttttccataatcgaaggccatgtttgtcaaccattgtttggcccgtaaactgtagatatgctgtagtttttccacctccatgtcatttagccctaatatgcatttatgcgtactgagagaagtaaaaaaaaaaaaagatgtgctgctttaagggcatgtttgggagcaaggggatattgaatagcaatgggattttagccccttcaatccccttgctccttagataggatgtatttcttctacggatatatggtacttgtacgtgcgtgtcagcatgtgatgagttgaatacttctttcatccaggattattctatatcttgcactatatgtcattgttaccaaaaatgttttctctcttcaaccatatgaaaaagaaaa

SEQ ID NO: 47565 - DNA, 1305 bp, Zea Mays
gcggtgcagacgcctgagcgctccgccagtgctgtcgccgctcgtttctgggctcatcttttcatctgacagagtcctcaaatctagagggttaactaccagtagcgtgatgaagtcatgtaggctatccgagctcagcaatgctgaggttagcagcctcaaggctcgtcctcgcatcgattcctcgtccatgtccatatttggcacggtgaatccaattgttgagggtgtctgtgtcagaggtgatgcagcagataagcagtaccaggtgaaaaactgcagatggaggccaacttttgccttggagactgatgggccatctaacactgatggccaagactttgatgaggacagtggttttcttggtaggactagactgggaagactcatccaagctgctgcaagggagctacttgacaagctgaactctgcgagaaccaattcgccaacaaagatattccttgtcctccttggtttttacacagccaatgccttggcaacaatactagggcagaccggtgactgggatgttcttgttgctggtgttgtagtggctgccattgagggaattggcatgctcatgtacagaaaaccaattgccaggcctcctggtaggttccaatctttgatttcaatggtgaactactggaaagccggtgtatgcctgggcctttttgtggatgccttcaagctgggtagctgagtttatacaatcatctgctgctatctgcctatggtaattttttgggtatattgggatcacaataacgccatgatatggttccatgatggccattgctcgttgctcgaattctaatagctgcatttggctctaattctgggagcattggctgctgaggtatcagatttcttcaaagttaatgaagatgtttggagcagatattattctgaggtgactattcatttttccataatcgaaggccatgtttgtcaaccattgtttggcccgtaaactgtagatatgctgtagtttttccacctccatgtcatttagccctaatatgcatttatgcgtactgagagaagtaaaaaaaaaaaaagatgtgctgctttaagggcatgtttgggagcaaggggatattgaatagcaatgggattttagccccttcaatccccttgctccttagataggatgtatttcttctacggatatatggtacttgtacgtgcgtgtcagcatgtgatgagttgaatacttctttcatccaggattattctatatcttgcactatatgtcattgttaccaaaaatgttttctctcttcaaccatatgaaaaagaaaa

SEQ ID NO: 47566 - DNA, 4143 bp, Zea Mays
ctgctaccccaaatacgttttttcccttcaaaatttaccctttccagttttcttaagtacttttgctgttttctttttttccctctgacctcaaattaccaaattacccttcatgacctgaacgaagtctcagcattatttttccgtcttctcttaagttctcgtgttctgtctctatccatttgtttactcccgatccccatcagccatggcgataaagtgagggttccaggcggccgccgcttcagggagggctcgcggcggagacaggctcggcgctcgcgcggtcggcaggagctcgcagcgggcaagggctggctctcgggcaggaggtgctcgcagcacggtgctggcaggggtggctcgtggcgcaggcaaggagaagctcacgacaggggcggctaagacttcggtgcgggcacagttgcaggttgcagcagccactcgttgaagatgtttccctctgacgtcgagttactatgaacaattttgatcacttatgtgcttctaccggtagagtgaagaccagaatgacaacataccgttggatagcagagaagtcaatcccatttttgaagaaggatccaaatatgggcgcaaaaaagttacaagaggagctagaggataaatataatgtgaagctaggatactcaacagtgtgggctggtagacagaaggcggtggaacaaatatttggaacatgggaagaaagttttgcagatttgtataggttcaaggcagagattgacgcaaaaatgcctggaagtgttgtcgatttagaggtgcaggaggaagaggatgaccgtttttgagcgtagactccacagcgctcaatggcagatggaatgggcagttttctgaaaaggaagagtcacgccaaacaagggcgaccattaggatcagcaagtacttgcacgcccaaaaggcaaaaagttgtgcaaaacgagtcaactaatattagtccggggcctgttacaagaagccaatcggcgttatcaacgattggtgaaggctcaagccaggaaatggccacacccaaaaggcaacaagttgtgacaaatcaatcaactaatattagtcctgtccctgtcacaaggaggcaattggcattatcaatgctcgatgaaagcacaagtcaggaattggccacaccttcgagggcaaccaaatccccttccaagcctacatcaaggattgcaaggaagatcactccaagaaaattcaaaaagtgaatgtttttgtgtctacaaaactatgatattggatgcttttgtaatcttaattaattagaacggaggcatttggatgatattttggcatatgtatggattgttgacattaaacttgttattgtgcttgctgttatgcttctgtatgggattattgacatttggatgacatttgggcttaatatttaaatcaaacttgctattatgcttgaacgtggtgcacatgtgtgcacgttgctacaattttttaatgcatgagtttgtattttctaccatacctattcttctttttttacattttttattcgtaatgtcttttatactttgggcaaactctgattatactttgggcaaactctgatgtggatgaggaggaccaaacggcgcagctctaatgtgcacaagcagaagggtactttggtcatttgaggtcagagggaaaaaagaaaacagcaaaagtacttaagaaagctgaaaagggtaaattttgaagggaaaaacgtatttggggtagcagccgaatggctaacgtactaagggataaagtctgaaaggctaacgtattgaggggcagcagctgaaaattctctatattaggccccgattctgatgaggcccatatgtcccggcacgtaattacgagcacctcccagtccgacctgttcggatacggagcccacgaggccacgaacgaagccctaatcatccgctccaaactccccgcaccggcagagatcagccgtccacgagagcatcacggctagggtttccgatttcaactaggacccctggatctatgattctatgaaccagaggcgagacgagtggccgcagcatcaggaccgtctccaactcgccagtactcagccgccgcaatcagggacagggagctcgagcgcgcgccccacctgcgccgacgcgatgcgggccaaggttttcgccgtgggctgtgggtggccagaggcgacaatcccagcgaggtggtggcgttgggcgccgcatccgccttggccgtcttgctggccgccgctgcccctgccgcagggggaaggacgacacggaggagtccaggtacaaggccccgactgcaggtccctggttcaagcccaaacgaaacaaaatactcaaaccaactctcgccgccgccgccgatgacatcggaggagcatccctcgtctacgtcctcggacggcagcacgaccatcggctccgacgaacatcttgattccccgccatcaccttcgacgttcttcgactctcctcctgaatccgatgactccgccgcctcctcgctgctctcggacggctcttcagagtccgagcccatcattttcaagaaaccccgcccacccgtgcgctcgtggccggcctccgacgagatcgcgatcctcgagaccgtcgcgtcgcaccggcagaagcacgggcgacttcccctggcagacgacctcgccgccgcggtgcggggccgcctcagcgcgggggaccgcctcagcgccgcgcagatcaccaggcggctgtgcgcgctccgcaaccggtacgacaacactgttatccgcctcaaacgcggcacgatcccggcgaaggacagcgacgtcaccatctacaggctctccaagctcatctgggagggaacgcgcagggggaggatagagaagaagacccgtgtgcccgacgcgcgcaatgacccaagagggttcgacgatctggccgagctgtacccttgcctctccgcggaggtggaggcgattggtgcgaggtgcggctacggggcgctgaagagggcattcgggcgcatcggtgacgacacggcggcgcggctggaggcgaagctgaagaggcagcggatggcggagaccagggcgagcggaaagcttgaccggctgaggtcgagagtcgccaaggcgcttcagggatttaacaagtgaaatggtatagggacattctgttggctgtcatcgtttcatgctacttcaagttgtttcttttcacaatgatggtttgggagtttccatcatctgttatattcatcgttgaaatgtttgttttctagtcagtgggatgcatatatacattagtaacagtcttgttgttccgcagtttccaaaagcccattgtttcgtggtctgcttactagcgcatgcagcaaaatacttgacccagcgatggatccttggaacgacatgagcctactcgtccacatcatcctcgagcttcaagcacggccctaatcttcggatggactgttctggtgcttctagagacgtttaggtatattgtgccctgattgatgagccttgccatttcctacccagaaaaaaaaccaaattagagttgcttaatgattcaaacaaagctgcttaatcacgcaactgatttaatagtagggctttatataacgagaggggagaccatatgtctctaccaagatacttttcgtgtactcatgttacagtggtttggacttcatgctctaacaatattataaagtaagaccactgcttcacctgttttacatctcccctctcgggacaaaagaaattggattcttgtgtttttgcagataggaattaatttaggctccctttggaacaaaggaaagaatatagaaaacctactgcccctttggaaagtagaaatttcataacagtcgtgttgaattgatgattcagttttttttttgtaaaaataggggaaaaaatccatatgagcctccttggaacaaagggttggatttctacatatcctatacggtcttatataatagcttgctgcatagggggttagcagtaattctaatcccatgaacctcacgaaaagttttttttgtgtcactccctctcactgatttcctatttcttttctgttcgaacatatcaaagcggctgtggagaaaccatacttgcttaactcaaac

SEQ ID NO: 47567 - DNA, 5255 bp, Zea Mays
ctgctaccccaaatacgttttttcccttcaaaatttaccctttccagttttcttaagtacttttgctgttttctttttttccctctgacctcaaattaccaaattacccttcatgacctgaacgaagtctcagcattatttttccgtcttctcttaagttctcgtgttctgtctctatccatttgtttactcccgatccccatcagccatggcgataaagtgagggttccaggcggccgccgcttcagggagggctcgcggcggagacaggctcggcgctcgcgcggtcggcaggagctcgcagcgggcaagggctggctctcgggcaggaggtgctcgcagcacggtgctggcaggggtggctcgtggcgcaggcaaggagaagctcacgacaggggcggctaagacttcggtgcgggcacagttgcaggttgcagcagccactcgttgaagatgtttccctctgacgtcgagttactatgaacaattttgatcacttatgtgcttctaccggtagagtgaagaccagaatgacaacataccgttggatagcagagaagtcaatcccatttttgaagaaggatccaaatatgggcgcaaaaaagttacaagaggagctagaggataaatataatgtgaagctaggatactcaacagtgtgggctggtagacagaaggcggtggaacaaatatttggaacatgggaagaaagttttgcagatttgtataggttcaaggcagagattgacgcaaaaatgcctggaagtgttgtcgatttagaggtgcaggaggaagaggatgaccgtttttgagcgtagactccacagcgctcaatggcagatggaatgggcagttttctgaaaaggaagagtcacgccaaacaagggcgaccattaggatcagcaagtacttgcacgcccaaaaggcaaaaagttgtgcaaaacgagtcaactaatattagtccggggcctgttacaagaagccaatcggcgttatcaacgattggtgaaggctcaagccaggaaatggccacacccaaaaggcaacaagttgtgacaaatcaatcaactaatattagtcctgtccctgtcacaaggaggcaattggcattatcaatgctcgatgaaagcacaagtcaggaattggccacaccttcgagggcaaccaaatccccttccaagcctacatcaaggattgcaaggaagatcactccaagaaaattcaaaaagtgaatgtttttgtgtctacaaaactatgatattggatgcttttgtaatcttaattaattagaacggaggcatttggatgatattttggcatatgtatggattgttgacattaaacttgttattgtgcttgctgttatgcttctgtatgggattattgacatttggatgacatttgggcttaatatttaaatcaaacttgctattatgcttgaacgtggtgcacatgtgtgcacgttgctacaattttttaatgcatgagtttgtattttctaccatacctattcttctttttttacattttttattcgtaatgtcttttatactttgggcaaactctgattatactttgggcaaactctgatgtggatgaggaggaccaaacggcgcagctctaatgtgcacaagcagaagggtactttggtcatttgaggtcagagggaaaaaagaaaacagcaaaagtacttaagaaagctgaaaagggtaaattttgaagggaaaaacgtatttggggtagcagccgaatggctaacgtactaagggataaagtctgaaaggctaacgtattgaggggcagcagctgaaaattctctatattaggccccgattctgatgaggcccatatgtcccggcacgtaattacgagcacctcccagtccgacctgttcggatacggagcccacgaggccacgaacgaagccctaatcatccgctccaaactccccgcaccggcagagatcagccgtccacgagagcatcacggctagggtttccgatttcaactaggacccctggatctatgattctatgaaccagaggcgagacgagtggccgcagcatcaggaccgtctccaactcgccagtactcagccgccgcaatcagggacagggagctcgagcgcgcgccccacctgcgccgacgcgatgcgggccaaggttttcgccgtgggctgtgggtggccagaggcgacaatcccagcgaggtggtggcgttgggcgccgcatccgccttggccgtcttgctggccgccgctgcccctgccgcagggggaaggacgacacggaggagtccaggtacaaggccccgactgcaggtccctggttcaagcccaaacgaaacaaaatactcaaaccaactctcgccgccgccgccgatgacatcggaggagcatccctcgtctacgtcctcggacggcagcacgaccatcggctccgacgaacatcttgattccccgccatcaccttcgacgttcttcgactctcctcctgaatccgatgactccgccgcctcctcgctgctctcggacggctcttcagagtccgagcccatcattttcaagaaaccccgcccacccgtgcgctcgtggccggcctccgacgagatcgcgatcctcgagaccgtcgcgtcgcaccggcagaagcacgggcgacttcccctggcagacgacctcgccgccgcggtgcggggccgcctcagcgcgggggaccgcctcagcgccgcgcagatcaccaggcggctgtgcgcgctccgcaaccgggggaggatagagaagaagacccgtgtgcccgacgcgcgcaatgacccaagagggttcgacgatctggccgagctgtacccttgcctctccgcggaggtggaggcgattggtgcgaggtgcggctacggggcgctgaagagggcattcgggcgcatcggtgacgacacggcggcgcggctggaggcgaagctgaagaggcagcggatggcggagaccagggcgagcggaaagcttgaccggctgaggtcgagagtcgccaaggcgcttcagggatttaacaagtgaaatggtgatttcttcatcttctttctgttgctacatgggttggcgtagaaagacacaataggattggttccttcgcattgtttcatggttgaaatgttatcagattctctggcaagtttgagggcactatcaactgcaaagaatttgaaatgtcaatggctggcattgagtttgttttgcactaccattgtctgtgctaagaacaggatttcagaagcaaaataaattttcccgctgtgataaaattcaaagtacagaagttattggtgatgcatcgttgggaaacattatatttatgatcatgttactcctgggagtacgatatattctcaaattatatttcgatattataaggtacactagcatgacaagttctcttgttagaataaaacatttgttgctatcaatggatccctgagtattcttgatatgcaggtagtagagatcatacaacagtctaatagtctcatagttcatttctgttctatgtacattttttgtatttcttatttcatttgcagtttagtttgcttgtccatgaattttatttgtaataacaatgttccattactcaggtatagggacattctgttggctgtcatcgtttcatgctacttcaagttgtttcttttcacaatgatggtataaaggttttttatgtattaataagcatacatgccattttacctttctgaattgagtatgaatatttgcaggtttgggagtttccatcatctgttatattcatcgttgaaatgtttgttttctagtcagtgggatgcatatatacattagtaacagtcttggtaagtacggcacgcttcttgcataacataaattgagacatttatttgagtattcttagaccttttctaggtgtaaggatgcttacacataaaaaacattcatggagcgagcataggccgtggatagcataagataaaactatgttagggttctgtgtagcgtcaactgacatatggtcgtagttttttctattagttctgccattttttcctacgaacatatatgccatggttagatggaaagggccagatgtcttcagttcagttctgacgtcaaatgatcaagtccggaatattggcatgcactttgtatcctatataattatttgatcgatcttggtctcactcagcgtctacaatctacatcgacgtcttctagagttttctgaaatggtagtgtactagtgtgaagacatgccccatgttaaccgtgttgccttaattttttcttcaattttttctagatgtattgatggcttccttctgtactgattttgtgacaattctatttctttatttaggtgtaagttctgttcaatgttgtgagacctgagtataccgtttctttgcagttgttccgcagtttccaaaagcccattgtttcgtggtctgcttactagcgcatgcagcaaaatacttgacccagcgatggatccttggaacgacatgagcctactcgtccacatcatcctcgagcttcaagcacggccctaatcttcggatggactgttctggtgcttctagagacgtttaggtatattgtgccctgattgatgagccttgccatttcctacccagaaaaaaaaccaaattagagttgcttaatgattcaaacaaagctgcttaatcacgcaactgatttaatagtagggctttatataacgagaggggagaccatatgtctctaccaagatacttttcgtgtactcatgttacagtggtttggacttcatgctctaacaatattataaagtaagaccactgcttcacctgttttacatctcccctctcgggacaaaagaaattggattcttgtgtttttgcagataggaattaatttaggctccctttggaacaaaggaaagaatatagaaaacctactgcccctttggaaagtagaaatttcataacagtcgtgttgaattgatgattcagttttttttttgtaaaaataggggaaaaaatccatatgagcctccttggaacaaagggttggatttctacatatcctatacggtcttatataatagcttgctgcatagggggttagcagtaattctaatcccatgaacctcacgaaaagttttttttgtgtcactccctctcactgatttcctatttcttttctgttcgaacatatcaaagcggctgtggagaaaccatacttgcttaactcaaac

SEQ ID NO: 47568 - DNA, 4218 bp, Zea Mays
ctgctaccccaaatacgttttttcccttcaaaatttaccctttccagttttcttaagtacttttgctgttttctttttttccctctgacctcaaattaccaaattacccttcatgacctgaacgaagtctcagcattatttttccgtcttctcttaagttctcgtgttctgtctctatccatttgtttactcccgatccccatcagccatggcgataaagtgagggttccaggcggccgccgcttcagggagggctcgcggcggagacaggctcggcgctcgcgcggtcggcaggagctcgcagcgggcaagggctggctctcgggcaggaggtgctcgcagcacggtgctggcaggggtggctcgtggcgcaggcaaggagaagctcacgacaggggcggctaagacttcggtgcgggcacagttgcaggttgcagcagccactcgttgaagatgtttccctctgacgtcgagttactatgaacaattttgatcacttatgtgcttctaccggtagagtgaagaccagaatgacaacataccgttggatagcagagaagtcaatcccatttttgaagaaggatccaaatatgggcgcaaaaaagttacaagaggagctagaggataaatataatgtgaagctaggatactcaacagtgtgggctggtagacagaaggcggtggaacaaatatttggaacatgggaagaaagttttgcagatttgtataggttcaaggcagagattgacgcaaaaatgcctggaagtgttgtcgatttagagaccgtttttgagcgtagactccacagcgctcaatggcagatggaatgggcagttttctgaaaaggaagagtcacgccaaacaagggcgaccattaggatcagcaagtacttgcacgcccaaaaggcaaaaagttgtgcaaaacgagtcaactaatattagtccggggcctgttacaagaagccaatcggcgttatcaacgattggtgaaggctcaagccaggaaatggccacacccaaaaggcaacaagttgtgacaaatcaatcaactaatattagtcctgtccctgtcacaaggaggcaattggcattatcaatgctcgatgaaagcacaagtcaggaattggccacaccttcgagggcaaccaaatccccttccaagcctacatcaaggattgcaaggaagatcactccaagaaaattcaaaaagtgaatgtttttgtgtctacaaaactatgatattggatgcttttgtaatcttaattaattagaacggaggcatttggatgatattttggcatatgtatggattgttgacattaaacttgttattgtgcttgctgttatgcttctgtatgggattattgacatttggatgacatttgggcttaatatttaaatcaaacttgctattatgcttgaacgtggtgcacatgtgtgcacgttgctacaattttttaatgcatgagtttgtattttctaccatacctattcttctttttttacattttttattcgtaatgtcttttatactttgggcaaactctgattatactttgggcaaactctgatgtggatgaggaggaccaaacggcgcagctctaatgtgcacaagcagaagggtactttggtcatttgaggtcagagggaaaaaagaaaacagcaaaagtacttaagaaagctgaaaagggtaaattttgaagggaaaaacgtatttggggtagcagccgaatggctaacgtactaagggataaagtctgaaaggctaacgtattgaggggcagcagctgaaaattctctatattaggccccgattctgatgaggcccatatgtcccggcacgtaattacgagcacctcccagtccgacctgttcggatacggagcccacgaggccacgaacgaagccctaatcatccgctccaaactccccgcaccggcagagatcagccgtccacgagagcatcacggctagggtttccgatttcaactaggacccctggatctatgattctatgaaccagaggcgagacgagtggccgcagcatcaggaccgtctccaactcgccagtactcagccgccgcaatcagggacagggagctcgagcgcgcgccccacctgcgccgacgcgatgcgggccaaggttcctcttccctcgcctccgctgcgttcttctttccatgatgatgcgatgaaaccgtgtcctaggtagctttgcggagctagtcattttctaggttttcgccgtgggctgtgggtggccagaggcgacaatcccagcgaggtggtggcgttgggcgccgcatccgccttggccgtcttgctggccgccgctgcccctgccgcagggggaaggacgacacggaggagtccaggtacaaggccccgactgcaggtccctggttcaagcccaaacgaaacaaaatactcaaaccaactctcgccgccgccgccgatgacatcggaggagcatccctcgtctacgtcctcggacggcagcacgaccatcggctccgacgaacatcttgattccccgccatcaccttcgacgttcttcgactctcctcctgaatccgatgactccgccgcctcctcgctgctctcggacggctcttcagagtccgagcccatcattttcaagaaaccccgcccacccgtgcgctcgtggccggcctccgacgagatcgcgatcctcgagaccgtcgcgtcgcaccggcagaagcacgggcgacttcccctggcagacgacctcgccgccgcggtgcggggccgcctcagcgcgggggaccgcctcagcgccgcgcagatcaccaggcggctgtgcgcgctccgcaaccggtacgacaacactgttatccgcctcaaacgcggcacgatcccggcgaaggacagcgacgtcaccatctacaggctctccaagctcatctgggagggaacgcgcagggggaggatagagaagaagacccgtgtgcccgacgcgcgcaatgacccaagagggttcgacgatctggccgagctgtacccttgcctctccgcggaggtggaggcgattggtgcgaggtgcggctacggggcgctgaagagggcattcgggcgcatcggtgacgacacggcggcgcggctggaggcgaagctgaagaggcagcggatggcggagaccagggcgagcggaaagcttgaccggctgaggtcgagagtcgccaaggcgcttcagggatttaacaagtgaaatggtatagggacattctgttggctgtcatcgtttcatgctacttcaagttgtttcttttcacaatgatggtttgggagtttccatcatctgttatattcatcgttgaaatgtttgttttctagtcagtgggatgcatatatacattagtaacagtcttgttgttccgcagtttccaaaagcccattgtttcgtggtctgcttactagcgcatgcagcaaaatacttgacccagcgatggatccttggaacgacatgagcctactcgtccacatcatcctcgagcttcaagcacggccctaatcttcggatggactgttctggtgcttctagagacgtttaggtatattgtgccctgattgatgagccttgccatttcctacccagaaaaaaaaccaaattagagttgcttaatgattcaaacaaagctgcttaatcacgcaactgatttaatagtagggctttatataacgagaggggagaccatatgtctctaccaagatacttttcgtgtactcatgttacagtggtttggacttcatgctctaacaatattataaagtaagaccactgcttcacctgttttacatctcccctctcgggacaaaagaaattggattcttgtgtttttgcagataggaattaatttaggctccctttggaacaaaggaaagaatatagaaaacctactgcccctttggaaagtagaaatttcataacagtcgtgttgaattgatgattcagttttttttttgtaaaaataggggaaaaaatccatatgagcctccttggaacaaagggttggatttctacatatcctatacggtcttatataatagcttgctgcatagggggttagcagtaattctaatcccatgaacctcacgaaaagttttttttgtgtcactccctctcactgatttcctatttcttttctgttcgaacatatcaaagcggctgtggagaaaccatacttgcttaactcaaac

SEQ ID NO: 47569 - DNA, 3288 bp, Zea Mays
ctgctaccccaaatacgttttttcccttcaaaatttaccctttccagttttcttaagtacttttgctgttttctttttttccctctgacctcaaattaccaaattacccttcatgacctgaacgaagtctcagcattatttttccgtcttctcttaagttctcgtgttctgtctctatccatttgtttactcccgatccccatcagccatggcgataaagtgagggttccaggcggccgccgcttcagggagggctcgcggcggagacaggctcggcgctcgcgcggtcggcaggagctcgcagcgggcaagggctggctctcgggcaggaggtgctcgcagcacggtgctggcaggggtggctcgtggcgcaggcaaggagaagctcacgacaggggcggctaagacttcggtgcgggcacagttgcaggttgcagcagccactcgttgaagatgtttccctctgacgtcgagttactatgaacaattttgatcacttatgtgcttctaccggtagagtgaagaccagaatgacaacataccgttggatagcagagaagtcaatcccatttttgaagaaggatccaaatatgggcgcaaaaaagttacaagaggagctagaggataaatataatgtgaagctaggatactcaacagtgtgggctggtagacagaaggcggtggaacaaatatttggaacatgggaagaaagttttgcagatttgtataggttcaaggcagagattgacgcaaaaatgcctggaagtgttgtcgatttagaggtgcaggaggaagaggatggtgtgtattttcgcagattcttttgttgtttcaaaccaagcattgatggttttctgaacggttgcagaccgtttttgagcgtagactccacagcgctcaatggcagatggaatgggcagttttctgaaaaggtaaaaccgcattgcaatttatcagtttgataatttttgtacaatggagagaccacattatttttcatgtgcaggaagagtcacgccaaacaagggcgaccattaggatcagcaagtacttgcacgcccaaaaggcaaaaagttgtgcaaaacgagtcaactaatattagtccggggcctgttacaagaagccaatcggcgttatcaacgattggtgaaggctcaagccaggaaatggccacacccaaaaggcaacaagttgtgacaaatcaatcaactaatattagtcctgtccctgtcacaaggaggcaattggcattatcaatgctcgatgaaagcacaagtcaggaattggccacaccttcgagggcaaccaaatccccttccaagcctacatcaaggattgcaaggaagatcactccaagaaaattcaaaaagtgaatgtttttgtgtctacaaaactatgatattggatgcttttgtaatcttaattaattagaacggaggcatttggatgatattttggcatatgtatggattgttgacattaaacttgttattgtgcttgctgttatgcttctgtatgggattattgacatttggatgacatttgggcttaatatttaaatcaaacttgctattatgcttgaacgtggtgcacatgtgtgcacgttgctacaattttttaatgcatgagtttgtattttctaccatacctattcttctttttttacattttttattcgtaatgtcttttatactttgggcaaactctgattatactttgggcaaactctgatgtggatgaggaggaccaaacggcgcagctctaatgtgcacaagcagaagggtactttggtcatttgaggtcagagggaaaaaagaaaacagcaaaagtacttaagaaagctgaaaagggtaaattttgaagggaaaaacgtatttggggtagcagccgaatggctaacgtactaagggataaagtctgaaaggctaacgtattgaggggcagcagctgaaaattctctatattaggccccgattctgatgaggcccatatgtcccggcacgtaattacgagcacctcccagtccgacctgttcggatacggagcccacgaggccacgaacgaagccctaatcatccgctccaaactccccgcaccggcagagatcagccgtccacgagagcatcacggctagggtttccgatttcaactaggacccctggatctatgattctatgaaccagaggcgagacgagtggccgcagcatcaggaccgtctccaactcgccagtactcagccgccgcaatcagggacagggagctcgagcgcgcgccccacctgcgccgacgcgatgcgggccaaggtatagggacattctgttggctgtcatcgtttcatgctacttcaagttgtttcttttcacaatgatggtttgggagtttccatcatctgttatattcatcgttgaaatgtttgttttctagtcagtgggatgcatatatacattagtaacagtcttgttgttccgcagtttccaaaagcccattgtttcgtggtctgcttactagcgcatgcagcaaaatacttgacccagcgatggatccttggaacgacatgagcctactcgtccacatcatcctcgagcttcaagcacggccctaatcttcggatggactgttctggtgcttctagagacgtttaggtatattgtgccctgattgatgagccttgccatttcctacccagaaaaaaaaccaaattagagttgcttaatgattcaaacaaagctgcttaatcacgcaactgatttaatagtagggctttatataacgagaggggagaccatatgtctctaccaagatacttttcgtgtactcatgttacagtggtttggacttcatgctctaacaatattataaagtaagaccactgcttcacctgttttacatctcccctctcgggacaaaagaaattggattcttgtgtttttgcagataggaattaatttaggctccctttggaacaaaggaaagaatatagaaaacctactgcccctttggaaagtagaaatttcataacagtcgtgttgaattgatgattcagttttttttttgtaaaaataggggaaaaaatccatatgagcctccttggaacaaagggttggatttctacatatcctatacggtcttatataatagcttgctgcatagggggttagcagtaattctaatcccatgaacctcacgaaaagttttttttgtgtcactccctctcactgatttcctatttcttttctgttcgaacatatcaaagcggctgtggagaaaccatacttgcttaactcaaac

SEQ ID NO: 47570 - DNA, 5330 bp, Zea Mays
ctgctaccccaaatacgttttttcccttcaaaatttaccctttccagttttcttaagtacttttgctgttttctttttttccctctgacctcaaattaccaaattacccttcatgacctgaacgaagtctcagcattatttttccgtcttctcttaagttctcgtgttctgtctctatccatttgtttactcccgatccccatcagccatggcgataaagtgagggttccaggcggccgccgcttcagggagggctcgcggcggagacaggctcggcgctcgcgcggtcggcaggagctcgcagcgggcaagggctggctctcgggcaggaggtgctcgcagcacggtgctggcaggggtggctcgtggcgcaggcaaggagaagctcacgacaggggcggctaagacttcggtgcgggcacagttgcaggttgcagcagccactcgttgaagatgtttccctctgacgtcgagttactatgaacaattttgatcacttatgtgcttctaccggtagagtgaagaccagaatgacaacataccgttggatagcagagaagtcaatcccatttttgaagaaggatccaaatatgggcgcaaaaaagttacaagaggagctagaggataaatataatgtgaagctaggatactcaacagtgtgggctggtagacagaaggcggtggaacaaatatttggaacatgggaagaaagttttgcagatttgtataggttcaaggcagagattgacgcaaaaatgcctggaagtgttgtcgatttagagaccgtttttgagcgtagactccacagcgctcaatggcagatggaatgggcagttttctgaaaaggaagagtcacgccaaacaagggcgaccattaggatcagcaagtacttgcacgcccaaaaggcaaaaagttgtgcaaaacgagtcaactaatattagtccggggcctgttacaagaagccaatcggcgttatcaacgattggtgaaggctcaagccaggaaatggccacacccaaaaggcaacaagttgtgacaaatcaatcaactaatattagtcctgtccctgtcacaaggaggcaattggcattatcaatgctcgatgaaagcacaagtcaggaattggccacaccttcgagggcaaccaaatccccttccaagcctacatcaaggattgcaaggaagatcactccaagaaaattcaaaaagtgaatgtttttgtgtctacaaaactatgatattggatgcttttgtaatcttaattaattagaacggaggcatttggatgatattttggcatatgtatggattgttgacattaaacttgttattgtgcttgctgttatgcttctgtatgggattattgacatttggatgacatttgggcttaatatttaaatcaaacttgctattatgcttgaacgtggtgcacatgtgtgcacgttgctacaattttttaatgcatgagtttgtattttctaccatacctattcttctttttttacattttttattcgtaatgtcttttatactttgggcaaactctgattatactttgggcaaactctgatgtggatgaggaggaccaaacggcgcagctctaatgtgcacaagcagaagggtactttggtcatttgaggtcagagggaaaaaagaaaacagcaaaagtacttaagaaagctgaaaagggtaaattttgaagggaaaaacgtatttggggtagcagccgaatggctaacgtactaagggataaagtctgaaaggctaacgtattgaggggcagcagctgaaaattctctatattaggccccgattctgatgaggcccatatgtcccggcacgtaattacgagcacctcccagtccgacctgttcggatacggagcccacgaggccacgaacgaagccctaatcatccgctccaaactccccgcaccggcagagatcagccgtccacgagagcatcacggctagggtttccgatttcaactaggacccctggatctatgattctatgaaccagaggcgagacgagtggccgcagcatcaggaccgtctccaactcgccagtactcagccgccgcaatcagggacagggagctcgagcgcgcgccccacctgcgccgacgcgatgcgggccaaggttcctcttccctcgcctccgctgcgttcttctttccatgatgatgcgatgaaaccgtgtcctaggtagctttgcggagctagtcattttctaggttttcgccgtgggctgtgggtggccagaggcgacaatcccagcgaggtggtggcgttgggcgccgcatccgccttggccgtcttgctggccgccgctgcccctgccgcagggggaaggacgacacggaggagtccaggtacaaggccccgactgcaggtccctggttcaagcccaaacgaaacaaaatactcaaaccaactctcgccgccgccgccgatgacatcggaggagcatccctcgtctacgtcctcggacggcagcacgaccatcggctccgacgaacatcttgattccccgccatcaccttcgacgttcttcgactctcctcctgaatccgatgactccgccgcctcctcgctgctctcggacggctcttcagagtccgagcccatcattttcaagaaaccccgcccacccgtgcgctcgtggccggcctccgacgagatcgcgatcctcgagaccgtcgcgtcgcaccggcagaagcacgggcgacttcccctggcagacgacctcgccgccgcggtgcggggccgcctcagcgcgggggaccgcctcagcgccgcgcagatcaccaggcggctgtgcgcgctccgcaaccgggggaggatagagaagaagacccgtgtgcccgacgcgcgcaatgacccaagagggttcgacgatctggccgagctgtacccttgcctctccgcggaggtggaggcgattggtgcgaggtgcggctacggggcgctgaagagggcattcgggcgcatcggtgacgacacggcggcgcggctggaggcgaagctgaagaggcagcggatggcggagaccagggcgagcggaaagcttgaccggctgaggtcgagagtcgccaaggcgcttcagggatttaacaagtgaaatggtgatttcttcatcttctttctgttgctacatgggttggcgtagaaagacacaataggattggttccttcgcattgtttcatggttgaaatgttatcagattctctggcaagtttgagggcactatcaactgcaaagaatttgaaatgtcaatggctggcattgagtttgttttgcactaccattgtctgtgctaagaacaggatttcagaagcaaaataaattttcccgctgtgataaaattcaaagtacagaagttattggtgatgcatcgttgggaaacattatatttatgatcatgttactcctgggagtacgatatattctcaaattatatttcgatattataaggtacactagcatgacaagttctcttgttagaataaaacatttgttgctatcaatggatccctgagtattcttgatatgcaggtagtagagatcatacaacagtctaatagtctcatagttcatttctgttctatgtacattttttgtatttcttatttcatttgcagtttagtttgcttgtccatgaattttatttgtaataacaatgttccattactcaggtatagggacattctgttggctgtcatcgtttcatgctacttcaagttgtttcttttcacaatgatggtataaaggttttttatgtattaataagcatacatgccattttacctttctgaattgagtatgaatatttgcaggtttgggagtttccatcatctgttatattcatcgttgaaatgtttgttttctagtcagtgggatgcatatatacattagtaacagtcttggtaagtacggcacgcttcttgcataacataaattgagacatttatttgagtattcttagaccttttctaggtgtaaggatgcttacacataaaaaacattcatggagcgagcataggccgtggatagcataagataaaactatgttagggttctgtgtagcgtcaactgacatatggtcgtagttttttctattagttctgccattttttcctacgaacatatatgccatggttagatggaaagggccagatgtcttcagttcagttctgacgtcaaatgatcaagtccggaatattggcatgcactttgtatcctatataattatttgatcgatcttggtctcactcagcgtctacaatctacatcgacgtcttctagagttttctgaaatggtagtgtactagtgtgaagacatgccccatgttaaccgtgttgccttaattttttcttcaattttttctagatgtattgatggcttccttctgtactgattttgtgacaattctatttctttatttaggtgtaagttctgttcaatgttgtgagacctgagtataccgtttctttgcagttgttccgcagtttccaaaagcccattgtttcgtggtctgcttactagcgcatgcagcaaaatacttgacccagcgatggatccttggaacgacatgagcctactcgtccacatcatcctcgagcttcaagcacggccctaatcttcggatggactgttctggtgcttctagagacgtttaggtatattgtgccctgattgatgagccttgccatttcctacccagaaaaaaaaccaaattagagttgcttaatgattcaaacaaagctgcttaatcacgcaactgatttaatagtagggctttatataacgagaggggagaccatatgtctctaccaagatacttttcgtgtactcatgttacagtggtttggacttcatgctctaacaatattataaagtaagaccactgcttcacctgttttacatctcccctctcgggacaaaagaaattggattcttgtgtttttgcagataggaattaatttaggctccctttggaacaaaggaaagaatatagaaaacctactgcccctttggaaagtagaaatttcataacagtcgtgttgaattgatgattcagttttttttttgtaaaaataggggaaaaaatccatatgagcctccttggaacaaagggttggatttctacatatcctatacggtcttatataatagcttgctgcatagggggttagcagtaattctaatcccatgaacctcacgaaaagttttttttgtgtcactccctctcactgatttcctatttcttttctgttcgaacatatcaaagcggctgtggagaaaccatacttgcttaactcaaac

SEQ ID NO: 47571 - DNA, 3860 bp, Zea Mays
ctgctaccccaaatacgttttttcccttcaaaatttaccctttccagttttcttaagtacttttgctgttttctttttttccctctgacctcaaattaccaaattacccttcatgacctgaacgaagtctcagcattatttttccgtcttctcttaagttctcgtgttctgtctctatccatttgtttactcccgatccccatcagccatggcgataaagtgagggttccaggcggccgccgcttcagggagggctcgcggcggagacaggctcggcgctcgcgcggtcggcaggagctcgcagcgggcaagggctggctctcgggcaggaggtgctcgcagcacggtgctggcaggggtggctcgtggcgcaggcaaggagaagctcacgacaggggcggctaagacttcggtgcgggcacagttgcaggttgcagcagccactcgttgaagatgtttccctctgacgtcgagttactatgaacaattttgatcacttatgtgcttctaccggtagagtgaagaccagaatgacaacataccgttggatagcagagaagtcaatcccatttttgaagaaggatccaaatatgggcgcaaaaaagttacaagaggagctagaggataaatataatgtgaagctaggatactcaacagtgtgggctggtagacagaaggcggtggaacaaatatttggaacatgggaagaaagttttgcagatttgtataggttcaaggcagagattgacgcaaaaatgcctggaagtgttgtcgatttagaggtgcaggaggaagaggatggtgtgtattttcgcagattcttttgttgtttcaaaccaagcattgatggttttctgaacggttgcagaccgtttttgagcgtagactccacagcgctcaatggcagatggaatgggcagttttctgaaaaggtaaaaccgcattgcaatttatcagtttgataatttttgtacaatggagagaccacattatttttcatgtgcaggaagagtcacgccaaacaagggcgaccattaggatcagcaagtacttgcacgcccaaaaggcaaaaagttgtgcaaaacgagtcaactaatattagtccggggcctgttacaagaagccaatcggcgttatcaacgattggtgaaggctcaagccaggaaatggccacacccaaaaggcaacaagttgtgacaaatcaatcaactaatattagtcctgtccctgtcacaaggaggcaattggcattatcaatgctcgatgaaagcacaagtcaggaattggccacaccttcgagggcaaccaaatccccttccaagcctacatcaaggattgcaaggaagatcactccaagaaaattcaaaaagtgaatgtttttgtgtctacaaaactatgatattggatgcttttgtaatcttaattaattagaacggaggcatttggatgatattttggcatatgtatggattgttgacattaaacttgttattgtgcttgctgttatgcttctgtatgggattattgacatttggatgacatttgggcttaatatttaaatcaaacttgctattatgcttgaacgtggtgcacatgtgtgcacgttgctacaattttttaatgcatgagtttgtattttctaccatacctattcttctttttttacattttttattcgtaatgtcttttatactttgggcaaactctgattatactttgggcaaactctgatgtggatgaggaggaccaaacggcgcagctctaatgtgcacaagcagaagggtactttggtcatttgaggtcagagggaaaaaagaaaacagcaaaagtacttaagaaagctgaaaagggtaaattttgaagggaaaaacgtatttggggtagcagccgaatggctaacgtactaagggataaagtctgaaaggctaacgtattgaggggcagcagctgaaaattctctatattaggccccgattctgatgaggcccatatgtcccggcacgtaattacgagcacctcccagtccgacctgttcggatacggagcccacgaggccacgaacgaagccctaatcatccgctccaaactccccgcaccggcagagatcagccgtccacgagagcatcacggctagggtttccgatttcaactaggacccctggatctatgattctatgaaccagaggcgagacgagtggccgcagcatcaggaccgtctccaactcgccagtactcagccgccgcaatcagggacagggagctcgagcgcgcgccccacctgcgccgacgcgatgcgggccaaggtatagggacattctgttggctgtcatcgtttcatgctacttcaagttgtttcttttcacaatgatggtttgggagtttccatcatctgttatattcatcgttgaaatgtttgttttctagtcagtgggatgcatatatacattagtaacagtcttggtaagtacggcacgcttcttgcataacataaattgagacatttatttgagtattcttagaccttttctaggtgtaaggatgcttacacataaaaaacattcatggagcgagcataggccgtggatagcataagataaaactatgttagggttctgtgtagcgtcaactgacatatggtcgtagttttttctattagttctgccattttttcctacgaacatatatgccatggttagatggaaagggccagatgtcttcagttcagttctgacgtcaaatgatcaagtccggaatattggcatgcactttgtatcctatataattatttgatcgatcttggtctcactcagcgtctacaatctacatcgacgtcttctagagttttctgaaatggtagtgtactagtgtgaagacatgccccatgttaaccgtgttgccttaattttttcttcaattttttctagatgtattgatggcttccttctgtactgattttgtgacaattctatttctttatttaggtgtaagttctgttcaatgttgtgagacctgagtataccgtttctttgcagttgttccgcagtttccaaaagcccattgtttcgtggtctgcttactagcgcatgcagcaaaatacttgacccagcgatggatccttggaacgacatgagcctactcgtccacatcatcctcgagcttcaagcacggccctaatcttcggatggactgttctggtgcttctagagacgtttaggtatattgtgccctgattgatgagccttgccatttcctacccagaaaaaaaaccaaattagagttgcttaatgattcaaacaaagctgcttaatcacgcaactgatttaatagtagggctttatataacgagaggggagaccatatgtctctaccaagatacttttcgtgtactcatgttacagtggtttggacttcatgctctaacaatattataaagtaagaccactgcttcacctgttttacatctcccctctcgggacaaaagaaattggattcttgtgtttttgcagataggaattaatttaggctccctttggaacaaaggaaagaatatagaaaacctactgcccctttggaaagtagaaatttcataacagtcgtgttgaattgatgattcagttttttttttgtaaaaataggggaaaaaatccatatgagcctccttggaacaaagggttggatttctacatatcctatacggtcttatataatagcttgctgcatagggggttagcagtaattctaatcccatgaacctcacgaaaagttttttttgtgtcactccctctcactgatttcctatttcttttctgttcgaacatatcaaagcggctgtggagaaaccatacttgcttaactcaaac

SEQ ID NO: 47572 - DNA, 5247 bp, Zea Mays
ctgctaccccaaatacgttttttcccttcaaaatttaccctttccagttttcttaagtacttttgctgttttctttttttccctctgacctcaaattaccaaattacccttcatgacctgaacgaagtctcagcattatttttccgtcttctcttaagttctcgtgttctgtctctatccatttgtttactcccgatccccatcagccatggcgataaagtgagggttccaggcggccgccgcttcagggagggctcgcggcggagacaggctcggcgctcgcgcggtcggcaggagctcgcagcgggcaagggctggctctcgggcaggaggtgctcgcagcacggtgctggcaggggtggctcgtggcgcaggcaaggagaagctcacgacaggggcggctaagacttcggtgcgggcacagttgcaggttgcagcagccactcgttgaagatgtttccctctgacgtcgacgatgctcactagcaagcttgcaaaaggactttgctgccagggtgaactggggcagcaaccaagaggtgtgttgataggaggttgtacttgtttgctgatgtggtagataaatcggctcaggtgattagtaattctggtctcacagttgttagtcacagtggtgtggaaagtgcagcatatgcatgttcaaatagtcaactagaaagcgcatctaatgtgatatctccaaatgttgatgtaccttttgttgattgggatgctcttgagattgttcctattacagaagagctggttggttctatagttcccgttgttgatgaagacaatttttatgaacacattggtcttcgagccgaggatgagagagtagagaaaggcaaagatagactaccagatgaagttgcatgtgaaggtgcacttgatgttgaaggtgcagccataccttgtactgatacaataccgggtgaggatgctatcttttatgataaggaggaccctccaatgactgttggcagcacatatgcaagcatgaatgagttcagatcagcagtaagacaacatgctataaagggtcagtttgaggtgtggacaaggaaatctgatacatgtaggtttaggggttattgcatagcaacataccgttggatagcagagaagtcaatcccatttttgaagaaggatccaaatatgggcgcaaaaaagttacaagaggagctagaggataaatataatgtgaagctaggatactcaacagtgtgggctggtagacagaaggcggtggaacaaatatttggaacatgggaagaaagttttgcagatttgtataggttcaaggcagagattgacgcaaaaatgcctggaagtgttgtcgatttagaggtgcaggaggaagaggatggtgtgtattttcgcagattcttttgttgtttcaaaccaagcattgatggttttctgaacggttgcagaccgtttttgagcgtagactccacagcgctcaatggcagatggaatgggcagttttctgaaaaggaagagtcacgccaaacaagggcgaccattaggatcagcaagtacttgcacgcccaaaaggcaaaaagttgtgcaaaacgagtcaactaatattagtccggggcctgttacaagaagccaatcggcgttatcaacgattggtgaaggctcaagccaggaaatggccacacccaaaaggcaacaagttgtgacaaatcaatcaactaatattagtcctgtccctgtcacaaggaggcaattggcattatcaatgctcgatgaaagcacaagtcaggaattggccacaccttcgagggcaaccaaatccccttccaagcctacatcaaggattgcaaggaagatcactccaagaaaattcaaaaagtgaatgtttttgtgtctacaaaactatgatattggatgcttttgtaatcttaattaattagaacggaggcatttggatgatattttggcatatgtatggattgttgacattaaacttgttattgtgcttgctgttatgcttctgtatgggattattgacatttggatgacatttgggcttaatatttaaatcaaacttgctattatgcttgaacgtggtgcacatgtgtgcacgttgctacaattttttaatgcatgagtttgtattttctaccatacctattcttctttttttacattttttattcgtaatgtcttttatactttgggcaaactctgattatactttgggcaaactctgatgtggatgaggaggaccaaacggcgcagctctaatgtgcacaagcagaagggtactttggtcatttgaggtcagagggaaaaaagaaaacagcaaaagtacttaagaaagctgaaaagggtaaattttgaagggaaaaacgtatttggggtagcagccgaatggctaacgtactaagggataaagtctgaaaggctaacgtattgaggggcagcagctgaaaattctctatattaggccccgattctgatgaggcccatatgtcccggcacgtaattacgagcacctcccagtccgacctgttcggatacggagcccacgaggccacgaacgaagccctaatcatccgctccaaactccccgcaccggcagagatcagccgtccacgagagcatcacggctagggtttccgatttcaactaggacccctggatctatgattctatgaaccagaggcgagacgagtggccgcagcatcaggaccgtctccaactcgccagtactcagccgccgcaatcagggacagggagctcgagcgcgcgccccacctgcgccgacgcgatgcgggccaaggttttcgccgtgggctgtgggtggccagaggcgacaatcccagcgaggtggtggcgttgggcgccgcatccgccttggccgtcttgctggccgccgctgcccctgccgcagggggaaggacgacacggaggagtccaggtacaaggccccgactgcaggtccctggttcaagcccaaacgaaacaaaatactcaaaccaactctcgccgccgccgccgatgacatcggaggagcatccctcgtctacgtcctcggacggcagcacgaccatcggctccgacgaacatcttgattccccgccatcaccttcgacgttcttcgactctcctcctgaatccgatgactccgccgcctcctcgctgctctcggacggctcttcagagtccgagcccatcattttcaagaaaccccgcccacccgtgcgctcgtggccggcctccgacgagatcgcgatcctcgagaccgtcgcgtcgcaccggcagaagcacgggcgacttcccctggcagacgacctcgccgccgcggtgcggggccgcctcagcgcgggggaccgcctcagcgccgcgcagatcaccaggcggctgtgcgcgctccgcaaccgggggaggatagagaagaagacccgtgtgcccgacgcgcgcaatgacccaagagggttcgacgatctggccgagctgtacccttgcctctccgcggaggtggaggcgattggtgcgaggtgcggctacggggcgctgaagagggcattcgggcgcatcggtgacgacacggcggcgcggctggaggcgaagctgaagaggcagcggatggcggagaccagggcgagcggaaagcttgaccggctgaggtcgagagtcgccaaggcgcttcagggatttaacaagtgaaatggtgatttcttcatcttctttctgttgctacatgggttggcgtagaaagacacaataggattggttccttcgcattgtttcatggttgaaatgttatcagattctctggcaagtttgagggcactatcaactgcaaagaatttgaaatgtcaatggctggcattgagtttgttttgcactaccattgtctgtgctaagaacaggatttcagaagcaaaataaattttcccgctgtgataaaattcaaagtacagaagttattggtgatgcatcgttgggaaacattatatttatgatcatgttactcctgggagtacgatatattctcaaattatatttcgatattataaggtacactagcatgacaagttctcttgttagaataaaacatttgttgctatcaatggatccctgagtattcttgatatgcaggtagtagagatcatacaacagtctaatagtctcatagttcatttctgttctatgtacattttttgtatttcttatttcatttgcagtttagtttgcttgtccatgaattttatttgtaataacaatgttccattactcaggtatagggacattctgttggctgtcatcgtttcatgctacttcaagttgtttcttttcacaatgatggtttgggagtttccatcatctgttatattcatcgttgaaatgtttgttttctagtcagtgggatgcatatatacattagtaacagtcttgttgttccgcagtttccaaaagcccattgtttcgtggtctgcttactagcgcatgcagcaaaatacttgacccagcgatggatccttggaacgacatgagcctactcgtccacatcatcctcgagcttcaagcacggccctaatcttcggatggactgttctggtgcttctagagacgtttaggtatattgtgccctgattgatgagccttgccatttcctacccagaaaaaaaaccaaattagagttgcttaatgattcaaacaaagctgcttaatcacgcaactgatttaatagtagggctttatataacgagaggggagaccatatgtctctaccaagatacttttcgtgtactcatgttacagtggtttggacttcatgctctaacaatattataaagtaagaccactgcttcacctgttttacatctcccctctcgggacaaaagaaattggattcttgtgtttttgcagataggaattaatttaggctccctttggaacaaaggaaagaatatagaaaacctactgcccctttggaaagtagaaatttcataacagtcgtgttgaattgatgattcagttttttttttgtaaaaataggggaaaaaatccatatgagcctccttggaacaaagggttggatttctacatatcctatacggtcttatataatagcttgctgcatagggggttagcagtaattctaatcccatgaacctcacgaaaagttttttttgtgtcactccctctcactgatttcctatttcttttctgttcgaacatatcaaagcggctgtggagaaaccatacttgcttaactcaaac

SEQ ID NO: 47573 - DNA, 3785 bp, Zea Mays
ctgctaccccaaatacgttttttcccttcaaaatttaccctttccagttttcttaagtacttttgctgttttctttttttccctctgacctcaaattaccaaattacccttcatgacctgaacgaagtctcagcattatttttccgtcttctcttaagttctcgtgttctgtctctatccatttgtttactcccgatccccatcagccatggcgataaagtgagggttccaggcggccgccgcttcagggagggctcgcggcggagacaggctcggcgctcgcgcggtcggcaggagctcgcagcgggcaagggctggctctcgggcaggaggtgctcgcagcacggtgctggcaggggtggctcgtggcgcaggcaaggagaagctcacgacaggggcggctaagacttcggtgcgggcacagttgcaggttgcagcagccactcgttgaagatgtttccctctgacgtcgacgatgctcactagcaagcttgcaaaaggactttgctgccagggtgaactggggcagcaaccaagaggtgtgttgataggaggttgtacttgtttgctgatgtggtagataaatcggctcaggtgattagtaattctggtctcacagttgttagtcacagtggtgtggaaagtgcagcatatgcatgttcaaatagtcaactagaaagcgcatctaatgtgatatctccaaatgttgatgtaccttttgttgattgggatgctcttgagattgttcctattacagaagagctggttggttctatagttcccgttgttgatgaagacaatttttatgaacacattggtcttcgagccgaggatgagagagtagagaaaggcaaagatagactaccagatgaagttgcatgtgaaggtgcacttgatgttgaaggtgcagccataccttgtactgatacaataccgggtgaggatgctatcttttatgataaggaggaccctccaatgactgttggcagcacatatgcaagcatgaatgagttcagatcagcagtaagacaacatgctataaagggtcagtttgaggtgtggacaaggaaatctgatacatgtaggtttaggggttattgcatagcaacataccgttggatagcagagaagtcaatcccatttttgaagaaggatccaaatatgggcgcaaaaaagttacaagaggagctagaggataaatataatgtgaagctaggatactcaacagtgtgggctggtagacagaaggcggtggaacaaatatttggaacatgggaagaaagttttgcagatttgtataggttcaaggcagagattgacgcaaaaatgcctggaagtgttgtcgatttagaggtgcaggaggaagaggatggtgtgtattttcgcagattcttttgttgtttcaaaccaagcattgatggttttctgaacggttgcagaccgtttttgagcgtagactccacagcgctcaatggcagatggaatgggcagttttctgaaaaggaagagtcacgccaaacaagggcgaccattaggatcagcaagtacttgcacgcccaaaaggcaaaaagttgtgcaaaacgagtcaactaatattagtccggggcctgttacaagaagccaatcggcgttatcaacgattggtgaaggctcaagccaggaaatggccacacccaaaaggcaacaagttgtgacaaatcaatcaactaatattagtcctgtccctgtcacaaggaggcaattggcattatcaatgctcgatgaaagcacaagtcaggaattggccacaccttcgagggcaaccaaatccccttccaagcctacatcaaggattgcaaggaagatcactccaagaaaattcaaaaagtgaatgtttttgtgtctacaaaactatgatattggatgcttttgtaatcttaattaattagaacggaggcatttggatgatattttggcatatgtatggattgttgacattaaacttgttattgtgcttgctgttatgcttctgtatgggattattgacatttggatgacatttgggcttaatatttaaatcaaacttgctattatgcttgaacgtggtgcacatgtgtgcacgttgctacaattttttaatgcatgagtttgtattttctaccatacctattcttctttttttacattttttattcgtaatgtcttttatactttgggcaaactctgattatactttgggcaaactctgatgtggatgaggaggaccaaacggcgcagctctaatgtgcacaagcagaagggtactttggtcatttgaggtcagagggaaaaaagaaaacagcaaaagtacttaagaaagctgaaaagggtaaattttgaagggaaaaacgtatttggggtagcagccgaatggctaacgtactaagggataaagtctgaaaggctaacgtattgaggggcagcagctgaaaattctctatattaggccccgattctgatgaggcccatatgtcccggcacgtaattacgagcacctcccagtccgacctgttcggatacggagcccacgaggccacgaacgaagccctaatcatccgctccaaactccccgcaccggcagagatcagccgtccacgagagcatcacggctagggtttccgatttcaactaggacccctggatctatgattctatgaaccagaggcgagacgagtggccgcagcatcaggaccgtctccaactcgccagtactcagccgccgcaatcagggacagggagctcgagcgcgcgccccacctgcgccgacgcgatgcgggccaaggtatagggacattctgttggctgtcatcgtttcatgctacttcaagttgtttcttttcacaatgatggtttgggagtttccatcatctgttatattcatcgttgaaatgtttgttttctagtcagtgggatgcatatatacattagtaacagtcttgttgttccgcagtttccaaaagcccattgtttcgtggtctgcttactagcgcatgcagcaaaatacttgacccagcgatggatccttggaacgacatgagcctactcgtccacatcatcctcgagcttcaagcacggccctaatcttcggatggactgttctggtgcttctagagacgtttaggtatattgtgccctgattgatgagccttgccatttcctacccagaaaaaaaaccaaattagagttgcttaatgattcaaacaaagctgcttaatcacgcaactgatttaatagtagggctttatataacgagaggggagaccatatgtctctaccaagatacttttcgtgtactcatgttacagtggtttggacttcatgctctaacaatattataaagtaagaccactgcttcacctgttttacatctcccctctcgggacaaaagaaattggattcttgtgtttttgcagataggaattaatttaggctccctttggaacaaaggaaagaatatagaaaacctactgcccctttggaaagtagaaatttcataacagtcgtgttgaattgatgattcagttttttttttgtaaaaataggggaaaaaatccatatgagcctccttggaacaaagggttggatttctacatatcctatacggtcttatataatagcttgctgcatagggggttagcagtaattctaatcccatgaacctcacgaaaagttttttttgtgtcactccctctcactgatttcctatttcttttctgttcgaacatatcaaagcggctgtggagaaaccatacttgcttaactcaaac

SEQ ID NO: 47574 - DNA, 4687 bp, Zea Mays
ctgctaccccaaatacgttttttcccttcaaaatttaccctttccagttttcttaagtacttttgctgttttctttttttccctctgacctcaaattaccaaattacccttcatgacctgaacgaagtctcagcattatttttccgtcttctcttaagttctcgtgttctgtctctatccatttgtttactcccgatccccatcagccatggcgataaaaagcacccagagaacaaatgagatagggattaactctgatgtcacatatacagtatgtgttcagtttggtcaattcattgctaaatttgatgacggtagttgtgttcttgtgccacacaaatacgatgaatgggttgtggattatcagcgatgctcactagcaagcttgcaaaaggactttgctgccagggtgaactggggcagcaaccaagaggtagaggtgtcagtatttgacaagagcatcaatctagaaacaaggctggagaatgattccgtattgcgtgcatttttcgacaggtgtgttgataggaggttgtacttgtttgctgatgtggtagataaatcggctcaggtgattagtaattctggtctcacagttgttagtcacagtggtgtggaaagtgcagcatatgcatgttcaaatagtcaactagaaagcgcatctaatgtgatatctccaaatgttgatgtaccttttgttgattgggatgctcttgagattgttcctattacagaagagctggttggttctatagttcccgttgttgatgaagacaatttttatgaacacattggtcttcgagccgaggatgagagagtagagaaaggcaaagatagactaccagatgaagttgcatgtgaaggtgcacttgatgttgaaggtgcagccataccttgtactgatacaataccgggtgaggatgctatcttttatgataaggaggaccctccaatgactgttggcagcacatatgcaagcatgaatgagttcagatcagcagtaagacaacatgctataaagggtcagtttgaggtgtggacaaggaaatctgatacatgtaggtttaggggttattgcatagctaagggttgcccatggtttattgtggcaagattaatgcatgatgagaagtctgttagggttactatgaacaattttgatcacttatgtgcttctaccggtagagtgaagaccagaatgacaacataccgttggatagcagagaagtcaatcccatttttgaagaaggatccaaatatgggcgcaaaaaagttacaagaggagctagaggataaatataatgtgaagctaggatactcaacagtgtgggctggtagacagaaggcggtggaacaaatatttggaacatgggaagaaagttttgcagatttgtataggttcaaggcagagattgacgcaaaaatgcctggaagtgttgtcgatttagagaccgtttttgagcgtagactccacagcgctcaatggcagatggaatgggcagttttctgaaaaggaagagtcacgccaaacaagggcgaccattaggatcagcaagtacttgcacgcccaaaaggcaaaaagttgtgcaaaacgagtcaactaatattagtccggggcctgttacaagaagccaatcggcgttatcaacgattggtgaaggctcaagccaggaaatggccacacccaaaaggcaacaagttgtgacaaatcaatcaactaatattagtcctgtccctgtcacaaggaggcaattggcattatcaatgctcgatgaaagcacaagtcaggaattggccacaccttcgagggcaaccaaatccccttccaagcctacatcaaggattgcaaggaagatcactccaagaaaattcaaaaagtgaatgtttttgtgtctacaaaactatgatattggatgcttttgtaatcttaattaattagaacggaggcatttggatgatattttggcatatgtatggattgttgacattaaacttgttattgtgcttgctgttatgcttctgtatgggattattgacatttggatgacatttgggcttaatatttaaatcaaacttgctattatgcttgaacgtggtgcacatgtgtgcacgttgctacaattttttaatgcatgagtttgtattttctaccatacctattcttctttttttacattttttattcgtaatgtcttttatactttgggcaaactctgattatactttgggcaaactctgatgtggatgaggaggaccaaacggcgcagctctaatgtgcacaagcagaagggtactttggtcatttgaggtcagagggaaaaaagaaaacagcaaaagtacttaagaaagctgaaaagggtaaattttgaagggaaaaacgtatttggggtagcagccgaatggctaacgtactaagggataaagtctgaaaggctaacgtattgaggggcagcagctgaaaattctctatattaggccccgattctgatgaggcccatatgtcccggcacgtaattacgagcacctcccagtccgacctgttcggatacggagcccacgaggccacgaacgaagccctaatcatccgctccaaactccccgcaccggcagagatcagccgtccacgagagcatcacggctagggtttccgatttcaactaggacccctggatctatgattctatgaaccagaggcgagacgagtggccgcagcatcaggaccgtctccaactcgccagtactcagccgccgcaatcagggacagggagctcgagcgcgcgccccacctgcgccgacgcgatgcgggccaaggttttcgccgtgggctgtgggtggccagaggcgacaatcccagcgaggtggtggcgttgggcgccgcatccgccttggccgtcttgctggccgccgctgcccctgccgcagggggaaggacgacacggaggagtccaggtacaaggccccgactgcaggtccctggttcaagcccaaacgaaacaaaatactcaaaccaactctcgccgccgccgccgatgacatcggaggagcatccctcgtctacgtcctcggacggcagcacgaccatcggctccgacgaacatcttgattccccgccatcaccttcgacgttcttcgactctcctcctgaatccgatgactccgccgcctcctcgctgctctcggacggctcttcagagtccgagcccatcattttcaagaaaccccgcccacccgtgcgctcgtggccggcctccgacgagatcgcgatcctcgagaccgtcgcgtcgcaccggcagaagcacgggcgacttcccctggcagacgacctcgccgccgcggtgcggggccgcctcagcgcgggggaccgcctcagcgccgcgcagatcaccaggcggctgtgcgcgctccgcaaccgggggaggatagagaagaagacccgtgtgcccgacgcgcgcaatgacccaagagggttcgacgatctggccgagctgtacccttgcctctccgcggaggtggaggcgattggtgcgaggtgcggctacggggcgctgaagagggcattcgggcgcatcggtgacgacacggcggcgcggctggaggcgaagctgaagaggcagcggatggcggagaccagggcgagcggaaagcttgaccggctgaggtcgagagtcgccaaggcgcttcagggatttaacaagtgaaatggtatagggacattctgttggctgtcatcgtttcatgctacttcaagttgtttcttttcacaatgatggtttgggagtttccatcatctgttatattcatcgttgaaatgtttgttttctagtcagtgggatgcatatatacattagtaacagtcttgttgttccgcagtttccaaaagcccattgtttcgtggtctgcttactagcgcatgcagcaaaatacttgacccagcgatggatccttggaacgacatgagcctactcgtccacatcatcctcgagcttcaagcacggccctaatcttcggatggactgttctggtgcttctagagacgtttaggtatattgtgccctgattgatgagccttgccatttcctacccagaaaaaaaaccaaattagagttgcttaatgattcaaacaaagctgcttaatcacgcaactgatttaatagtagggctttatataacgagaggggagaccatatgtctctaccaagatacttttcgtgtactcatgttacagtggtttggacttcatgctctaacaatattataaagtaagaccactgcttcacctgttttacatctcccctctcgggacaaaagaaattggattcttgtgtttttgcagataggaattaatttaggctccctttggaacaaaggaaagaatatagaaaacctactgcccctttggaaagtagaaatttcataacagtcgtgttgaattgatgattcagttttttttttgtaaaaataggggaaaaaatccatatgagcctccttggaacaaagggttggatttctacatatcctatacggtcttatataatagcttgctgcatagggggttagcagtaattctaatcccatgaacctcacgaaaagttttttttgtgtcactccctctcactgatttcctatttcttttctgttcgaacatatcaaagcggctgtggagaaaccatacttgcttaactcaaac

SEQ ID NO: 47575 - DNA, 4988 bp, Zea Mays
ctgctaccccaaatacgttttttcccttcaaaatttaccctttccagttttcttaagtacttttgctgttttctttttttccctctgacctcaaattaccaaattacccttcatgacctgaacgaagtctcagcattatttttccgtcttctcttaagttctcgtgttctgtctctatccatttgtttactcccgatccccatcagccatggcgataaagtgagggttccaggcggccgccgcttcagggagggctcgcggcggagacaggctcggcgctcgcgcggtcggcaggagctcgcagcgggcaagggctggctctcgggcaggaggtgctcgcagcacggtgctggcaggggtggctcgtggcgcaggcaaggagaagctcacgacaggggcggctaagacttcggtgcgggcacagttgcaggttgcagcagccactcgttgaagatgtttccctctgacgtcgataggattaactctgatgtcacatatacagtatgtgttcagtttggtcaattcattgctaaatttgatgacggtagttgtgttcttgtgccacacaaatacgatgaatgggttgtggattatcagcgatgctcactagcaagcttgcaaaaggactttgctgccagggtgaactggggcagcaaccaagaggtagaggtgtcagtatttgacaagagcatcaatctagaaacaaggctggagaatgattccgtattgcgtgcatttttcgacaggtgtgttgataggaggttgtacttgtttgctgatgtggtagataaatcggctcaggtgattagtaattctggtctcacagttgttagtcacagtggtgtggaaagtgcagcatatgcatgttcaaatagtcaactagaaagcgcatctaatgtgatatctccaaatgttgatgtaccttttgttgattgggatgctcttgagattgttcctattacagaagagctggttggttctatagttcccgttgttgatgaagacaatttttatgaacacattggtcttcgagccgaggatgagagagtagagaaaggcaaagatagactaccagatgaagttgcatgtgaaggtgcacttgatgttgaaggtgcagccataccttgtactgatacaataccgggtgaggatgctatcttttatgataaggaggaccctccaatgactgttggcagcacatatgcaagcatgaatgagttcagatcagcagtaagacaacatgctataaagggtcagtttgaggtgtggacaaggaaatctgatacatgtaggtttaggggttattgcatagcaacataccgttggatagcagagaagtcaatcccatttttgaagaaggatccaaatatgggcgcaaaaaagttacaagaggagctagaggataaatataatgtgaagctaggatactcaacagtgtgggctggtagacagaaggcggtggaacaaatatttggaacatgggaagaaagttttgcagatttgtataggttcaaggcagagattgacgcaaaaatgcctggaagtgttgtcgatttagaggtgcaggaggaagaggatggtgtgtattttcgcagattcttttgttgtttcaaaccaagcattgatggttttctgaacggttgcagaccgtttttgagcgtagactccacagcgctcaatggcagatggaatgggcagttttctgaaaaggaagagtcacgccaaacaagggcgaccattaggatcagcaagtacttgcacgcccaaaaggcaaaaagttgtgcaaaacgagtcaactaatattagtccggggcctgttacaagaagccaatcggcgttatcaacgattggtgaaggctcaagccaggaaatggccacacccaaaaggcaacaagttgtgacaaatcaatcaactaatattagtcctgtccctgtcacaaggaggcaattggcattatcaatgctcgatgaaagcacaagtcaggaattggccacaccttcgagggcaaccaaatccccttccaagcctacatcaaggattgcaaggaagatcactccaagaaaattcaaaaagtgaatgtttttgtgtctacaaaactatgatattggatgcttttgtaatcttaattaattagaacggaggcatttggatgatattttggcatatgtatggattgttgacattaaacttgttattgtgcttgctgttatgcttctgtatgggattattgacatttggatgacatttgggcttaatatttaaatcaaacttgctattatgcttgaacgtggtgcacatgtgtgcacgttgctacaattttttaatgcatgagtttgtattttctaccatacctattcttctttttttacattttttattcgtaatgtcttttatactttgggcaaactctgattatactttgggcaaactctgatgtggatgaggaggaccaaacggcgcagctctaatgtgcacaagcagaagggtactttggtcatttgaggtcagagggaaaaaagaaaacagcaaaagtacttaagaaagctgaaaagggtaaattttgaagggaaaaacgtatttggggtagcagccgaatggctaacgtactaagggataaagtctgaaaggctaacgtattgaggggcagcagctgaaaattctctatattaggccccgattctgatgaggcccatatgtcccggcacgtaattacgagcacctcccagtccgacctgttcggatacggagcccacgaggccacgaacgaagccctaatcatccgctccaaactccccgcaccggcagagatcagccgtccacgagagcatcacggctagggtttccgatttcaactaggacccctggatctatgattctatgaaccagaggcgagacgagtggccgcagcatcaggaccgtctccaactcgccagtactcagccgccgcaatcagggacagggagctcgagcgcgcgccccacctgcgccgacgcgatgcgggccaaggttttcgccgtgggctgtgggtggccagaggcgacaatcccagcgaggtggtggcgttgggcgccgcatccgccttggccgtcttgctggccgccgctgcccctgccgcagggggaaggacgacacggaggagtccaggtacaaggccccgactgcaggtccctggttcaagcccaaacgaaacaaaatactcaaaccaactctcgccgccgccgccgatgacatcggaggagcatccctcgtctacgtcctcggacggcagcacgaccatcggctccgacgaacatcttgattccccgccatcaccttcgacgttcttcgactctcctcctgaatccgatgactccgccgcctcctcgctgctctcggacggctcttcagagtccgagcccatcattttcaagaaaccccgcccacccgtgcgctcgtggccggcctccgacgagatcgcgatcctcgagaccgtcgcgtcgcaccggcagaagcacgggcgacttcccctggcagacgacctcgccgccgcggtgcggggccgcctcagcgcgggggaccgcctcagcgccgcgcagatcaccaggcggctgtgcgcgctccgcaaccggtacgacaacactgttatccgcctcaaacgcggcacgatcccggcgaaggacagcgacgtcaccatctacaggctctccaagctcatctgggagggaacgcgcagggggaggatagagaagaagacccgtgtgcccgacgcgcgcaatgacccaagagggttcgacgatctggccgagctgtacccttgcctctccgcggaggtggaggcgattggtgcgaggtgcggctacggggcgctgaagagggcattcgggcgcatcggtgacgacacggcggcgcggctggaggcgaagctgaagaggcagcggatggcggagaccagggcgagcggaaagcttgaccggctgaggtcgagagtcgccaaggcgcttcagggatttaacaagtgaaatggtatagggacattctgttggctgtcatcgtttcatgctacttcaagttgtttcttttcacaatgatggtttgggagtttccatcatctgttatattcatcgttgaaatgtttgttttctagtcagtgggatgcatatatacattagtaacagtcttgttgttccgcagtttccaaaagcccattgtttcgtggtctgcttactagcgcatgcagcaaaatacttgacccagcgatggatccttggaacgacatgagcctactcgtccacatcatcctcgagcttcaagcacggccctaatcttcggatggactgttctggtgcttctagagacgtttaggtatattgtgccctgattgatgagccttgccatttcctacccagaaaaaaaaccaaattagagttgcttaatgattcaaacaaagctgcttaatcacgcaactgatttaatagtagggctttatataacgagaggggagaccatatgtctctaccaagatacttttcgtgtactcatgttacagtggtttggacttcatgctctaacaatattataaagtaagaccactgcttcacctgttttacatctcccctctcgggacaaaagaaattggattcttgtgtttttgcagataggaattaatttaggctccctttggaacaaaggaaagaatatagaaaacctactgcccctttggaaagtagaaatttcataacagtcgtgttgaattgatgattcagttttttttttgtaaaaataggggaaaaaatccatatgagcctccttggaacaaagggttggatttctacatatcctatacggtcttatataatagcttgctgcatagggggttagcagtaattctaatcccatgaacctcacgaaaagttttttttgtgtcactccctctcactgatttcctatttcttttctgttcgaacatatcaaagcggctgtggagaaaccatacttgcttaactcaaac

SEQ ID NO: 47576 - DNA, 3565 bp, Zea Mays
ctgctaccccaaatacgttttttcccttcaaaatttaccctttccagttttcttaagtacttttgctgttttctttttttccctctgacctcaaattaccaaattacccttcatgacctgaacgaagtctcagcattatttttccgtcttctcttaagttctcgtgttctgtctctatccatttgtttactcccgatccccatcagccatggcgataaaaagcacccagagaacaaatgagatagggattaactctgatgtcacatatacagtatgtgttcagtttggtcaattcattgctaaatttgatgacggtagttgtgttcttgtgccacacaaatacgatgaatgggttgtggattatcagcgatgctcactagcaagcttgcaaaaggactttgctgccagggtgaactggggcagcaaccaagaggtgtgttgataggaggttgtacttgtttgctgatgtggtagataaatcggctcagaagagctggttggttctatagttcccgttgttgatgaagacaatttttatgaacacattggtcttcgagccgaggatgagagagtagagaaaggcaaagatagactaccagatgaagttgcatgtgaaggtgcacttgatgttgaaggtgcagccataccttgtactgatacaataccgggtgaggatgctatcttttatgataaggaggaccctccaatgactgttggcagcacatatgcaagcatgaatgagttcagatcagcagtaagacaacatgctataaagggtcagtttgaggtgtggacaaggaaatctgatacatgtaggtttaggggttattgcatagctaagggttgcccatggtttattgtggcaagattaatgcatgatgagaagtctgttagggttactatgaacaattttgatcacttatgtgcttctaccggtagagtgaagaccagaatgacaacataccgttggatagcagagaagtcaatcccatttttgaagaaggatccaaatatgggcgcaaaaaagttacaagaggagctagaggataaatataatgtgaagctaggatactcaacagtgtgggctggtagacagaaggcggtggaacaaatatttggaacatgggaagaaagttttgcagatttgtataggttcaaggcagagattgacgcaaaaatgcctggaagtgttgtcgatttagaggtgcaggaggaagaggatgaccgtttttgagcgtagactccacagcgctcaatggcagatggaatgggcagttttctgaaaagagtcacgccaaacaagggcgaccattaggatcagcaagtacttgcacgcccaaaaggcaaaaagttgtgcaaaacgagtcaactaatattagtccggggcctgttacaagaagccaatcggcgttatcaacgattggtgaaggctcaagccaggaaatggccacacccaaaaggcaacaagttgtgacaaatcaatcaactaatattagtcctgtccctgtcacaaggaggcaattggcattatcaatgctcgatgaaagcacaagtcaggaattggccacaccttcgagggcaaccaaatccccttccaagcctacatcaaggattgcaaggaagatcactccaagaaaattcaaaaagtgaatgtttttgtgtctacaaaactatgatattggatgcttttgtaatcttaattaattagaacggaggcatttggatgatattttggcatatgtatggattgttgacattaaacttgttattgtgcttgctgttatgcttctgtatgggattattgacatttggatgacatttgggcttaatatttaaatcaaacttgctattatgcttgaacgtggtgcacatgtgtgcacgttgctacaattttttaatgcatgagtttgtattttctaccatacctattcttctttttttacattttttattcgtaatgtcttttatactttgggcaaactctgattatactttgggcaaactctgatgtggatgaggaggaccaaacggcgcagctctaatgtgcacaagcagaagggtactttggtcatttgaggtcagagggaaaaaagaaaacagcaaaagtacttaagaaagctgaaaagggtaaattttgaagggaaaaacgtatttggggtagcagccgaatggctaacgtactaagggataaagtctgaaaggctaacgtattgaggggcagcagctgaaaattctctatattaggccccgattctgatgaggcccatatgtcccggcacgtaattacgagcacctcccagtccgacctgttcggatacggagcccacgaggccacgaacgaagccctaatcatccgctccaaactccccgcaccggcagagatcagccgtccacgagagcatcacggctagggtttccgatttcaactaggacccctggatctatgattctatgaaccagaggcgagacgagtggccgcagcatcaggaccgtctccaactcgccagtactcagccgccgcaatcagggacagggagctcgagcgcgcgccccacctgcgccgacgcgatgcgggccaaggtatagggacattctgttggctgtcatcgtttcatgctacttcaagttgtttcttttcacaatgatggtttgggagtttccatcatctgttatattcatcgttgaaatgtttgttttctagtcagtgggatgcatatatacattagtaacagtcttgttgttccgcagtttccaaaagcccattgtttcgtggtctgcttactagcgcatgcagcaaaatacttgacccagcgatggatccttggaacgacatgagcctactcgtccacatcatcctcgagcttcaagcacggccctaatcttcggatggactgttctggtgcttctagagacgtttaggtatattgtgccctgattgatgagccttgccatttcctacccagaaaaaaaaccaaattagagttgcttaatgattcaaacaaagctgcttaatcacgcaactgatttaatagtagggctttatataacgagaggggagaccatatgtctctaccaagatacttttcgtgtactcatgttacagtggtttggacttcatgctctaacaatattataaagtaagaccactgcttcacctgttttacatctcccctctcgggacaaaagaaattggattcttgtgtttttgcagataggaattaatttaggctccctttggaacaaaggaaagaatatagaaaacctactgcccctttggaaagtagaaatttcataacagtcgtgttgaattgatgattcagttttttttttgtaaaaataggggaaaaaatccatatgagcctccttggaacaaagggttggatttctacatatcctatacggtcttatataatagcttgctgcatagggggttagcagtaattctaatcccatgaacctcacgaaaagttttttttgtgtcactccctctcactgatttcctatttcttttctgttcgaacatatcaaagcggctgtggagaaaccatacttgcttaactcaaac

SEQ ID NO: 47577 - DNA, 4680 bp, Zea Mays
ctgctaccccaaatacgttttttcccttcaaaatttaccctttccagttttcttaagtacttttgctgttttctttttttccctctgacctcaaattaccaaattacccttcatgacctgaacgaagtctcagcattatttttccgtcttctcttaagttctcgtgttctgtctctatccatttgtttactcccgatccccatcagccatggcgataaagtgagggttccaggcggccgccgcttcagggagggctcgcggcggagacaggctcggcgctcgcgcggtcggcaggagctcgcagcgggcaagggctggctctcgggcaggaggtgctcgcagcacggtgctggcaggggtggctcgtggcgcaggcaaggagaagctcacgacaggggcggctaagacttcggtgcgggcacagttgcaggttgcagcagccactcgttgaagatgtttccctctgacgtcgacgatgctcactagcaagcttgcaaaaggactttgctgccagggtgaactggggcagcaaccaagaggtgtgttgataggaggttgtacttgtttgctgatgtggtagataaatcggctcaggtgattagtaattctggtctcacagttgttagtcacagtggtgtggaaagtgcagcatatgcatgttcaaatagtcaactagaaagcgcatctaatgtgatatctccaaatgttgatgtaccttttgttgattgggatgctcttgagattgttcctattacagaagagctggttggttctatagttcccgttgttgatgaagacaatttttatgaacacattggtcttcgagccgaggatgagagagtagagaaaggcaaagatagactaccagatgaagttgcatgtgaaggtgcacttgatgttgaaggtgcagccataccttgtactgatacaataccgggtgaggatgctatcttttatgataaggaggaccctccaatgactgttggcagcacatatgcaagcatgaatgagttcagatcagcagtaagacaacatgctataaagggtcagtttgaggtgtggacaaggaaatctgatacatgtaggtttaggggttattgcatagcaacataccgttggatagcagagaagtcaatcccatttttgaagaaggatccaaatatgggcgcaaaaaagttacaagaggagctagaggataaatataatgtgaagctaggatactcaacagtgtgggctggtagacagaaggcggtggaacaaatatttggaacatgggaagaaagttttgcagatttgtataggttcaaggcagagattgacgcaaaaatgcctggaagtgttgtcgatttagaggtgcaggaggaagaggatggtgtgtattttcgcagattcttttgttgtttcaaaccaagcattgatggttttctgaacggttgcagaccgtttttgagcgtagactccacagcgctcaatggcagatggaatgggcagttttctgaaaaggaagagtcacgccaaacaagggcgaccattaggatcagcaagtacttgcacgcccaaaaggcaaaaagttgtgcaaaacgagtcaactaatattagtccggggcctgttacaagaagccaatcggcgttatcaacgattggtgaaggctcaagccaggaaatggccacacccaaaaggcaacaagttgtgacaaatcaatcaactaatattagtcctgtccctgtcacaaggaggcaattggcattatcaatgctcgatgaaagcacaagtcaggaattggccacaccttcgagggcaaccaaatccccttccaagcctacatcaaggattgcaaggaagatcactccaagaaaattcaaaaagtgaatgtttttgtgtctacaaaactatgatattggatgcttttgtaatcttaattaattagaacggaggcatttggatgatattttggcatatgtatggattgttgacattaaacttgttattgtgcttgctgttatgcttctgtatgggattattgacatttggatgacatttgggcttaatatttaaatcaaacttgctattatgcttgaacgtggtgcacatgtgtgcacgttgctacaattttttaatgcatgagtttgtattttctaccatacctattcttctttttttacattttttattcgtaatgtcttttatactttgggcaaactctgattatactttgggcaaactctgatgtggatgaggaggaccaaacggcgcagctctaatgtgcacaagcagaagggtactttggtcatttgaggtcagagggaaaaaagaaaacagcaaaagtacttaagaaagctgaaaagggtaaattttgaagggaaaaacgtatttggggtagcagccgaatggctaacgtactaagggataaagtctgaaaggctaacgtattgaggggcagcagctgaaaattctctatattaggccccgattctgatgaggcccatatgtcccggcacgtaattacgagcacctcccagtccgacctgttcggatacggagcccacgaggccacgaacgaagccctaatcatccgctccaaactccccgcaccggcagagatcagccgtccacgagagcatcacggctagggtttccgatttcaactaggacccctggatctatgattctatgaaccagaggcgagacgagtggccgcagcatcaggaccgtctccaactcgccagtactcagccgccgcaatcagggacagggagctcgagcgcgcgccccacctgcgccgacgcgatgcgggccaaggttcctcttccctcgcctccgctgcgttcttctttccatgatgatgcgatgaaaccgtgtcctaggtagctttgcggagctagtcattttctaggttttcgccgtgggctgtgggtggccagaggcgacaatcccagcgaggtggtggcgttgggcgccgcatccgccttggccgtcttgctggccgccgctgcccctgccgcagggggaaggacgacacggaggagtccaggtacaaggccccgactgcaggtccctggttcaagcccaaacgaaacaaaatactcaaaccaactctcgccgccgccgccgatgacatcggaggagcatccctcgtctacgtcctcggacggcagcacgaccatcggctccgacgaacatcttgattccccgccatcaccttcgacgttcttcgactctcctcctgaatccgatgactccgccgcctcctcgctgctctcggacggctcttcagagtccgagcccatcattttcaagaaaccccgcccacccgtgcgctcgtggccggcctccgacgagatcgcgatcctcgagaccgtcgcgtcgcaccggcagaagcacgggcgacttcccctggcagacgacctcgccgccgcggtgcggggccgcctcagcgcgggggaccgcctcagcgccgcgcagatcaccaggcggctgtgcgcgctccgcaaccgggggaggatagagaagaagacccgtgtgcccgacgcgcgcaatgacccaagagggttcgacgatctggccgagctgtacccttgcctctccgcggaggtggaggcgattggtgcgaggtgcggctacggggcgctgaagagggcattcgggcgcatcggtgacgacacggcggcgcggctggaggcgaagctgaagaggcagcggatggcggagaccagggcgagcggaaagcttgaccggctgaggtcgagagtcgccaaggcgcttcagggatttaacaagtgaaatggtatagggacattctgttggctgtcatcgtttcatgctacttcaagttgtttcttttcacaatgatgttgttccgcagtttccaaaagcccattgtttcgtggtctgcttactagcgcatgcagcaaaatacttgacccagcgatggatccttggaacgacatgagcctactcgtccacatcatcctcgagcttcaagcacggccctaatcttcggatggactgttctggtgcttctagagacgtttaggtatattgtgccctgattgatgagccttgccatttcctacccagaaaaaaaaccaaattagagttgcttaatgattcaaacaaagctgcttaatcacgcaactgatttaatagtagggctttatataacgagaggggagaccatatgtctctaccaagatacttttcgtgtactcatgttacagtggtttggacttcatgctctaacaatattataaagtaagaccactgcttcacctgttttacatctcccctctcgggacaaaagaaattggattcttgtgtttttgcagataggaattaatttaggctccctttggaacaaaggaaagaatatagaaaacctactgcccctttggaaagtagaaatttcataacagtcgtgttgaattgatgattcagttttttttttgtaaaaataggggaaaaaatccatatgagcctccttggaacaaagggttggatttctacatatcctatacggtcttatataatagcttgctgcatagggggttagcagtaattctaatcccatgaacctcacgaaaagttttttttgtgtcactccctctcactgatttcctatttcttttctgttcgaacatatcaaagcggctgtggagaaaccatacttgcttaactcaaac

SEQ ID NO: 47578 - DNA, 4549 bp, Zea Mays
ctgctaccccaaatacgttttttcccttcaaaatttaccctttccagttttcttaagtacttttgctgttttctttttttccctctgacctcaaattaccaaattacccttcatgacctgaacgaagtctcagcattatttttccgtcttctcttaagttctcgtgttctgtctctatccatttgtttactcccgatccccatcagccatggcgataaaaagcacccagagaacaaatgagatagggattaactctgatgtcacatatacagtatgtgttcagtttggtcaattcattgctaaatttgatgacggtagttgtgttcttgtgccacacaaatacgatgaatgggttgtggattatcagcgatgctcactagcaagcttgcaaaaggactttgctgccagggtgaactggggcagcaaccaagaggtagaggtgtcagtatttgacaagagcatcaatctagaaacaaggctggagaatgattccgtattgcgtgcatttttcgacaggtgtgttgataggaggttgtacttgtttgctgatgtggtagataaatcggctcaggtgattagtaattctggtctcacagttgttagtcacagtggtgtggaaagtgcagcatatgcatgttcaaatagtcaactagaaagcgcatctaatgtgatatctccaaatgttgatgtaccttttgttgattgggatgctcttgagattgttcctattacagaagagctggttggttctatagttcccgttgttgatgaagacaatttttatgaacacattggtcttcgagccgaggatgagagagtagagaaaggcaaagatagactaccagatgaagttgcatgtgaaggtgcacttgatgttgaaggtgcagccataccttgtactgatacaataccgggtgaggatgctatcttttatgataaggaggaccctccaatgactgttggcagcacatatgcaagcatgaatgagttcagatcagcagtaagacaacatgctataaagggtcagtttgaggtgtggacaaggaaatctgatacatgtaggtttaggggttattgcatagctaagggttgcccatggtttattgtggcaagattaatgcatgatgagaagtctgttagggttactatgaacaattttgatcacttatgtgcttctaccggtagagtgaagaccagaatgacaacataccgttggatagcagagaagtcaatcccatttttgaagaaggatccaaatatgggcgcaaaaaagttacaagaggagctagaggataaatataatgtgaagctaggatactcaacagtgtgggctggtagacagaaggcggtggaacaaatatttggaacatgggaagaaagttttgcagatttgtataggttcaaggcagagattgacgcaaaaatgcctggaagtgttgtcgatttagaggtgcaggaggaagaggatgaccgtttttgagcgtagactccacagcgctcaatggcagatggaatgggcagttttctgaaaaggaagagtcacgccaaacaagggcgaccattaggatcagcaagtacttgcacgcccaaaaggcaaaaagttgtgcaaaacgagtcaactaatattagtccggggcctgttacaagaagccaatcggcgttatcaacgattggtgaaggctcaagccaggaaatggccacacccaaaaggcaacaagttgtgacaaatcaatcaactaatattagtcctgtccctgtcacaaggaggcaattggcattatcaatgctcgatgaaagcacaagtcaggaattggccacaccttcgagggcaaccaaatccccttccaagcctacatcaaggattgcaaggaagatcactccaagaaaattcaaaaagtgaatgtttttgtgtctacaaaactatgatattggatgcttttgtaatcttaattaattagaacggaggcatttggatgatattttggcatatgtatggattgttgacattaaacttgttattgtgcttgctgttatgcttctgtatgggattattgacatttggatgacatttgggcttaatatttaaatcaaacttgctattatgcttgaacgtggtgcacatgtgtgcacgttgctacaattttttaatgcatgagtttgtattttctaccatacctattcttctttttttacattttttattcgtaatgtcttttatactttgggcaaactctgattatactttgggcaaactctgatgtggatgaggaggaccaaacggcgcagctctaatgtgcacaagcagaagggtactttggtcatttgaggtcagagggaaaaaagaaaacagcaaaagtacttaagaaagctgaaaagggtaaattttgaagggaaaaacgtatttggggtagcagccgaatggctaacgtactaagggataaagtctgaaaggctaacgtattgaggggcagcagctgaaaattctctatattaggccccgattctgatgaggcccatatgtcccggcacgtaattacgagcacctcccagtccgacctgttcggatacggagcccacgaggccacgaacgaagccctaatcatccgctccaaactccccgcaccggcagagatcagccgtccacgagagcatcacggctagggtttccgatttcaactaggacccctggatctatgattctatgaaccagaggcgagacgagtggccgcagcatcaggaccgtctccaactcgccagtactcagccgccgcaatcagggacagggagctcgagcgcgcgccccacctgcgccgacgcgatgcgggccaaggttttcgccgtgggctgtgggtggccagaggcgacaatcccagcgaggtggtggcgttgggcgccgcatccgccttggccgtcttgctggccgccgctgcccctgccgcagggggaaggacgacacggaggagtccaggtacaaggccccgactgcaggtccctggttcaagcccaaacgaaacaaaatactcaaaccaactctcgccgccgccgccgatgacatcggaggagcatccctcgtctacgtcctcggacggcagcacgaccatcggctccgacgaacatcttgattccccgccatcaccttcgacgttcttcgactctcctcctgaatccgatgactccgccgcctcctcgctgctctcggacggctcttcagagtccgagcccatcattttcaagaaaccccgcccacccgtgcgctcgtggccggcctccgacgagatcgcgatcctcgagaccgtcgcgtcgcaccggcagaagcacgggcgacttcccctggcagacgacctcgccgccgcggtgcggggccgcctcagcgcgggggaccgcctcagcgccgcgcagatcaccaggcggctgtgcgcgctccgcaaccgggggaggatagagaagaagacccgtgtgcccgacgcgcgcaatgacccaagagggttcgacgatctggccgagctgtacccttgcctctccgcggaggtggaggcgattggtgcgaggtgcggctacggggcgctgaagagggcattcgggcgcatcggtgacgacacggcggcgcggctggaggcgaagctgaagaggcagcggatggcggagaccagggcgagcggaaagcttgaccggctgaggtcgagagtcgccaaggcgcttcagggatttaacaagtgaaatgttgttccgcagtttccaaaagcccattgtttcgtggtctgcttactagcgcatgcagcaaaatacttgacccagcgatggatccttggaacgacatgagcctactcgtccacatcatcctcgagcttcaagcacggccctaatcttcggatggactgttctggtgcttctagagacgtttaggtatattgtgccctgattgatgagccttgccatttcctacccagaaaaaaaaccaaattagagttgcttaatgattcaaacaaagctgcttaatcacgcaactgatttaatagtagggctttatataacgagaggggagaccatatgtctctaccaagatacttttcgtgtactcatgttacagtggtttggacttcatgctctaacaatattataaagtaagaccactgcttcacctgttttacatctcccctctcgggacaaaagaaattggattcttgtgtttttgcagataggaattaatttaggctccctttggaacaaaggaaagaatatagaaaacctactgcccctttggaaagtagaaatttcataacagtcgtgttgaattgatgattcagttttttttttgtaaaaataggggaaaaaatccatatgagcctccttggaacaaagggttggatttctacatatcctatacggtcttatataatagcttgctgcatagggggttagcagtaattctaatcccatgaacctcacgaaaagttttttttgtgtcactccctctcactgatttcctatttcttttctgttcgaacatatcaaagcggctgtggagaaaccatacttgcttaactcaaac

SEQ ID NO: 47579 - DNA, 4025 bp, Zea Mays
ctgctaccccaaatacgttttttcccttcaaaatttaccctttccagttttcttaagtacttttgctgttttctttttttccctctgacctcaaattaccaaattacccttcatgacctgaacgaagtctcagcattatttttccgtcttctcttaagttctcgtgttctgtctctatccatttgtttactcccgatccccatcagccatggcgataaagtgagggttccaggcggccgccgcttcagggagggctcgcggcggagacaggctcggcgctcgcgcggtcggcaggagctcgcagcgggcaagggctggctctcgggcaggaggtgctcgcagcacggtgctggcaggggtggctcgtggcgcaggcaaggagaagctcacgacaggggcggctaagacttcggtgcgggcacagttgcaggttgcagcagccactcgttgaagatgtttccctctgacgtcgagttactatgaacaattttgatcacttatgtgcttctaccggtagagtgaagaccagaatgacaacataccgttggatagcagagaagtcaatcccatttttgaagaaggatccaaatatgggcgcaaaaaagttacaagaggagctagaggataaatataatgtgaagctaggatactcaacagtgtgggctggtagacagaaggcggtggaacaaatatttggaacatgggaagaaagttttgcagatttgtataggttcaaggcagagattgacgcaaaaatgcctggaagtgttgtcgatttagaggtgcaggaggaagaggatgactccacagcgctcaatggcagatggaatgggcagttttctgaaaaggaagagtcacgccaaacaagggcgaccattaggatcagcaagtacttgcacgcccaaaaggcaaaaagttgtgcaaaacgagtcaactaatattagtccggggcctgttacaagaagccaatcggcgttatcaacgattggtgaaggctcaagccaggaaatggccacacccaaaaggcaacaagttgtgacaaatcaatcaactaatattagtcctgtccctgtcacaaggaggcaattggcattatcaatgctcgatgaaagcacaagtcaggaattggccacaccttcgagggcaaccaaatccccttccaagcctacatcaaggattgcaaggaagatcactccaagaaaattcaaaaagtgaatgtttttgtgtctacaaaactatgatattggatgcttttgtaatcttaattaattagaacggaggcatttggatgatattttggcatatgtatggattgttgacattaaacttgttattgtgcttgctgttatgcttctgtatgggattattgacatttggatgacatttgggcttaatatttaaatcaaacttgctattatgcttgaacgtggtgcacatgtgtgcacgttgctacaattttttaatgcatgagtttgtattttctaccatacctattcttctttttttacattttttattcgtaatgtcttttatactttgggcaaactctgattatactttgggcaaactctgatgtggatgaggaggaccaaacggcgcagctctaatgtgcacaagcagaagggtactttggtcatttgaggtcagagggaaaaaagaaaacagcaaaagtacttaagaaagctgaaaagggtaaattttgaagggaaaaacgtatttggggtagcagccgaatggctaacgtactaagggataaagtctgaaaggctaacgtattgaggggcagcagctgaaaattctctatattaggccccgattctgatgaggcccatatgtcccggcacgtaattacgagcacctcccagtccgacctgttcggatacggagcccacgaggccacgaacgaagccctaatcatccgctccaaactccccgcaccggcagagatcagccgtccacgagagcatcacggctagggtttccgatttcaactaggacccctggatctatgattctatgaaccagaggcgagacgagtggccgcagcatcaggaccgtctccaactcgccagtactcagccgccgcaatcagggacagggagctcgagcgcgcgccccacctgcgccgacgcgatgcgggccaaggttcctcttccctcgcctccgctgcgttcttctttccatgatgatgcgatgaaaccgtgtcctaggtagctttgcggagctagtcattttctaggttttcgccgtgggctgtgggtggccagaggcgacaatcccagcgaggtggtggcgttgggcgccgcatccgccttggccgtcttgctggccgccgctgcccctgccgcagggggaaggacgacacggaggagtccaggtacaaggccccgactgcaggtccctggttcaagcccaaacgaaacaaaatactcaaaccaactctcgccgccgccgccgatgacatcggaggagcatccctcgtctacgtcctcggacggcagcacgaccatcggctccgacgaacatcttgattccccgccatcaccttcgacgttcttcgactctcctcctgaatccgatgactccgccgcctcctcgctgctctcggacggctcttcagagtccgagcccatcattttcaagaaaccccgcccacccgtgcgctcgtggccggcctccgacgagatcgcgatcctcgagaccgtcgcgtcgcaccggcagaagcacgggcgacttcccctggcagacgacctcgccgccgcggtgcggggccgcctcagcgcgggggaccgcctcagcgccgcgcagatcaccaggcggctgtgcgcgctccgcaaccgggggaggatagagaagaagacccgtgtgcccgacgcgcgcaatgacccaagagggttcgacgatctggccgagctgtacccttgcctctccgcggaggtggaggcgattggtgcgaggtgcggctacggggcgctgaagagggcattcgggcgcatcggtgacgacacggcggcgcggctggaggcgaagctgaagaggcagcggatggcggagaccagggcgagcggaaagcttgaccggctgaggtcgagagtcgccaaggcgcttcagggatttaacaagtgaaatggtatagggacattctgttggctgtcatcgtttcatgctacttcaagttgtttcttttcacaatgatgttgttccgcagtttccaaaagcccattgtttcgtggtctgcttactagcgcatgcagcaaaatacttgacccagcgatggatccttggaacgacatgagcctactcgtccacatcatcctcgagcttcaagcacggccctaatcttcggatggactgttctggtgcttctagagacgtttaggtatattgtgccctgattgatgagccttgccatttcctacccagaaaaaaaaccaaattagagttgcttaatgattcaaacaaagctgcttaatcacgcaactgatttaatagtagggctttatataacgagaggggagaccatatgtctctaccaagatacttttcgtgtactcatgttacagtggtttggacttcatgctctaacaatattataaagtaagaccactgcttcacctgttttacatctcccctctcgggacaaaagaaattggattcttgtgtttttgcagataggaattaatttaggctccctttggaacaaaggaaagaatatagaaaacctactgcccctttggaaagtagaaatttcataacagtcgtgttgaattgatgattcagttttttttttgtaaaaataggggaaaaaatccatatgagcctccttggaacaaagggttggatttctacatatcctatacggtcttatataatagcttgctgcatagggggttagcagtaattctaatcccatgaacctcacgaaaagttttttttgtgtcactccctctcactgatttcctatttcttttctgttcgaacatatcaaagcggctgtggagaaaccatacttgcttaactcaaac

SEQ ID NO: 47580 - DNA, 1572 bp, Zea Mays
atcgatcgcaagctaactatgactgcaacgcgtctccggcctcctgctccacttcccagctgtatatatatacacatagctctctttcgtcaccgccaccggccggcaagctagatgcactgaccacggtgacccatctcgatcgatcggcggcttcgctagctagctgggacacagcccccatataaatcatccactcctccgtagcaagcacatcctgaagctgcctttcttttccaataagctaagcagcaggtgcaaagggaattcgagatccagagagctagctgatcgatggatccgaaagttggcgttgctctgaccctctccctcgtcggcgggctaagcacctcccttggtgcactgttggctatcctcaaccatgcgccaaacaacagaacactcgggattctacagggctttgctactgggctcatgctcagcatgtctttctttgacttggcttacgatgctgtcaacgccatcggctttctgagagggaacctctggtttttcgctggagcgctgctgttctcaacaatcgcggacgttttccctgagccagactgcagtgcggcagatgaaaatgggaagcagcagggtggaaaggaactcatgatgagacatcgccgaagagttatatttagcgtcattgtcacagcaattgttgctggtgtgagtttacaaaacttccctgtgggcactgctgcatttcttggaacaacaaagggcttccgtgttggtttgaacttggctcttgctatagcactacactacattccagagggtatttcagtagctctcccagcatactttgccactagcagcaaatggcaagccttcaaattagcaactctatctggttttgcagagccactgggtgtgattattgtggcatacctattcccaagcaatttgaaccctgaaatactggaaggtctacttggattagtgggaggagtcatggcttttctaacattgtatgaaatgctaccactagcatttgaatatgcaggacgcaaggatgctgttaaagcagtatttgttggtatggcctttatgtctatgagcttgtattttctagatgctagcctcccaaaggagatgagcgcttaacataatttgcgcctaaaccaattcatgtgatggtcaagagaatttcatcatgggtgctgcaacaaggtgttagtgggaaggacgtgcatccaactcgagatcatgagagatgagatgtttccagcaacagtacacaatacaacgactgacagatcaagcttttatcaatgtccatgggacatgtgaccaaaatggtttgcaacacaatcatatttatataaaaaagggaagtacaattgtacaaacaggcatatgctaacaacatatcatgtacattttaattagattcggtcatatcatgtacatagagggtaagattaattgtatatactgaataaagtaggcacaaaacactgatacgatgtaaaataatggaaataaacggttgcatacatgatgaatgattgaccgacgtatctgctgaacaaactttaaacgggctatacaagttatgag

SEQ ID NO: 47581 - DNA, 1541 bp, Zea Mays
cggcaagctagatgcactgaccacggtgacccatctcgatcgatcggcggcttcgctagctagctgggacacagcccccatataaatcatccactcctccgtagcaagcacatcctgaagctgcctttcttttccaataagctaagcagcaggtgcaaagggaattcgagatccagagagctagctgatcgatggatccgaaagttggcgttgctctgaccctctccctcgtcggcgggctaagcacctcccttggtgcactgttggctatcctcaaccatgcgccaaacaacagaacactcgggattctacagggctttgctactgggctcatgctcagcatgtctttctttgacttggcttacgatgctgtcaacgccatcggctttctgagagggaacctctggtttttcgctggagcgctgctgttctcaacaatcgcggacgttttccctgagccagactgcagtgcggcagatgaaaatgggaagcagcaggtgtattttattaatgtcaaaactaacatacatagggtttcccgctttatgtcctcgtttaaaaaaaataagggtggaaaggaactcatgatgagacatcgccgaagagttatatttagcgtcattgtcacagcaattgttgctggtgtgagtttacaaaacttccctgtgggcactgctgcatttcttggaacaacaaagggcttccgtgttggtttgaacttggctcttgctatagcactacactacattccagagggtatttcagtagctctcccagcatactttgccactagcagcaaatggcaagccttcaaattagcaactctatctggttttgcagagccactgggtgtgattattgtggcatacctattcccaagcaatttgaaccctgaaatactggaaggtctacttggattagtgggaggagtcatggcttttctaacattgtatgaaatgctaccactagcatttgaatatgcaggacgcaaggatgctgttaaagcagtatttgttggtatggcctttatgtctatgagcttgtattttctagatgctagcctcccaaaggagatgagcgcttaacataatttgcgcctaaaccaattcatgtgatggtcaagagaatttcatcatgggtgctgcaacaaggtgttagtgggaaggacgtgcatccaactcgagatcatgagagatgagatgtttccagcaacagtacacaatacaacgactgacagatcaagcttttatcaatgtccatgggacatgtgaccaaaatggtttgcaacacaatcatatttatataaaaaagggaagtacaattgtacaaacaggcatatgctaacaacatatcatgtacattttaattagattcggtcatatcatgtacatagagggtaagattaattgtatatactgaataaagtaggcacaaaacactgatacgatgtaaaataatggaaataaacggttgcatacatgatgaatgattgaccgacgtatctgctgaacaaactttaaacgggctatacaagttatgag

SEQ ID NO: 47582 - DNA, 1495 bp, Zea Mays
aagctagatgcactgaccacggtgacccatctcgatcgatcggcggcttcgctagctagctgggacacagcccccatataaatcatccactcctccgtagcaagcacatcctgaagctgcctttcttttccaataagctaagcagcaggtgcaaagggaattcgagatccagagagctagctgatcgatggatccgaaagttggcgttgctctgaccctctccctcgtcggcgggctaagcacctcccttggtgcactgttggctatcctcaaccatgcgccaaacaacagaacactcgggattctacagggctttgctactgggctcatgctcagcatgtctttctttgacttggcttacgatgctgtcaacgccatcggctttctgagagggaacctctggtttttcgctggagcgctgctgttctcaacaatcgcggacgttttccctgagccagactgcagtgcggcagatgaaaatgggaagcagcagggtggaaaggaactcatgatgagacatcgccgaagagttatatttagcgtcattgtcacagcaattgttgctggtgtgagtttacaaaacttccctgtgggcactgctgcatttcttggaacaacaaagggcttccgtgttggtttgaacttggctcttgctatagcactacactacattccagaggtaatttactctgcattggcttttgtgaagggtatttcagtagctctcccagcatactttgccactagcagcaaatggcaagccttcaaattagcaactctatctggttttgcagagccactgggtgtgattattgtggcatacctattcccaagcaatttgaaccctgaaatactggaaggtctacttggattagtgggaggagtcatggcttttctaacattgtatgaaatgctaccactagcatttgaatatgcaggacgcaaggatgctgttaaagcagtatttgttggtatggcctttatgtctatgagcttgtattttctagatgctagcctcccaaaggagatgagcgcttaacataatttgcgcctaaaccaattcatgtgatggtcaagagaatttcatcatgggtgctgcaacaaggtgttagtgggaaggacgtgcatccaactcgagatcatgagagatgagatgtttccagcaacagtacacaatacaacgactgacagatcaagcttttatcaatgtccatgggacatgtgaccaaaatggtttgcaacacaatcatatttatataaaaaagggaagtacaattgtacaaacaggcatatgctaacaacatatcatgtacattttaattagattcggtcatatcatgtacatagagggtaagattaattgtatatactgaataaagtaggcacaaaacactgatacgatgtaaaataatggaaataaacggttgcatacatgatgaatgattgaccgacgtatctgctgaacaaactttaaacgggctatacaagttatgag

SEQ ID NO: 47583 - DNA, 1419 bp, Zea Mays
tgaccacggtgacccatctcgatcgatcggcggcttcgctagctagctgggacacagcccccatataaatcatccactcctccgtagcaagcacatcctgaagctgcctttcttttccaataagctaagcagcaggtgcaaagggaattcgagatccagagagctagctgatcgatggatccgaaagttggcgttgctctgaccctctccctcgtcggcgggctaagcacctcccttggtgcactgttggctatcctcaaccatgcgccaaacaacagaacactcgggattctacagggctttgctactgggctcatgctcagcatgtctttctttgacttggcttacgatgctgtcaacgccatcggctttctgagagggaacctctggtttttcgctggagcgctgctgttctcaacaatcgcggacgttttccctgagccagactgcagtgcggcagatgaaaatgggaagcagcagggtggaaaggaactcatgatgagacatcgccgaagagttatatttagcgtcattgtcacagcaattgttgctggtgtgagtttacaaaacttccctgtgggcactgctgcatttcttggaacaacaaagggcttccgtgttggtttgaacttggctcttgctatagcactacactacattccagaggtaatttactctgcattggcttttgtgaagggtatttcagtagctctcccagcatactttgccactagcagcaaatggcaagccttcaaattagcaactctatctggttttgcagagccactgggtgtgattattgtggcatacctattcccaagcaatttgaaccctgaaatactggaaggtctacttggattaggacgcaaggatgctgttaaagcagtatttgttggtatggcctttatgtctatgagcttgtattttctagatgctagcctcccaaaggagatgagcgcttaacataatttgcgcctaaaccaattcatgtgatggtcaagagaatttcatcatgggtgctgcaacaaggtgttagtgggaaggacgtgcatccaactcgagatcatgagagatgagatgtttccagcaacagtacacaatacaacgactgacagatcaagcttttatcaatgtccatgggacatgtgaccaaaatggtttgcaacacaatcatatttatataaaaaagggaagtacaattgtacaaacaggcatatgctaacaacatatcatgtacattttaattagattcggtcatatcatgtacatagagggtaagattaattgtatatactgaataaagtaggcacaaaacactgatacgatgtaaaataatggaaataaacggttgcatacatgatgaatgattgaccgacgtatctgctgaacaaactttaaacgggctatacaagttatgag

SEQ ID NO: 47584 - DNA, 1529 bp, Zea Mays
cgatcttcttccttctggagtcaccaaccgagccagatctccacgactcactttcctgaccccgaccccgacccgtttgccttcctgaatcctgtcgccgtctcgcgtgccttcattcccggcggcgacctcttcgtggggcctttcgccggcaacgagcacccacgcaccaggattcagatcgtgctacggcggctcctgtccatccaccatgattaatttcgtgcctgatcagccgccagggcaaggtgaggctcaccaagtggtattctccgtacacccagaaggagaggaccaaggtcattcgcgagctcagtggactcgttcttacacgagggcccaaactctgcaactttgtcgagtggaggggttacaaggttgtataccggaggtatgctagcctgtatttctgcatgcgcattgatgctgatgacaatgagcttgaagtccttgagatcatccatcatttcgtcgagatactggaccgatattttggcagtgtatgtgagctggatttgatattcaatttccataaggcctactacatactggatgagattctcattgccggtgaacttcaagaatctagcaagaagaatgttgcaagacttattgccacacaggattcgttagtggaggctgctaaagaggaagccagctccataagtaacatcattgctcaagccacaaaataaagttcttcaccagtctaatgcccgacatcttgtcgttgttgttcaagcaactgtaatgcactggactgctagtccatttgctctgctcatgttttctgtggaatacgggtttcaagacttagaaagagcgtgatgtgtaaattccttgatgttgtaggtgtgtgcagagccttatgttggagcacaagcatgggattgattcgttctattctttttcttcccttgagctttaccttgcactgctgctagtctttacaccttacactatcgagagatcggttctggaagtttgcttacactgctaggctctacaccatggaaaagattggtacgtcttgccgggcttagcaatgagctgctcctgttaacaatggctgttatataggttgaggatggaggaggacattgggagaacaaaccctgtagcactccgtgcaggtagagtcgccgtctaaagcactagatgccagctgttcagccgcacggacacggaggagggacatggaggagacaaggatgaccaagatggttgcagaagagcggagcgatttacttagtcttcgaaggcatcgtatggatcatcttcaggacggggatttgtaagatggtctcgatcggatgctggatctcaaggtgggactgcagagtgactttggcgaagaagctgataacaaccacctacgcatcacatatgtgcaaggacgataccaagcctaagtcattccaagcttctaggttgtaaaaggacgctacgcattatatatgtgctacgcatcagatatgtgcaaggacaatactcttgcaatgaaagatataatgtcggcatccatgatg

SEQ ID NO: 47585 - DNA, 1315 bp, Zea Mays
accgagccagatctccacgactcactttcctgaccccgaccccgacccgtttgccttcctgaatcctgtcgccgtctcgcgtgccttcattcccggcggcgacctcttcgtggggcctttcgccggcaacgagcacccacgcaccaggattcagatcgtgctacggcggctcctgtccatccaccatgattaatttcgtgcctgatcagccgccagggcaaggtgaggctcaccaagtggtattctccgtacacccagaaggagaggaccaaggtcattcgcgagctcagtggactcgttcttacacgagggcccaaactctgcaactttgtcgagtggaggggttacaaggtatgctagcctgtatttctgcatgcgcattgatgctgatgacaatgagcttgaagtccttgagatcatccatcatttcgtcgagatactggaccgatattttggcagtgtatgtgagctggatttgatattcaatttccataaggcctactacatactggatgagattctcattgccggtgaacttcaagaatctagcaagaagaatgttgcaagacttattgccacacaggattcgttagtggaggctgctaaagaggaagccagctccataagtaacatcattgctcaagccacaaaataaagttcttcaccagtctaatgcccgacatcttgtcgttgttgttcaagcaactgtgtgtgcagagccttatgttggagcacaagcatgggattgattcgttctattctttttcttcccttgagctttaccttgcactgctgctagtctttacaccttacactatcgagagatcggttctggaagtttgcttacactgctaggctctacaccatggaaaagattggtacgtcttgccgggcttagcaatgagctgctcctgttaacaatggctgttatataggttgaggatggaggaggacattgggagaacaaaccctgtagcactccgtgcaggtagagtcgccgtctaaagcactagatgccagctgttcagccgcacggacacggaggagggacatggaggagacaaggttggtgcacgcgaattctggaagcaatggcggacaaggaatcctgttttccgctccaattgcaacgaatcttgttttctatccatagattagatatccgtaccctgcttcgctatttctctccaccccttagggcatgtacaaccttaagactctgatttgattttcaaaatacaagagacaactaagaaaatgtatggtccaacctgagactctagataatacataataaatgcagctaagagaatat

SEQ ID NO: 47586 - DNA, 1288 bp, Zea Mays
accgagccagatctccacgactcactttcctgaccccgaccccgacccgtttgccttcctgaatcctgtcgccgtctcgcgtgccttcattcccggcggcgacctcttcgtggggcctttcgccggcaacgagcacccacgcaccagattaatttcgtgcctgatcagccgccagggcaaggtgaggctcaccaagtggtattctccgtacacccagaaggagaggaccaaggtcattcgcgagctcagtggactcgttcttacacgagggcccaaactctgcaactttgtcgagtggaggggttacaaggttgtataccggaggtatgctagcctgtatttctgcatgcgcattgatgctgatgacaatgagcttgaagtccttgagatcatccatcatttcgtcgagatactggaccgatattttggcagtgtatgtgagctggatttgatattcaatttccataaggcctactacatactggatgagattctcattgccggtgaacttcaagaatctagcaagaagaatgttgcaagacttattgccacacaggattcgttagtggaggctgctaaagaggaagccagctccataagtaacatcattgctcaagccacaaaataaagttcttcaccagtctaatgcccgacatcttgtcgttgttgttcaagcaactgtgtgtgcagagccttatgttggagcacaagcatgggattgattcgttctattctttttcttcccttgagctttaccttgcactgctgctagtctttacaccttacactatcgagagatcggttctggaagtttgcttacactgctaggctctacaccatggaaaagattggtacgtcttgccgggcttagcaatgagctgctcctgttaacaatggctgttatataggttgaggatggaggaggacattgggagaacaaaccctgtagcactccgtgcaggtagagtcgccgtctaaagcactagatgccagctgttcagccgcacggacacggaggagggacatggaggagacaaggttggtgcacgcgaattctggaagcaatggcggacaaggaatcctgttttccgctccaattgcaacgaatcttgttttctatccatagattagatatccgtaccctgcttcgctatttctctccaccccttagggcatgtacaaccttaagactctgatttgattttcaaaatacaagagacaactaagaaaatgtatggtccaacctgagactctagataatacataataaatgcagctaagagaatat

SEQ ID NO: 47587 - DNA, 766 bp, Zea Mays
cgagaacctcgcagtccggcctgttcggatacggagcccacgaacgaagccctaatcatccgctccaactccccgcactggcagatctcagccgtccacgagagcatcacggctagggtttccgatttcaactaggacccctggatctatatatgaaccagaggcgagaggggtggccgcagaatcaggtccgtctccaactcactagtactcagccgccgcaatcaggggggcaggtagctcgagcgcgcgctccacctgcgccgacgcgatgcgggccaagtggaagaagaagaggatgcggaggctcaagaggaagcgccggaaaatgaggcagagatctaagtaggcgcatcttgtgaccgaggatggcgagcttctcctgcaccatggctgtgacgcgttgggatgattgtctccctttgtagacgtgctttgctgtagacgtaggcgatgtaaaccgtcctttttgattaattctagtatgttctgagactgggtttatattgtaatttgaggataattatatgatgctctaagtttattgatattcctgtcactcgaatatgttagatgtcctttcttcagcgttggtcagttctgctctccccatcttttggttcctactgttctcttggctttgtttcctgctcatctatgctctcctgtcaggttctctatgcgccctgccattttgaaattcaaattcagttctgttctttaggtgattgaatttgagaaatttacactcgtagttttggttggc

SEQ ID NO: 47588 - DNA, 1607 bp, Zea Mays
gcaatgcagctgcaccactgccttatccgctggggcccctcccctacccatgtctttggtcctagcagccccctgcagggaagcatttcaactgaactcatcaattccttcatcatccatggaggccatgcccaggccaagtgtagctccctcgttgcagttgcaggcccgtccgtgcccgaggtggccgcgccggaagcactgcccaccgtcctccgtggcaagccggagggttgcttgctcggcctcggcggccgacgccgacgtggtcgacctcttcgacgccgctaagctaactgtggacaagttcgtgacgagcggcatggtggtggggctcggctccggccctgcgtccgccctggccatccagtacctcggcacgcgcctccggcggggctctctcgcgggcatcaccgcagtgacctcgtccgtgctcagtgcgagcgaggcagacaaggcagggatacgggctaacagctaccaggaaggcacccagattgattttgctttcactgatgctgaagcgatcgaggagggcacgctggccgcagtcatcgggcggcggaagaccgagagcggagagccctctttcatggcggagaaggcgatggctaaatcagctcacaagcttgccttcatcactggaaacgacaagtacgtgacgacgggcgtcgagggttctattccggtcctgattaaaagtgccattttcaggggaactggatagacactgctgaagagatcgacgatttgtttctaggagacgcagaggtttggaggaggccgtcgtttggaactgctggtccacttgggggtgaccacccactggttaccaaggagggccatcacgtgctcgatgttatcttcacaacaccaatccaagatcttggtcaggttgcagagaagttggacaaagttgatggcgttgtggatcacgggattatttgcagcaaccaaccatacgctgtcattgcatccaagggggaagtgcaggtcctggacgagaaatcttcggtgatacagtagcggtgaaacctttttggctgctctgcagattgttgcgcttttcggaacaggagtctactaccagctagctggaaaaaaaatgccatgagttaatcatgtacaaccagagctcttgttcaccactggacaattcagccggcatcagttgaagtctgtgtttcgcataaacttttttgaactggtactcagttaaccagattcgatgaatgtgaggcagagctacagcttcaactactcttctagtgtttcaggagttcgtctcttttcatatgattggttgcccgcggcatctcatctcctatatgtttggttgcttgtgtttggcgggtgattaaattagcacatgccttcataacgtttattagtgtttggaaagataaaagtaaccgcgcataggcgctggaatatatggattagatatgggccgtcggatgaaagatcgaggttgcctcgagagccaatgaaccgttagccgttgcataggaattttgtaggatttgtaagctgtagccttagcaaaatttactgcatgtccatttcgaacaatgaattaaaccctatgaaattactttggattacta

SEQ ID NO: 47589 - DNA, 1574 bp, Zea Mays
gcagctgcaccactgccttatccgctggggcccctcccctacccatgtctttggtcctagcagccccctgcagggaagcatttcaactgaactcatcaattccttcatcatccatggaggccatgcccaggccaagtgtagctccctcgttgcagttgcaggcccgtccgtgcccgaggtggccgcgccggaagcactgcccaccgtcctccgtggcaagccggagggttgcttgctcggcctcggcggccgacgccgacgtggtcgacctcttcgacgccgctaagctaactgtggacaagttcgtgacgagcggcatggtggtggggctcggctccggccctgcgtccgccctggccatccagtacctcggcacgcgcctccggcggggctctctcgcgggcatcaccgcagtgacctcgtccgtgctcagtgcgagcgaggcagacaaggcagggatacgggctaacagctaccaggaaggcacccagcgatcgaggagggcacgctggccgcagtcatcgggcggcggaagaccgagagcggagagccctctttcatggcggagaaggcgatggctaaatcagctcacaagcttgccttcatcactggaaacgacaagtacgtgacgacgggcgtcgagggttctattccggtcctgattaaaagtgccattttcaggggaactggatagacactgctgaagagatcgacgatttgtttctaggagacgcagaggtttggaggaggccgtcgtttggaactgctggtccacttgggggtgaccacccactggttaccaaggagggccatcacgtgctcgatgttatcttcacaacaccaatccaagatcttggtcaggttgcagagaagttggacaaagttgatggcgttgtggatcacgggattatttgcagcaaccaaccatacgctgtcattgcatccaagggggaagtgcaggtcctggacgagaaatcttcggtgatacagtagcggtgaaacctttttggctgctctgcagattgttgcgcttttcggaacaggagtctactaccagctagctggaaaaaaaatgccatgagttaatcatgtacaaccagagctcttgttcaccactggacaattcagccggcatcagttgaagtctgtgtttcgcataaacttttttgaactggtactcagttaaccagattcgatgaatgtgaggcagagctacagcttcaactactcttctagtgtttcaggagttcgtctcttttcatatgattggttgcccgcggcatctcatctcctatatgtttggttgcttgtgtttggcgggtgattaaattagcacatgccttcataacgtttattagtgtttggaaagataaaagtaaccgcgcataggcgctggaatatatggattagatatgggccgtcggatgaaagatcgaggttgcctcgagagccaatgaaccgttagccgttgcataggaattttgtaggatttgtaagctgtagccttagcaaaatttactgcatgtccatttcgaacaatgaattaaaccctatgaaattactttggattacta

SEQ ID NO: 47590 - DNA, 1596 bp, Zea Mays
cactgccttatccgctggggcccctcccctacccatgtctttggtcctagcagccccctgcagggaagcatttcaactgaactcatcaattccttcatcatccatggaggccatgcccaggccaagtgtagctccctcgttgcagttgcaggcccgtccgtgcccgaggtggccgcgccggaagcactgcccaccgtcctccgtggcaagccggagggttgcttgctcggcctcggcggccgacgccgacgtggtcgacctcttcgacgccgctaagctaactgtggacaagttcgtgacgagcggcatggtggtggggctcggctccggccctgcgtccgccctggccatccagtacctcggcacgcgcctccggcggggctctctcgcgggcatcaccgcagtgacctcccaggtccgtgctcagtgcgagcgaggcagacaaggcagggatacgggctaacagctaccaggaaggcacccagattgattttgctttcactgatgctgaagcgatcgaggagggcacgctggccgcagtcatcgggcggcggaagaccgagagcggagagccctctttcatggcggagaaggcgatggctaaatcagctcacaagcttgccttcatcactggaaacgacaagtacgtgacgacgggcgtcgagggttctattccggtcctgattaaaagtgccattttcaggggaactggatagacactgctgaagagatcgacgatttgtttctaggagacgcagaggtttggaggaggccgtcgtttggaactgctggtccacttgggggtgaccacccactggttaccaaggagggccatcacgtgctcgatgttatcttcacaacaccaatccaagatcttggtcaggttgcagagaagttggacaaagttgatggcgttgtggatcacgggattatttgcagcaaccaaccatacgctgtcattgcatccaagggggaagtgcaggtcctggacgagaaatcttcggtgatacagtagcggtgaaacctttttggctgctctgcagattgttgcgcttttcggaacaggagtctactaccagctagctggaaaaaaaatgccatgagttaatcatgtacaaccagagctcttgttcaccactggacaattcagccggcatcagttgaagtctgtgtttcgcataaacttttttgaactggtactcagttaaccagattcgatgaatgtgaggcagagctacagcttcaactactcttctagtgtttcaggagttcgtctcttttcatatgattggttgcccgcggcatctcatctcctatatgtttggttgcttgtgtttggcgggtgattaaattagcacatgccttcataacgtttattagtgtttggaaagataaaagtaaccgcgcataggcgctggaatatatggattagatatgggccgtcggatgaaagatcgaggttgcctcgagagccaatgaaccgttagccgttgcataggaattttgtaggatttgtaagctgtagccttagcaaaatttactgcatgtccatttcgaacaatgaattaaaccctatgaaattactttggattacta

SEQ ID NO: 47591 - DNA, 1530 bp, Zea Mays
ctcccctacccatgtctttggtcctagcagccccctgcagggaagcatttcaactgaactcatcaattccttcatcatccatggaggccatgcccaggccaagtgtagctccctcgttgcagttgcaggcccgtccgtgcccgaggtggccgcgccggaagcactgcccaccgtcctccgtggcaagccggagggttgcttgctcggcctcggcggccgacgccgacgtggtcgacctcttcgacgccgctaagctaactgtggacaagttcgtgacgagcggcatggtggtggggctcggctccggccctgcgtccgccctggccatccagtacctcggcacgcgcctccggcggggctctctcgcgggcatcaccgcagtgacctcgtccgtgctcagtgcgagcgaggcagacaaggcagggatacgggctaacagctaccaggaaggcacccagcgatcgaggagggcacgctggccgcagtcatcgggcggcggaagaccgagagcggagagccctctttcatggcggagaaggcgatggctaaatcagctcacaagcttgccttcatcactggaaacgacaagtacgtgacgacgggcgtcgagggttctattccggtcctgattaaaagtgggaactggatagacactgctgaagagatcgacgatttgtttctaggagacgcagaggtttggaggaggccgtcgtttggaactgctggtccacttgggggtgaccacccactggttaccaaggagggccatcacgtgctcgatgttatcttcacaacaccaatccaagatcttggtcaggttgcagagaagttggacaaagttgatggcgttgtggatcacgggattatttgcagcaaccaaccatacgctgtcattgcatccaagggggaagtgcaggtcctggacgagaaatcttcggtgatacagtagcggtgaaacctttttggctgctctgcagattgttgcgcttttcggaacaggagtctactaccagctagctggaaaaaaaatgccatgagttaatcatgtacaaccagagctcttgttcaccactggacaattcagccggcatcagttgaagtctgtgtttcgcataaacttttttgaactggtactcagttaaccagattcgatgaatgtgaggcagagctacagcttcaactactcttctagtgtttcaggagttcgtctcttttcatatgattggttgcccgcggcatctcatctcctatatgtttggttgcttgtgtttggcgggtgattaaattagcacatgccttcataacgtttattagtgtttggaaagataaaagtaaccgcgcataggcgctggaatatatggattagatatgggccgtcggatgaaagatcgaggttgcctcgagagccaatgaaccgttagccgttgcataggaattttgtaggatttgtaagctgtagccttagcaaaatttactgcatgtccatttcgaacaatgaattaaaccctatgaaattactttggattacta

SEQ ID NO: 47592 - DNA, 1439 bp, Zea Mays
tagcagccccctgcagggaagcatttcaactgaactcatcaattccttcatcatccatggaggccatgcccaggccaagtgtagctccctcgttgcagttgcaggcccgtccgtgcccgaggtggccgcgccggaagcactgcccaccgtcctccgtggcaagccggagggttgcttgctcggcctcggcggccgacgccgacgtggtcgacctcttcgacgccgctaagctaactgtggacaagttcgtgacgagcggcatggtggtggggctcggctccggccctgcgtccgccctggccatccagtacctcggcacgcgcctccggcggggctctctcgcgggcatcaccgcagtgacctcccaggtccgtgctcagtgcgagcgaggcagacaaggcagggatacgggctaacagctaccaggaaggcacccagattgattttgctttcactgatgctgaagcgatcgaggagggcacgctggccgcagtcatcgggcggcggaagaccgagagcggagagccctctttcatggcggagaaggggaactggatagacactgctgaagagatcgacgatttgtttctaggagacgcagaggtttggaggaggccgtcgtttggaactgctggtccacttgggggtgaccacccactggttaccaaggagggccatcacgtgctcgatgttatcttcacaacaccaatccaagatcttggtcaggttgcagagaagttggacaaagttgatggcgttgtggatcacgggattatttgcagcaaccaaccatacgctgtcattgcatccaagggggaagtgcaggtcctggacgagaaatcttcggtgatacagtagcggtgaaacctttttggctgctctgcagattgttgcgcttttcggaacaggagtctactaccagctagctggaaaaaaaatgccatgagttaatcatgtacaaccagagctcttgttcaccactggacaattcagccggcatcagttgaagtctgtgtttcgcataaacttttttgaactggtactcagttaaccagattcgatgaatgtgaggcagagctacagcttcaactactcttctagtgtttcaggagttcgtctcttttcatatgattggttgcccgcggcatctcatctcctatatgtttggttgcttgtgtttggcgggtgattaaattagcacatgccttcataacgtttattagtgtttggaaagataaaagtaaccgcgcataggcgctggaatatatggattagatatgggccgtcggatgaaagatcgaggttgcctcgagagccaatgaaccgttagccgttgcataggaattttgtaggatttgtaagctgtagccttagcaaaatttactgcatgtccatttcgaacaatgaattaaaccctatgaaattactttggattacta

SEQ ID NO: 47593 - DNA, 1534 bp, Zea Mays
agccccctgcagggaagcatttcaactgaactcatcaattccttcatcatccatggaggccatgcccaggccaagtgtagctccctcgttgcagttgcaggcccgtccgtgcccgaggtggccgcgccggaagcactgcccaccgtcctccgtggcaagccggagggttgcttgctcggcctcggcggccgacgccgacgtggtcgacctcttcgacgccgctaagctaactgtggacaagttcgtgacgagcggcatggtggtggggctcggctccggccctgcgtccgccctggccatccagtacctcggcacgcgcctccggcggggctctctcgcgggcatcaccgcagtgacctcccaggtccgtgctcagtgcgagcgaggcagacaaggcagggatacgggctaacagctaccaggaaggcacccagcgatcgaggagggcacgctggccgcagtcatcgggcggcggaagaccgagagcggagagccctctttcatggcggagaagccagcaaccatggcgtctgtctgtacaggcgatggctaaatcagctcacaagcttgccttcatcactggaaacgacaagtacgtgacgacgggcgtcgagggttctattccggtcctgattaaaagtgggaactggatagacactgctgaagagatcgacgatttgtttctaggagacgcagaggtttggaggaggccgtcgtttggaactgctggtccacttgggggtgaccacccactggttaccaaggagggccatcacgtgctcgatgttatcttcacaacaccaatccaagatcttggtcaggttgcagagaagttggacaaagttgatggcgttgtggatcacgggattatttgcagcaaccaaccatacgctgtcattgcatccaagggggaagtgcaggtcctggacgagaaatcttcggtgatacagtagcggtgaaacctttttggctgctctgcagattgttgcgcttttcggaacaggagtctactaccagctagctggaaaaaaaatgccatgagttaatcatgtacaaccagagctcttgttcaccactggacaattcagccggcatcagttgaagtctgtgtttcgcataaacttttttgaactggtactcagttaaccagattcgatgaatgtgaggcagagctacagcttcaactactcttctagtgtttcaggagttcgtctcttttcatatgattggttgcccgcggcatctcatctcctatatgtttggttgcttgtgtttggcgggtgattaaattagcacatgccttcataacgtttattagtgtttggaaagataaaagtaaccgcgcataggcgctggaatatatggattagatatgggccgtcggatgaaagatcgaggttgcctcgagagccaatgaaccgttagccgttgcataggaattttgtaggatttgtaagctgtagccttagcaaaatttactgcatgtccatttcgaacaatgaattaaaccctatgaaattactttggattacta

SEQ ID NO: 47594 - DNA, 1526 bp, Zea Mays
agcatttcaactgaactcatcaattccttcatcatccatggaggccatgcccaggccaagtgtagctccctcgttgcagttgcaggcccgtccgtgcccgaggtggccgcgccggaagcactgcccaccgtcctccgtggcaagccggagggttgcttgctcggcctcggcggccgacgccgacgtggtcgacctcttcgacgccgctaagctaactgtggacaagttcgtgacgagcggcatggtggtggggctcggctccggccctgcgtccgccctggccatccagtacctcggcacgcgcctccggcggggctctctcgcgggcatcaccgcagtgacctcgtccgtgctcagtgcgagcgaggcagacaaggcagggatacgggctaacagctaccaggaaggcacccagcgatcgaggagggcacgctggccgcagtcatcgggcggcggaagaccgagagcggagagccctctttcatggcggagaagccagcaaccatggcgtctgtctgtacaggcgatggctaaatcagctcacaagcttgccttcatcactggaaacgacaagtacgtgacgacgggcgtcgagggttctattccggtcctgattaaaagtgccattttcaggggaactggatagacactgctgaagagatcgacgatttgtttctaggagacgcagaggtttggaggaggccgtcgtttggaactgctggtccacttgggggtgaccacccactggttaccaaggagggccatcacgtgctcgatgttatcttcacaacaccaatccaagatcttggtcaggttgcagagaagttggacaaagttgatggcgttgtggatcacgggattatttgcagcaaccaaccatacgctgtcattgcatccaagggggaagtgcaggtcctggacgagaaatcttcggtgatacagtagcggtgaaacctttttggctgctctgcagattgttgcgcttttcggaacaggagtctactaccagctagctggaaaaaaaatgccatgagttaatcatgtacaaccagagctcttgttcaccactggacaattcagccggcatcagttgaagtctgtgtttcgcataaacttttttgaactggtactcagttaaccagattcgatgaatgtgaggcagagctacagcttcaactactcttctagtgtttcaggagttcgtctcttttcatatgattggttgcccgcggcatctcatctcctatatgtttggttgcttgtgtttggcgggtgattaaattagcacatgccttcataacgtttattagtgtttggaaagataaaagtaaccgcgcataggcgctggaatatatggattagatatgggccgtcggatgaaagatcgaggttgcctcgagagccaatgaaccgttagccgttgcataggaattttgtaggatttgtaagctgtagccttagcaaaatttactgcatgtccatttcgaacaatgaattaaaccctatgaaattactttggattacta

SEQ ID NO: 47595 - DNA, 1470 bp, Zea Mays
aattccttcatcatccatggaggccatgcccaggccaagtgtagctccctcgttgcagttgcaggcccgtccgtgcccgaggtggccgcgccggaagcactgcccaccgtcctccgtggcaagccggagggttgcttgctcggcctcggcggccgacgccgacgtggtcgacctcttcgacgccgctaagctaactgtggacaagttcgtgacgagcggcatggtggtggggctcggctccggccctgcgtccgccctggccatccagtacctcggcacgcgcctccggcggggctctctcgcgggcatcaccgcagtgacctcccaggtccgtgctcagtgcgagcgaggcagacaaggcagggatacgggctaacagctaccaggaaggcacccagcgatcgaggagggcacgctggccgcagtcatcgggcggcggaagaccgagagcggagagccctctttcatggcggagaaggcgatggctaaatcagctcacaagcttgccttcatcactggaaacgacaagtacgtgacgacgggcgtcgagggttctattccggtcctgattaaaagtgggaactggatagacactgctgaagagatcgacgatttgtttctaggagacgcagaggtttggaggaggccgtcgtttggaactgctggtccacttgggggtgaccacccactggttaccaaggagggccatcacgtgctcgatgttatcttcacaacaccaatccaagatcttggtcaggttgcagagaagttggacaaagttgatggcgttgtggatcacgggattatttgcagcaaccaaccatacgctgtcattgcatccaagggggaagtgcaggtcctggacgagaaatcttcggtgatacagtagcggtgaaacctttttggctgctctgcagattgttgcgcttttcggaacaggagtctactaccagctagctggaaaaaaaatgccatgagttaatcatgtacaaccagagctcttgttcaccactggacaattcagccggcatcagttgaagtctgtgtttcgcataaacttttttgaactggtactcagttaaccagattcgatgaatgtgaggcagagctacagcttcaactactcttctagtgtttcaggagttcgtctcttttcatatgattggttgcccgcggcatctcatctcctatatgtttggttgcttgtgtttggcgggtgattaaattagcacatgccttcataacgtttattagtgtttggaaagataaaagtaaccgcgcataggcgctggaatatatggattagatatgggccgtcggatgaaagatcgaggttgcctcgagagccaatgaaccgttagccgttgcataggaattttgtaggatttgtaagctgtagccttagcaaaatttactgcatgtccatttcgaacaatgaattaaaccctatgaaattactttggattacta

SEQ ID NO: 47596 - DNA, 1520 bp, Zea Mays
aattccttcatcatccatggaggccatgcccaggccaagtgtagctccctcgttgcagttgcaggcccgtccgtgcccgaggtggccgcgccggaagcactgcccaccgtcctccgtggcaagccggagggttgcttgctcggcctcggcggccgacgccgacgtggtcgacctcttcgacgccgctaagctaactgtggacaagttcgtgacgagcggcatggtggtggggctcggctccggccctgcgtccgccctggccatccagtacctcggcacgcgcctccggcggggctctctcgcgggcatcaccgcagtgacctcctagcttcctgggattgaccagccaggtccgtgctcagtgcgagcgaggcagacaaggcagggatacgggctaacagctaccaggaaggcacccagcgatcgaggagggcacgctggccgcagtcatcgggcggcggaagaccgagagcggagagccctctttcatggcggagaagccagcaaccatggcgtctgtctgtacaggcgatggctaaatcagctcacaagcttgccttcatcactggaaacgacaagtacgtgacgacgggcgtcgagggttctattccggtcctgattaaaagtgggaactggatagacactgctgaagagatcgacgatttgtttctaggagacgcagaggtttggaggaggccgtcgtttggaactgctggtccacttgggggtgaccacccactggttaccaaggagggccatcacgtgctcgatgttatcttcacaacaccaatccaagatcttggtcaggttgcagagaagttggacaaagttgatggcgttgtggatcacgggattatttgcagcaaccaaccatacgctgtcattgcatccaagggggaagtgcaggtcctggacgagaaatcttcggtgatacagtagcggtgaaacctttttggctgctctgcagattgttgcgcttttcggaacaggagtctactaccagctagctggaaaaaaaatgccatgagttaatcatgtacaaccagagctcttgttcaccactggacaattcagccggcatcagttgaagtctgtgtttcgcataaacttttttgaactggtactcagttaaccagattcgatgaatgtgaggcagagctacagcttcaactactcttctagtgtttcaggagttcgtctcttttcatatgattggttgcccgcggcatctcatctcctatatgtttggttgcttgtgtttggcgggtgattaaattagcacatgccttcataacgtttattagtgtttggaaagataaaagtaaccgcgcataggcgctggaatatatggattagatatgggccgtcggatgaaagatcgaggttgcctcgagagccaatgaaccgttagccgttgcataggaattttgtaggatttgtaagctgtagccttagcaaaatttactgcatgtccatttcgaacaatgaattaaaccctatgaaattactttggattacta

SEQ ID NO: 47597 - DNA, 1374 bp, Zea Mays
  misc_feature (1373)..(1374): n is a, c, g, or t
aacaccactccactgactccgccctggctctctctccttccatcggcctccgcggctccgccccctcccccttccattttaaatttcaaacccctcccacctgcttcctcctcctctcccctgctgccacgaggcgcggctcagctcctcctcgaagcgggcggggaatccaggccgcgcggcggcggggcggaggaggaggaggagcgggggatgatggggtgcctcttcggctgcttccgcgcgtccggcgacggcggcgatgcgaagggcgccggagaccgcaacacgtccctggcccccgcgacgacgacgacgatccaacaggatggtacgggcaggaggatcaggccaccgtcgaggaacgcgctctccgccgtgttccagcgagaagatgagggatcgagggcggcgcaggcggcgagctcgtgggcggaacagactggtgagagcaagaggatggatcaggagcttgagccccagaccattatccaaaaaaactgtggtgcattgctgcaaactacaaacaacatccaaagtgtgctcagagatgcagattcagttcatcagaaggaaacacattcaggatgtcttcctgttatgtctgatgatgtacatttcatggaagcgccaaaggttgagaactgtgaaactcctccaaggtctcatcagagctccactgtaccagatgcaacgagggtgaagaacaacaacaagctctggatcttgctgaggattttgaagaatgtggggtttcaaaagaagatttcttcccccctgaaaaattagaggatccaaagtgtgcaaagaatgaccatgtggtctccatggaaatttcaatatccgatgaatgttcccttttccagagctctgagggttctgtatcaccttctaacaagataagagggagcatgaatacaacatctacggagaagtcaccgaaaactgaggcaactattcatgccaccagaaagaagttactgaagagcaatacttcagaactggagctcccaagcttagctcaatggttgaagcctccaaatcctaagaaagcattcagagatgaggctgtgacaggagacagatctcattcagctaagagttcagatgaggataggcctattattggaatggttgcagcacactggaaagataaagagccagcaaatttcacctctaaatggtgggatggaaatggcattcccaattcaacaaataagtacaaagaagaccaaaaggtgagctggcatgcaacaccatttgaggagaggcttgagaaggctttatctgaagagaagtcgctctctgaaaggaactgctcgagtggaaaaacatctcagtttttaggagtggaaggcgaggagagtgatacnn

SEQ ID NO: 47598 - DNA, 1026 bp, Zea Mays
agccagcccaccgtcaacccgcatctgcagcacgtctcctccttttcctcgtccacccggccatctccgcatccactaccgcaggccgcagcccagcaccggccgctctacgccggcacgtcctcgtttctgtccgaggtcatcgcctccgcaacttcgtggccggtgaggtcgcaccaccatggcgtcgctcctagcccggcaggcagcgcaggcgctccgcgcgaggcaaacggcgcagctcgggccggccgcgtcggcgatgcaagggcacctccgtacctacatgaacgcggggattcccaagcggttcaaagaggatgaggagaaagaacagcttgcaaaagatctcgcaaaagattggaatgctgtgtttgaaaggagcatcaatacattgtttttgactgaaatggtccgtggcttgatgctaactctcaagtacttctttgatagaaatgtcacaattaactatccgtttgagaagggtcctctgagcccccgcttccgtggtgagcacgctctcagacgttatgaatctggggaagagcgctgcattgcttgtaaactatgcgaagctatatgcccagcgcaggcaattacaattgaggctgaagaacgtgaagatggcagtcgccgaaccacaagatatgatattgacatgaccaaatgcatttactgtgggttctgtcaagaggcttgcccagtcgatgctattgttgaggggcctaactttgagtttgccactgagacacacgaggaactactgtacgacaaggagaaattgcttgagaatggtgatcgctgggagactgagattgctgagaacttgagatctgagagcctctatcgctgaatctgtcttccattatggttgataaactgggttcttccattttccatattttgctcaactagctgatgaataagcaaacgatgtatcataacttaggctcgtgggttgtgcttaccctagcatcagagggtaggctagcgggggactgctggtgggaggtgcagcaagccagt

SEQ ID NO: 47599 - DNA, 1156 bp, Zea Mays
cgtcaacccgcatctgcagcacgtctcctccttttcctcgtccacccggccatctccgcatccactaccgcaggccgcagcccagcaccggccgctctacgccggcacgtcctcgtttctgtccgaggtcatcgcctccgcaacttcgtggccggtgaggtcgcaccaccatggcgtcgctcctagcccggcaggcagcgcaggcgctccgcgcgaggcaaacggcgcagctcgggccggccgcgtcggcgatgcaagggcacctccgtacctacatgaacgcggggattcccaagcggttcaaagaggatgaggagaaagaacagcttgcaaaagatctcgcaaaagattggaatgctgtgtttgaaaggagcatcaatacattgtttttgactgaaatggtccgtggcttgatgctaactctcaagtacttctttgatagaaatgtcacaattaactatccgtttgagaagggtcctctgagcccccgcttccgtggtgagcacgctctcagacgttatgaatctggggaagagcgctgcattgcttgtaaactatgcgaagctgcaattacaattgaggctgaagaacgtgaagatggcagtcgccgaaccacaagatatgatattgacatgaccaaatgcatttactgtgggttctgtcaagaggcttgcccagtcgatgctattgttgaggggcctaactttgagtttgccactgagacacacgaggaactactgtacgacaaggagaaattgcttgagaatggtgatcgctgggagactgagattgctgagaacttgagatctgagagcctctatcgctgaatctgtcttccattatggttgataaactgggttcttccattttccatattttgctcaactagctgatgaataagcaaacgatgtatcataacttaggtacgatgtttttgtaccttggcaccatctgtgtgttttgttcattgccttgctaaaggtggcaccagatgttctttgatgggaaaattccttttgtagcactgagctgttttcagtcaccttattttgtatacaatgaaacagaacgctgtgttcatggcacagtgatttggtgaatgttcacatgcttgtttccgactccgttttaaaacaaaacaaggtttgaactgatt

SEQ ID NO: 47600 - DNA, 1135 bp, Zea Mays
cttttcctcgtccacccggccatctccgcatccactaccgcaggccgcagcccagcaccggccgctctacgccggcacgtcctcgtttctgtccgaggtcatcgcctccgcaacttcgtggccggtgaggtcgcaccaccatggcgtcgctcctagcccggcaggcagcgcaggcgctccgcgcgaggcaaacgctcgggccggccgcgtcggcgatgcaagggcacctccgtacctacatgaacgcggggattcccaagcggttcaaagaggatgaggagaaagaacagcttgcaaaagatctcgcaaaagattggaatgctgtgtttgaaaggagcatcaatacattgtttttgactgaaatggtccgtggcttgatgctaactctcaagtacttctttgatagaaatgtcacaattaactatccgtttgagaagggtcctctgagcccccgcttccgtggtgagcacgctctcagacgttatgaatctggggaagagcgctgcattgcttgtaaactatgcgaagctatatgcccagcgcaggcaattacaattgaggctgaagaacgtgaagatggcagtcgccgaaccacaagatatgatattgacatgaccaaatgcatttactgtgggttctgtcaagaggcttgcccagtcgatgctattgttgaggggcctaactttgagtttgccactgagacacacgaggaactactgtacgacaaggagaaattgcttgagaatggtgatcgctgggagactgagattgctgagaacttgagatctgagagcctctatcgctgaatctgtcttccattatggttgataaactgggttcttccattttccatattttgctcaactagctgatgaataagcaaacgatgtatcataacttaggtacgatgtttttgtaccttggcaccatctgtgtgttttgttcattgccttgctaaaggtggcaccagatgttctttgatgggaaaattccttttgtagcactgagctgttttcagtcaccttattttgtatacaatgaaacagaacgctgtgttcatggcacagtgatttggtgaatgttcacatgcttgtttccgactccgttttaaaacaaaacaaggtttgaactgatt

SEQ ID NO: 47601 - DNA, 917 bp, Zea Mays
ggccgctctacgccggcacgtcctcgtttctgtccgaggtcatcgcctccgcaacttcgtggccggtgaggtcgcaccaccatggcgtcgctcctagcccggcaggcagcgcaggcgctccgcgcgaggcaaacggcgcagctcgggccggccgcgtcggcgatgcaagggcacctccgtacctacatgaacgcggggattcccaagcggttcaaagaggatgaggagaaagaacagcttgcaaaagatctcgcaaaagattggaatgctgtgtttgaaaggagcatcaatacattgtttttgactgaaatgatatgcccagcgcaggcaattacaattgaggctgaagaacgtgaagatggcagtcgccgaaccacaagatatgatattgacatgaccaaatgcatttactgtgggttctgtcaagaggcttgcccagtcgatgctattgttgaggggcctaactttgagtttgccactgagacacacgaggaactactgtacgacaaggagaaattgcttgagaatggtgatcgctgggagactgagattgctgagaacttgagatctgagagcctctatcgctgaatctgtcttccattatggttgataaactgggttcttccattttccatattttgctcaactagctgatgaataagcaaacgatgtatcataacttaggtacgatgtttttgtaccttggcaccatctgtgtgttttgttcattgccttgctaaaggtggcaccagatgttctttgatgggaaaattccttttgtagcactgagctgttttcagtcaccttattttgtatacaatgaaacagaacgctgtgttcatggcacagtgatttggtgaatgttcacatgcttgtttccgactccgttttaaaacaaaacaaggtttgaactgatt

SEQ ID NO: 47602 - DNA, 2944 bp, Zea Mays
ctgctttaaaaaaacacaatgaccttgagaccatatttgagaccgtcgcctccggggaactaaattactacgcacgacccgaatttggtgagtttattggaatctggggcaatgcaaaaacaccccccaaaagcacagagatctttagaaccaagagtgcttaaagcgacagacttcaattacaaatgcaaatactagagcagttcagcaagtgatgatggaaggaaacacccaaacattacccaggggggccaggacacaaacaaaggtttttcaacaccacaacctggctcgacagccaaacagattcatgcaagcagatcagtattcctcctcctcgtcaccgtcatcactgccgccctctgcggcgacctcctcgtagtccttctccagggcggccagtgcacgaacgcgcgcttggcgtacatgaggtcgaacttgctgttgatgcgggagaacacctcgacgacgctggtggagttggagatcatgcacaccgcgcgctgcaccttggcgaggtcggcacccggcaccactgtcggcgcctggtagttgatgccgcacttgaaccccgtcgggcaccagtccacgaactggatggtgcgcttcgtcttgatggtggccaccgcggcgttcacgtccttgggcaccacgtcgccgcggtacatcaggcagcaagccatgtacttgccgtgccgtgggtcgcacttgaccatcatggaagccggctcgaacgcgctgctggtgatctccgccacagacagctgctcgtggaaggccttcgcagaagagatcaccggtgcgtaggaggagagcatgaagtggatcctcgggtaaggaaccaggttggtctggaactcgttcacatccacattgagggcaccatcgaacctcagagaagcagtcagcgatgagatcacctgcgcaacagtttacacatacattttagcaacggtttcaaggatgtatgaacaaaaccagagcacaacccccagctgggataatgcaattgtcctacctgagacacaaggcgattcaagttggagtagttgggcctctcaatgtcgagggagcgcctgcagatgtcatagatggcctcgttgtcgagcaggatggagacatcagtgtgctccaggagtgagtgagtggagagcacgctgttgtaaggctccacaacagaggttgacacctggggagatgggtacacagtgaagcccagcttggatttcttgccgtactccacagacaggcgctcaaggaggagagaaccaaggccagagccagtgccaccaccaacggcattgaagaccaggaagccctggaggccggtgcagttgtcagcaagcttgcggatacggtcaaggcacagatcaacaatctccttgccaactacaggaacaagagcgtgattggcatcatcagcgatcaatcaaacagtgtgagctgagatgagctaattctgtggaaggctaattacttgtgtagtggccacgggcgaaattgttagcggcatcctccttgccactgatgagctgctcagggtggaagagctggcggtacgtgccagtgcgcacctcatcgatcacagtgggttctagatcaacgaagattgcacggggaacgtgcttcccagcaccagtctggctgaagaaggtgctgaaggcatcatcgtgatgtcccgcggtcttatctccaggcacttggccatcaggctgcgtgaaatagaaaggtgtttaatgtggttcagatcataaaacgatcaaaggaacatgattgcgaggtgccattagtgtaataagtatttgaatcagaaggcaggcgagcatctcaaattcataggagagagaaatttcagtacagtcgtattacagttgcacagcacaaactagaactaaagcgtcattcctgcatcagatctgagaaatgggaacaacatgggtaaattttacagaatcagagcttgagtcacgaaatattgcagttgtacagcacaaaagaaagcatcgttccactggaaaattttggatcaggccgaagaaatgaaaacaacatgagtaaaagttacagaatcagagcttgattcacgaaatagtaaaaggcgaattcaatcaattcctagtcgacaataacagaaacaaagatagcgcagttcatccacacacaaaccagatccaaaccggtcacggaacggcagatgacttattacgacatcgcaatctgtcaagaattggcgtgaccatcaacaaatacgagatgccaaattcgatcggaacatcctgttatttctgccgcaaagtattaacaaacgaaatccacgatacacctaaaacacaggatggtggcagcttaaatcgtgcaggaaatttcagatcctagtagtactagcaacagatctgacgaaaaaaaaaccctaacctaagccacttcagtacttcaccccgattcgagtactaacgccctgcaactgcaaattgcagcactcctcgacgacagatcagaaaacaatcgaagatggtgatggagatgcttttcaaggaagagaatacgagccggtcgcacctggatgccgtgctcgaggcagtaaagttcccagcacgcgttgccgacttggatgccggcctgcccgatgtggacggagatgcactccctcatcttcctcctctcctctcaaacaaccgcgcgcgacgccttcggaagagaccgagactggcgtgaaggtcgatcggtgggcggaatggggaattgaagatctgtcgggctcgggcgagagtttgcgccggcgtttgtgaagacgccgagctgaagcgataatgctgctcagcctcgcggcggcttttataggcagcgtgggagaggcggccgcggccggcccgtgatggcgcggcgcggcgcggaagacctagccgccgtctggttcggggctaacggcgtgatggtagccgac

SEQ ID NO: 47603 - DNA, 2329 bp, Zea Mays
ctgttggcaacgtctctggagccgtggagcttccatgtacccacacccatcgttttatttgataaaaaataaataaaaatccccaccaatcccacgcaacgccgccgctccaacggctagtttgtccatcctgccgagtgccggccctccacccgcgatctcaaattcatcaatcgcccgcgccaccacccaccaggcatcatctcagcccaagcatcggcacctcgccgcctcccgccgccgcggcagcgagctcagctgccagctcgatcgccagccagcggaaccctccagaaaactccatggggatcccgtcgaggctcccggaccacgaggaggaggaggaatacgacgatgccttgttctacgaggacatccaggcgccgaagttcgtggacctcaccgcgcccgacgccggcctccccgacgacgaccccgcctggttctgcctccgagtcggttgcgaccagagccatgagcaggttgacccggaggccttggacaggagcttcttcgtgcgggtttgtcctctcgtatagccgtatatctccgattggctgtgatatccaatgtcatggcggcgagaagccccaacgtgcggctacagaaggttatcagcaggaaaaaacagagctcgatgctgaaatgcccgcactctgcgccaccgaagcctccgagggctcggttcgcgaggctgagcgcgaccacggaggccgcggagaaggcaccggcgaaacccaagccaagggtccagcggatctgcgccctgcgagcatccccgatccgtatcaaggctgagagggtcgaatgtcccagcgagaggaagaaggcactgacgacgccgcggagcaaggccgtccggccgagccaggaactgtttcacagcgtgaagcaccagaaggaaccgttcaccgctgcagccaggaaggggaaggtcgtcaaggccctgttcatgagcacgccaaaaaaggcgcctgcccagacgccggcggcagacaggagcaaggaggcggggtccgaggcatgttccaagctgaggaagctgaacttggcgtgccgggaggtgccgagcaggtacatgtctcagctgaagaatccgaagactgtcaagaaaggggaagagaccacggtggccaagagcgagaagcgggggcaagaatccaagacgaatgccaagaagaaaatcttaggacgctcactgaagtgtacccatgccgaacctgatggggagaatcgaaacggttgcagcagcactgatgcagacgagaactcatttgcagaaattgctgcctccgatcaggagaggaaggtggtgctgcaggaattgagaatcgaggtggatacatcgcgagctgacaattccaatgacaacaaggagaatctgtcgagtgctcccagtgaagaagcattgaacaattcacattctgaaaatggaaacagacagttggagaacaatgagaatgttcctctaaacgagaatgttgctttgaaggtggctaaattgcagagcaaagtgcatcaagagcaagcaggaaagctcaagaaaactaccaaccctaggccattcaggctaaggactgatgaaagaggagtgcttaaagaagcaaaaccagagaaaaggcagccgttcactgagaataattccacggcagtactcaaggatgcaaacagaggagtgacgccaatggacaaacacacccatggcaagggacgagacaagccggcttgcggcaagaaacagaagaaacgaagcacccagattgtaacggctcagcagctcgatgagtccagctccaggccggccgtcaacagcatccaatgcagagctgtgaaaccggagagggtttctaggcttgcatcatcaacacgtacagccaaaacagcaagtggccttatggcaccttcttcccggactgggaagaagaggaaggcggctacggtgaagctgtcgaggatccaaacaccagctgcttgagctcgggcacgggcagatcaaggaggaaatgagaaactgccgacaacggtttttgttgtctgctccagcgacgagttctgtatttattactgcgtcgaattcgttttccggattttgtggatttatgtacactgatcatttctttctgcgagtcgtgtggtggaagtggaacccctctgctttgttgtaccgccaccgaccagatttcttcttctttctgtagaatgattcagaatttgattatttttctgtaacttaattgaactggggaaaggaggcccggcccaacccatgaaacatttcaattttagccgtggactaggatccatttcatctcgctaccatgtgttgttg

SEQ ID NO: 47604 - DNA, 1322 bp, Zea Mays
ctccgattggctgtgatatccaatgtcatggcggcgagaagccccaacgtgcggctacagaaggttatcagcaggaaaaaacagagctcgatgctgaaatgcccgcactctgcgccaccgaagcctccgagggctcggttcgcgaggctgagcgcgaccacggaggccgcggagaaggcaccggcgaaacccaagccaagggtccagcggatctgcgccctgcgagcatccccgatccgtatcaaggctgagagggtcgaatgtcccagcgagaggaagaaggcactgacgacgccgcggagcaaggccgtccggccgagccaggaactgtttcacagcgtgaagcaccagaaggaaccgttcaccgctgcagccaggaaggggaaggtcgtcaaggccctgttcatgagcacgccaaaaaaggcgcctgcccagacgccggcggcagacaggagcaaggaggcggggtccgaggcatgttccaagctgaggaagctgaacttggcgtgccgggaggtgccgagcaggtacatgtctcagctgaagaatccgaagactgtcaagaaaggggaagagaccacggagtgcttaaagaagcaaaaccagagaaaaggcagccgttcactgagaataattccacggcagtactcaaggatgcaaacagaggagtgacgccaatggacaaacacacccatggcaagggacgagacaagccggcttgcggcaagaaacagaagaaacgaagcacccagattgtaacggctcagcagctcgatgagtccagctccaggccggccgtcaacagcatccaatgcagagctgtgaaaccggagagggtttctaggcttgcatcatcaacacgtacagccaaaacagcaagtggccttatggcaccttcttcccggactgggaagaagaggaaggcggctacggtgaagctgtcgaggatccaaacaccagctgcttgagctcgggcacgggcagatcaaggaggaaatgagaaactgccgacaacggtttttgttgtctgctccagcgacgagttctgtatttattactgcgtcgaattcgttttccggattttgtggatttatgtacactgatcatttctttctgcgagtcgtgtggtggaagtggaacccctctgctttgttgtaccgccaccgaccagatttcttcttctttctgtagaatgattcagaatttgattatttttctgtaacttaattgaactggggaaaggaggcccggcccaacccatgaaacatttcaattttagccgtggactaggatccatttcatctcgctaccatgtgttgttg

SEQ ID NO: 47605 - DNA, 3364 bp, Zea Mays
gattaatccacgtgtgcccaaagatgccacgaaaggatctcttatcctaatgtttcctcttcttttgccctccaccacctgccatgccatgtctaacccacagaagccgcgtaattaacgccctacttaaaagccttaccaaaccaaggccggaagaaggaatactcaaccaaaactagtcgctgcgaaaaaccacagacacgcggaaggacaagcgaacatcgaaagtattgtgggcttcccgtccgaccgagctctcgactctctctctcccaagacgtgttgagctgtttcccagtccttcgtcaccttccctccgctcagactcaccagcgcagctccccccatcctcttctcttgttcataagcccactcacaaacagaagtggagcggagcttctgcagagtaccactagcactagtaagtaaccttggggattttcctgtgagaagagagactggcattggagtgcagttagcggagccaaaaaggaagggaagcccaggattagcgtttggcggatagagtggctatttcgtgagaagggagagagaaggagaggcgtggcctaggccggcggacgcggcggctttcttggaccggccattgatggcgccgtgcagcggcttgtggggcggcaaggccggcggcgacgcctaccggggcacgccggtggtggtcaagatggagaaccccaactggtcgatctccgagatctcgtctccggaggacgacgacgacgacgaggacatcttggccgccgccggcggccgccgccgcaagggggcccgcaccaagaacgccaagcagatcaggtgggtgctgctcctcaaggcgcaccgcgccgccgggtgcctcgcctcgctggcctccgccgccgtcgcgctgggcgccgcggccaggcgcagggtggccgcggggaggaccgacgccgacgccgacgccgacgccggcgtgctggccgtcgccggcgagagccccgtggtgcgctccgggttctacgccttcatcagggccttcctcgtcgtctccctgctcctgctggccgtcgaggtcgcggcgtacatcaacggctgggacctcgccgcctccgcgctcgccctccccgccctcggcctcgagtcgctgtacgcctcctggctgcgcttccgcgccgcctacgttgcgccggggatacagttcctcaccgacgcctgcgtcgtgctcttcctcgtccagagcgccgaccgcctcatcctgtgccttggctgcttctacatccgcgtcaagcgcatcaagcccgagccgaagtccccggcattacctgatgcggaggaccccgatgccgggtactaccccatggtacttgtccagataccaatgtgcaacgagaaggaggtgtatcaacaatcaattgcggccgtgtgcaaccttgactggccgaaatccagcttcttggtccaggtgctggatgactccgatgacctactgacacaggctctgatcagagaagaggtggccaaatggcagcagcaaggtgcccggattgtgtacaggcaccgtgtgttgagggatggttacaaggctggaaacctcaagtcggccatgagctgcagctacgtgaaggattacgagtttgttgccatctttgacgcagacttccaaccccagcctgactttctgaagcgcactgtgctacatttcaaggacaatgatgaacttgggctagtgcaagcaaggtgaatggagtgttcttgaacttcttcgggttcaatggcaccgccggggtgtggaggatcaaggcactggaggactcaggtggatggatggagcggacaacggtggaggatatggacattgctgtcagggcacatctccatggctggaagtttatattcctgaacgatgttgagtgccagtgcgaactgcccgagtcctatgaggcttacaggaagcagcagcatcggtggcattccggtccaatgcagctattcaggctgtgtttaccggacatcatcaaatgcaagatggcgttctggaagaaaggcaacctgatcctcctcttcttcctgctccggaagctcatactgcccttgtactccttcacgctcttctgcatcatcctcccgacggcgatgttcgtgccggaggcggagctcccggactgggtggtgtgctacgtcccggccctcatgtccctgctgaacgtgctgccgtcgccgaggtccttccccttcgtcatcccgtacctggagtgggtagtgaccaagaagtcgggctcgggcccccgctcgtccgaggtcgccggcgacctcgtctcgctggccgccgccgccccgacggcgaagaagaagaagaagaagaagcacaaccggatatacaagaaggagctcgcgctgtcgatgctgctcctgaccgcggccgcccgcagcttgctgtcgaagcagggtatccacttctacttcctcctgttccagggcgtgtcgttcttgttggtcgggcttgacctcataggggagcaggtcgagtgaatcgtgtaagcaagcaggaggttgtaggtgtggaaacggtgagtggggtcggtcagtcgccatgggagtgccgggtgggagggagggagggagggatgtctcgctgccatgggcacggcggcaggctcgtggctgaggttcgaaagatgcggttgtggagctgtgtgccttctctgatccgatccgtcctgactatgaagagagaacctccgcctccgcctcggaggtgcaggtgcagccgtgcaggtaaaatttgcgtagtgggctcctgcattcatctgtaacagaattttgttcgcctttgcgattggtggaggaaaacaggagcgccactgggttaggaggcgtcctggtgccagacgacgctggcatcttgctccacttgtgaagctgagagagtagatccagatcgtgggcttgtttgtccacgtgtgtttgttgtagcctgtctctccggctctccccgctcgacgccggggaaagctggcagttgtcgagcgcggtgtgtcacatgactggggaagacgaagatctgtgtctcctgcatatgccgatgatcattgtgcatcaaggttccaggagtagcttgtctcatcgaactggttagttctgtcgggatatgtaacctttttttctctctctgcaactaacgttttaccggctctgtagtgtgatagaaattatctcctggtaatgaaatgtgtgtcccaagtccggactaggaatctaggataaaatggaacgtttgtcttcagttgcgagcaacaattttgtacatgaactttatccgggtcatgggctcgtacaagcggcaaaagcttgacccttgctgagtcgtgtacctgcctttatc

SEQ ID NO: 47606 - DNA, 3367 bp, Zea Mays
gattaatccacgtgtgcccaaagatgccacgaaaggatctcttatcctaatgtttcctcttcttttgccctccaccacctgccatgccatgtctaacccacagaagccgcgtaattaacgccctacttaaaagccttaccaaaccaaggccggaagaaggaatactcaaccaaaactagtcgctgcgaaaaaccacagacacgcggaaggacaagcgaacatcgaaagtattgtgggcttcccgtccgaccgagctctcgactctctctctcccaagacgtgttgagctgtttcccagtccttcgtcaccttccctccgctcagactcaccagcgcagctccccccatcctcttctcttgttcataagcccactcacaaacagaagtggagcggagcttctgcagagtaccactagcactagtaagtaaccttggggattttcctgtgagaagagagactggcattggagtgcagttagcggagccaaaaaggaagggaagcccaggattagcgtttggcggatagagtggctatttcgtgagaagggagagagaaggagaggcgtggcctaggccggcggacgcggcggctttcttggaccggccattgatggcgccgtgcagcggcttgtggggcggcaaggccggcggcgacgcctaccggggcacgccggtggtggtcaagatggagaaccccaactggtcgatctccgagatctcgtctccggaggacgacgacgacgacgaggacatcttggccgccgccggcggccgccgccgcaagggggcccgcaccaagaacgccaagcagatcaggtgggtgctgctcctcaaggcgcaccgcgccgccgggtgcctcgcctcgctggcctccgccgccgtcgcgctgggcgccgcggccaggcgcagggtggccgcggggaggaccgacgccgacgccgacgccgacgccggcgtgctggccgtcgccggcgagagccccgtggtgcgctccgggttctacgccttcatcagggccttcctcgtcgtctccctgctcctgctggccgtcgaggtcgcggcgtacatcaacggctgggacctcgccgcctccgcgctcgccctccccgccctcggcctcgagtcgctgtacgcctcctggctgcgcttccgcgccgcctacgttgcgccggggatacagttcctcaccgacgcctgcgtcgtgctcttcctcgtccagagcgccgaccgcctcatcctgtgccttggctgcttctacatccgcgtcaagcgcatcaagcccgagccgaagtccccggcattacctgatgcggaggaccccgatgccgggtactaccccatggtacttgtccagataccaatgtgcaacgagaaggaggtgtatcaacaatcaattgcggccgtgtgcaaccttgactggccgaaatccagcttcttggtccaggtgctggatgactccgatgacctactgacacaggctctgatcagagaagaggtggccaaatggcagcagcaaggtgcccggattgtgtacaggcaccgtgtgttgagggatggttacaaggctggaaacctcaagtcggccatgagctgcagctacgtgaaggattacgagtttgttgccatctttgacgcagacttccaaccccagcctgactttctgaagcgcactgtgctacatttcaaggacaatgatgaacttgggctagtgcaagcaagcaggtgaatggagtgttcttgaacttcttcgggttcaatggcaccgccggggtgtggaggatcaaggcactggaggactcaggtggatggatggagcggacaacggtggaggatatggacattgctgtcagggcacatctccatggctggaagtttatattcctgaacgatgttgagtgccagtgcgaactgcccgagtcctatgaggcttacaggaagcagcagcatcggtggcattccggtccaatgcagctattcaggctgtgtttaccggacatcatcaaatgcaagatggcgttctggaagaaaggcaacctgatcctcctcttcttcctgctccggaagctcatactgcccttgtactccttcacgctcttctgcatcatcctcccgacggcgatgttcgtgccggaggcggagctcccggactgggtggtgtgctacgtcccggccctcatgtccctgctgaacgtgctgccgtcgccgaggtccttccccttcgtcatcccgtacctggagtgggtagtgaccaagaagtcgggctcgggcccccgctcgtccgaggtcgccggcgacctcgtctcgctggccgccgccgccccgacggcgaagaagaagaagaagaagaagcacaaccggatatacaagaaggagctcgcgctgtcgatgctgctcctgaccgcggccgcccgcagcttgctgtcgaagcagggtatccacttctacttcctcctgttccagggcgtgtcgttcttgttggtcgggcttgacctcataggggagcaggtcgagtgaatcgtgtaagcaagcaggaggttgtaggtgtggaaacggtgagtggggtcggtcagtcgccatgggagtgccgggtgggagggagggagggagggatgtctcgctgccatgggcacggcggcaggctcgtggctgaggttcgaaagatgcggttgtggagctgtgtgccttctctgatccgatccgtcctgactatgaagagagaacctccgcctccgcctcggaggtgcaggtgcagccgtgcaggtaaaatttgcgtagtgggctcctgcattcatctgtaacagaattttgttcgcctttgcgattggtggaggaaaacaggagcgccactgggttaggaggcgtcctggtgccagacgacgctggcatcttgctccacttgtgaagctgagagagtagatccagatcgtgggcttgtttgtccacgtgtgtttgttgtagcctgtctctccggctctccccgctcgacgccggggaaagctggcagttgtcgagcgcggtgtgtcacatgactggggaagacgaagatctgtgtctcctgcatatgccgatgatcattgtgcatcaaggttccaggagtagcttgtctcatcgaactggttagttctgtcgggatatgtaacctttttttctctctctgcaactaacgttttaccggctctgtagtgtgatagaaattatctcctggtaatgaaatgtgtgtcccaagtccggactaggaatctaggataaaatggaacgtttgtcttcagttgcgagcaacaattttgtacatgaactttatccgggtcatgggctcgtacaagcggcaaaagcttgacccttgctgagtcgtgtacctgcctttatc

SEQ ID NO: 47607 - DNA, 3303 bp, Zea Mays
cgcgtaattaacgccctacttaaaagccttaccaaaccaaggccggaagaaggaatactcaaccaaaactagtcgctgcgaaaaaccacagacacgcggaaggacaagcgaacatcgaaagtattgtgggcttcccgtccgaccgagctctcgactctctctctcccaagacgtgttgagctgtttcccagtccttcgtcaccttccctccgctcagactcaccagcgcagctccccccatcctcttctcttgttcataagcccactcacaaacagaagtggagcggagcttctgcagagtaccactagcactagtaagtaaccttggggattttcctgtgagaagagagactggcattggagtgcagttagcggagccaaaaaggaagggaagcccaggattagcgtttggcggatagagtggctatttcgtgagaagggagagagaaggagaggcgtggcctaggccggcggacgcggcggctttcttggaccggccattgatggcgccgtgcagcggcttgtggggcggcaaggccggcggcgacgcctaccggggcacgccggtggtggtcaagatggagaaccccaactggtcgatctccgagatctcgtctccggaggacgacgacgacgacgaggacatcttggccgccgccggcggccgccgccgcaagggggcccgcaccaagaacgccaagcagatcaggtgggtgctgctcctcaaggcgcaccgcgccgccgggtgcctcgcctcgctggcctccgccgccgtcgcgctgggcgccgcggccaggcgcagggtggccgcggggaggaccgacgccgacgccgacgccgacgccggcgtgctggccgtcgccggcgagagccccgtggtgcgctccgggttctacgccttcatcagggccttcctcgtcgtctccctgctcctgctggccgtcgaggtcgcggcgtacatcaacggctgggacctcgccgcctccgcgctcgccctccccgccctcggcctcgagtcgctgtacgcctcctggctgcgcttccgcgccgcctacgttgcgccggggatacagttcctcaccgacgcctgcgtcgtgctcttcctcgtccagagcgccgaccgcctcatcctgtgccttggctgcttctacatccgcgtcaagcgcatcaagcccgagccgaagtccccggcattacctgatgcggaggaccccgatgccgggtactaccccatggtacttgtccagataccaatgtgcaacgagaaggaggtgtatcaacaatcaattgcggccgtgtgcaaccttgactggccgaaatccagcttcttggtccaggtgctggatgactccgatgacctactgacacaggctctgatcagagaagaggtggccaaatggcagcagcaaggtgcccggattgtgtacaggcaccgtgtgttgagggatggttacaaggctggaaacctcaagtcggccatgagctgcagctacgtgaaggattacgagtttgttgccatctttgacgcagacttccaaccccagcctgactttctgaagcgcactgtgctacatttcaaggacaatgatgaacttgggctagtgcaagcaaggtggtcatttgtgaataaggatgagaacctgctgacccggttgcagtatattaacctttgcttccactttgaggtggaacagcaggtgaatggagtgttcttgaacttcttcgggttcaatggcaccgccggggtgtggaggatcaaggcactggaggactcaggtggatggatggagcggacaacggtggaggatatggacattgctgtcagggcacatctccatggctggaagtttatattcctgaacgatgttgagatggcgttctggaagaaaggcaacctgatcctcctcttcttcctgctccggaagctcatactgcccttgtactccttcacgctcttctgcatcatcctcccgacggcgatgttcgtgccggaggcggagctcccggactgggtggtgtgctacgtcccggccctcatgtccctgctgaacgtgctgccgtcgccgaggtccttccccttcgtcatcccgtacctgctgttcgagaacaccatgtcggtgaccaagttcaacgcgatggtctcggggctgttccagctggggagcgcgtacgagtgggtagtgaccaagaagtcgggctcgggcccccgctcgtccgaggtcgccggcgacctcgtctcgctggccgccgccgccccgacggcgaagaagaagaagaagaagaagcacaaccggatatacaagaaggagctcgcgctgtcgatgctgctcctgaccgcggccgcccgcagcttgctgtcgaagcagggtatccacttctacttcctcctgttccagggcgtgtcgttcttgttggtcgggcttgacctcataggggagcaggtcgagtgaatcgtgtaagcaagcaggaggttgtaggtgtggaaacggtgagtggggtcggtcagtcgccatgggagtgccgggtgggagggagggagggagggatgtctcgctgccatgggcacggcggcaggctcgtggctgaggttcgaaagatgcggttgtggagctgtgtgccttctctgatccgatccgtcctgactatgaagagagaacctccgcctccgcctcggaggtgcaggtgcagccgtgcaggtaaaatttgcgtagtgggctcctgcattcatctgtaacagaattttgttcgcctttgcgattggtggaggaaaacaggagcgccactgggttaggaggcgtcctggtgccagacgacgctggcatcttgctccacttgtgaagctgagagagtagatccagatcgtgggcttgtttgtccacgtgtgtttgttgtagcctgtctctccggctctccccgctcgacgccggggaaagctggcagttgtcgagcgcggtgtgtcacatgactggggaagacgaagatctgtgtctcctgcatatgccgatgatcattgtgcatcaaggttccaggagtagcttgtctcatcgaactggttagttctgtcgggatatgtaacctttttttctctctctgcaactaacgttttaccggctctgtagtgtgatagaaattatctcctggtaatgaaatgtgtgtcccaagtccggactaggaatctaggataaaatggaacgtttgtcttcagttgcgagcaacaattttgtacatgaactttatccgggtcatgggctcgtacaagcggcaaaagcttgacccttgctgagtcgtgtacctgcctttatc

SEQ ID NO: 47608 - DNA, 3346 bp, Zea Mays
aaactagtcgctgcgaaaaaccacagacacgcggaaggacaagcgaacatcgaaagtattgtgggcttcccgtccgaccgagctctcgactctctctctcccaagacgtgttgagctgtttcccagtccttcgtcaccttccctccgctcagactcaccagcgcagctccccccatcctcttctcttgttcataagcccactcacaaacagaagtggagcggagcttctgcagagtaccactagcactagtaagtaaccttggggattttcctgtgagaagagagactggcattggagtgcagttagcggagccaaaaaggaagggaagcccaggattagcgtttggcggatagagtggctatttcgtgagaagggagagagaaggagaggcgtggcctaggccggcggacgcggcggctttcttggaccggccattgatggcgccgtgcagcggcttgtggggcggcaaggccggcggcgacgcctaccggggcacgccggtggtggtcaagatggagaaccccaactggtcgatctccgagatctcgtctccggaggacgacgacgacgacgaggacatcttggccgccgccggcggccgccgccgcaagggggcccgcaccaagaacgccaagcagatcaggtgggtgctgctcctcaaggcgcaccgcgccgccgggtgcctcgcctcgctggcctccgccgccgtcgcgctgggcgccgcggccaggcgcagggtggccgcggggaggaccgacgccgacgccgacgccgacgccggcgtgctggccgtcgccggcgagagccccgtggtgcgctccgggttctacgccttcatcagggccttcctcgtcgtctccctgctcctgctggccgtcgaggtcgcggcgtacatcaacggctgggacctcgccgcctccgcgctcgccctccccgccctcggcctcgagtcgctgtacgcctcctggctgcgcttccgcgccgcctacgttgcgccggggatacagttcctcaccgacgcctgcgtcgtgctcttcctcgtccagagcgccgaccgcctcatcctgtgccttggctgcttctacatccgcgtcaagcgcatcaagcccgagccgaagtccccggcattacctgatgcggaggaccccgatgccgggtactaccccatggtacttgtccagataccaatgtgcaacgagaaggaggtgtatcaacaatcaattgcggccgtgtgcaaccttgactggccgaaatccagcttcttggtccaggtgctggatgactccgatgacctactgacacaggctctgatcagagaagaggtggccaaatggcagcagcaaggtgcccggattgtgtacaggcaccgtgtgttgagggatggttacaaggctggaaacctcaagtcggccatgagctgcagctacgtgaaggattacgagtttgttgccatctttgacgcagacttccaaccccagcctgactttctgaagcgcactgtgctacatttcaaggacaatgatgaacttgggctagtgcaagcaaggtggtcatttgtgaataaggatgagaacctgctgacccggttgcagtatattaacctttgcttccactttgaggtggaacagcaggtgaatggagtgttcttgaacttcttcgggttcaatggcaccgccggggtgtggaggatcaaggcactggaggactcaggtggatggatggagcggacaacggtggaggatatggacattgctgtcagggcacatctccatggctggaagtttatattcctgaacgatgttgagtgcgaactgcccgagtcctatgaggcttacaggaagcagcagcatcggtggcattccggtccaatgcagctattcaggctgtgtttaccggacatcatcaaatgcaagatggcgttctggaagaaaggcaacctgatcctcctcttcttcctgctccggaagctcatactgcccttgtactccttcacgctcttctgcatcatcctcccgacggcgatgttcgtgccggaggcggagctcccggactgggtggtgtgctacgtcccggccctcatgtccctgctgaacgtgctgccgtcgccgaggtccttccccttcgtcatcccgtacctgctgttcgagaacaccatgtcggtgaccaagttcaacgcgatggtctcggggctgttccagctggggagcgcgtacgagtgggtagtgaccaagaagtcgggctcgggcccccgctcgtccgaggtcgccggcgacctcgtctcgctggccgccgccgccccgacggcgaagaagaagaagaagaagaagcacaaccggatatacaagaaggagctcgcgctgtcgatgctgctcctgaccgcggccgcccgcagcttgctgtcgaagcagggtatccacttctacttcctcctgttccagggcgtgtcgttcttgttggtcgggcttgacctcataggggagcaggtcgagtgaatcgtgtaagcaagcaggaggttgtaggtgtggaaacggtgagtggggtcggtcagtcgccatgggagtgccgggtgggagggagggagggagggatgtctcgctgccatgggcacggcggcaggctcgtggctgaggttcgaaagatgcggttgtggagctgtgtgccttctctgatccgatccgtcctgactatgaagagagaacctccgcctccgcctcggaggtgcaggtgcagccgtgcaggtaaaatttgcgtagtgggctcctgcattcatctgtaacagaattttgttcgcctttgcgattggtggaggaaaacaggagcgccactgggttaggaggcgtcctggtgccagacgacgctggcatcttgctccacttgtgaagctgagagagtagatccagatcgtgggcttgtttgtccacgtgtgtttgttgtagcctgtctctccggctctccccgctcgacgccggggaaagctggcagttgtcgagcgcggtgtgtcacatgactggggaagacgaagatctgtgtctcctgcatatgccgatgatcattgtgcatcaaggttccaggagtagcttgtctcatcgaactggttagttctgtcgggatatgtaacctttttttctctctctgcaactaacgttttaccggctctgtagtgtgatagaaattatctcctggtaatgaaatgtgtgtcccaagtccggactaggaatctaggataaaatggaacgtttgtcttcagttgcgagcaacaattttgtacatgaactttatccgggtcatgggctcgtacaagcggcaaaagcttgacccttgctgagtcgtgtacctgcctttatc

SEQ ID NO: 47609 - DNA, 466 bp, Zea Mays
ggcggctccgcggccccagtcgacgctgtggctcctggacagcggcgccaccggagcctgctcccccggctcatccggacccccaccaccaagcgcctggagtggaaactcctgtcgaggaacaccaccaagcgggagaagacaaagcgcgcggccggcgggagtgtggatgtgaagcgaacgaacttattagtgctgtatgaatatgatggcagaacgtttgctttggggaattattatcgaagtggagtggctctgaggtttagtggtgtaagcgcttgtgctttgaatccttgtttgtattagagcgtagtggtaacgagactcagagattgtgtaaatgccagagacagaatgacagttgtctttattgcagggaagacagtgcttatatatacaggcgaactagtgccttctcaaggggtgcgtcccttgtggagaaactatcgcatcccatggaggggat

SEQ ID NO: 47610 - DNA, 705 bp, Zea Mays
aagctgtgggctggtcgcctggttcagctgcgcctccgtgctcgcccaccataattgggtctcccagcaaatttggcggtggttgggcttctggacggagatcgaagaggttatatctgcacttctgcagggaaatccaatgtggacggagtactgcaatgtacccttgatgactctagggtttgagaacaactatgacgtctttgtgaaagtacatgggggtggtctctcaggagtcaggccaggggcccaggcaatttgccttggcgttgcccgttagcccgtaccttagtgaagaactgaagaatatcagcaatgccaacagagttcctctgaagtcagaagatttgctgacaagggattagagatactcgtgcttgtttagaagaggattggatggactaaaatcgagattttagcctcttcaatcctctgcagcatctttgctcccaaattaaaaggaaggcacgcaagcggccccagttctccagctctgttggtcaaatatattctgcattggtggaacttgtttttaattggcaggctagtaaagtatactgtttaggatagagctgaaatttggaaccattccaaacacctcaagaatgaagtgctttaggctttgttcgtttgtgtcggattgatggatcggaacgattcctaaccgaattgtttctctaatttatataaactttgattagctgg

SEQ ID NO: 47611 - DNA, 2143 bp, Zea Mays
caccagtgaagagcaacagtccctccccccctgaccccacgccctccgtgccgtgcccactcctctccccgcagcttcgggcccctgccatgccgtcctcgtcgtcgctgatccatggcatctccatctccgtctccgacgacgacgaggccaccggcaaggtgcgcgtccgcgtccgccgcaagcgctcccgcggccccgcatccgcttcggcgcgccgccgccgcatcctcttccgcgccgcgcggctgggcgtgccgctcctcctcgccgccctcgccgtgtgcctcctcctctacgagtcctaccgcctcacgccttcccgctcctccacactgcctccgccgtccttcgcggacatcagccgcctctcccgcaacgcccgcgccgccgatggcgccaggaagtcatgcctgaagtttcttgatcctgagaagcttcaaaatttggaacttccagaaattcctgaaacaaatttgtcgatgaaggaagttctgtacagatcaagtctgccccatatcgtcaatgatacaccaccacatacagagaattcccggttcaacttgttcacaggataccagacactcactgaacgagaagaaagcttcaagatgaagaaaagtgtgacagtgcactgtggcttttataatgaaaatggagggttcagagtttctgatgttgacagagaatatatgagatcctgtgaagtagttgttgcaacttgtgcatttggtggaggtgacgaccttcatcagcctatagggatgaccgaaaattccatcagaaaggtttgctatgtagctttctgggatgaagtcacccgtgcagctcaagaggaggaaggacacacgatcagtgaagacctcgtgattggcctatggcggatcattcttgttagcgatcttcctttctcagatcaacggttgaatgggaaaattcctaagctgataagccatcgcctcttcccaatggcgcggtactcaatttgggtggattcaaaatctcagttccggagagacccattgggagtccttgaagcccttttgtggcgctcaaactcttctctagcgttatcggaacacggagctcggagtagcctgtacgatgaggcgaaagcaattgttaagaaacacaaagcaactccagaggaagttgaagtgcagttggatcagtaccgacgagatggcatccctgatgagaaaagattcaatggaaagaaaggaacttgggatgctgaatctcaaaagcactttagtaataaagagaataacatcgaacactttgtgcaaccatgtttggtcttcatgagaaagaaaaaatgtgcggtacagctgctcagctgtagctgtacaaaaggcacaagtaataaagttgggccagttgcacgcgtttagcataaaagcaagctccttttctgcccctgaaacagtgatacacgcattccaccagaagcccccacaattgtgggattggtagaacgggaaccactgcagaagtgaaacgaacataatgcttcgcttcataattgatgctctcgcagaagcttcagtgatcgtgaggaaccacgcgccgctgaccaacctcttcatgtgcgcctggttcaacgaggtggtcaggttcacgtcccgggatcagctgagctttccctacgtcctgaggcgcctgaggccgcccggcgttcacctgttcccggtttgcgcgcgcaaggacctggtgaacagcttcgggcacaagcgcaaggtgaagccgctcgtcaaggacacgacgtgagccccttgtggaattgggccttcgtctgggctagagaaggtcaacctgcctgattagtaatttagtggtagtagtcttcttccttccatccagtagtagttcataagtaagaatcaaaccgtcgtgtaggggagggtcttgagtcttgacgtagtgaaattacagtcggagacgcagagtagtagtcaccgaaggggtgcaacgtaggggtaggaatgatttatcccggtaacgaaggatgtacttactagctgacgacaatggcgctgtcgacgttgctgcaggcgaagatggcctgtgcagctgtggttacccttccccgttcctcatgaaaatgaaagatatcttctcccagttttttttttttttgttt

SEQ ID NO: 47612 - DNA, 1776 bp, Zea Mays
caccagtgaagagcaacagtccctccccccctgaccccacgccctccgtgccgtgcccactcctctccccgcagcttcgggcccctgccatgccgtcctcgtcgtcgctgatccatggcatctccatctccgtctccgacgacgacgaggccaccggcaaggtgcgcgtccgcgtccgccgcaagcgctcccgcggccccgcatccgcttcggcgcgccgccgccgcatcctcttccgcgccgcgcggctgggcgtgccgctcctcctcgccgccctcgccgtgtgcctcctcctctacgagtcctaccgcctcacgccttcccgctcctccacactgcctccgccgtccttcgcggacatcagccgcctctcccgcaacgcccgcgccgccgatggcgccaggaagtaaattcctgaaacaaatttgtcgatgaaggaagttctgtacagatcaagtctgccccatatcgtcaatgatacaccaccacatacagagaattcccggttcaacttgttcacaggataccagacactcactgaacgagaagaaagcttcaaggttaactttttgagcatttacatttcaatgaagaaaagtgtgacagtgcactgtggcttttataatgaaaatggagggttcagagtttctgatgttgacagagaatatatgagatcctgtgaagtagttgttgcaacttgtgcatttggtggaggtgacgaccttcatcagcctatagggatgaccgaaaattccatcagaaaggtttgctatgtagctttctgggatgaagtcacccgtgcagctcaagaggaggaaggacacacgatcagtgaagacctcgtgattggcctatggcggatcattcttgttagcgatcttcctttctcagatcaacggttgaatgggaaaattcctaagctgataagccatcgcctcttcccaatggcgcggtactcaatttgggtggattcaaaatctcagttccggagagacccattgggagtccttgaagcccttttgtggcgctcaaactcttctctagcgttatcggaacacggagctcggagtagcctgtacgatgaggcgaaagcaattgttaagaaacacaaagcaactccagaggaagttgaagtgcagttggatcagtaccgacgagatggcatccctgatgagaaaagattcaatggaaagaaagctctcgcagaagcttcagtgatcgtgaggaaccacgcgccgctgaccaacctcttcatgtgcgcctggttcaacgaggtggtcaggttcacgtcccgggatcagctgagctttccctacgtcctgaggcgcctgaggccgcccggcgttcacctgttcccggtttgcgcgcgcaaggtgaagccgctcgtcaaggacacgacgtgagccccttgtggaattgggccttcgtctgggctagagaaggtcaacctgcctgattagtaatttagtggtagtagtcttcttccttccatccagtagtagttcataagtaagaatcaaaccgtcgtgtaggggagggtcttgagtcttgacgtagtgaaattacagtcggagacgcagagtagtagtcaccgaaggggtgcaacgtaggggtaggaatgatttatcccggtaacgaaggatgtacttactagctgacgacaatggcgctgtcgacgttgctgcaggcgaagatggcctgtgcagctgtggttacccttccccgttcctcatgaaaatgaaagatatcttctcccagttttttttttttttgttt

SEQ ID NO: 47613 - DNA, 1782 bp, Zea Mays
caccagtgaagagcaacagtccctccccccctgaccccacgccctccgtgccgtgcccactcctctccccgcagcttcgggcccctgccatgccgtcctcgtcgtcgctgatccatggcatctccatctccgtctccgacgacgacgaggccaccggcaaggtgcgcgtccgcgtccgccgcaagcgctcccgcggccccgcatccgcttcggcgcgccgccgccgcatcctcttccgcgccgcgcggctgggcgtgccgctcctcctcgccgccctcgccgtgtgcctcctcctctacgagtcctaccgcctcacgccttcccgctcctccacactgcctccgccgtccttcgcggacatcagccgcctctcccgcaacgcccgcgccgccgatggcgccaggaagtaaattcctgaaacaaatttgtcgatgaaggaagttctgtacagatcaagtctgccccatatcgtcaatgatacaccaccacatacagagaattcccggttcaacttgttcacaggataccagacactcactgaacgagaagaaagcttcaagatgaagaaaagtgtgacagtgcactgtggcttttataatgaaaatggagggttcagagtttctgatgttgacagagaatatatgagatcctgtgaagtagttgttgcaacttgtgcatttggtggaggtgacgaccttcatcagcctatagggatgaccgaaaattccatcagaaaggtttgctatgtagctttctgggatgaagtcacccgtgcagctcaagaggaggaaggacacacgatcagtgaagacctcgtgattggcctatggcggatcattcttgttagcgatcttcctttctcagatcaacggttgaatgggaaaattcctaagctgataagccatcgcctcttcccaatggcgcggtactcaatttgggtggattcaaaatctcagttccggagagacccattgggagtccttgaagcccttttgtggcgctcaaactcttctctagcgttatcggaacacggagctcggagtagcctgtacgatgaggcgaaagcaattgttaagaaacacaaagcaactccagaggaagttgaagtgcagttggatcagtaccgacgagatggcatccctgatgagaaaagattcaatggaaagaaagctctcgcagaagcttcagtgatcgtgaggaaccacgcgccgctgaccaacctcttcatgtgcgcctggttcaacgaggtggtcaggttcacgtcccgggatcagctgagctttccctacgtcctgaggcgcctgaggccgcccggcgttcacctgttcccggtttgcgcgcgcaaggacctggtgaacagcttcgggcacaagcgcaaggtgaagccgctcgtcaaggacacgacgtgagccccttgtggaattgggccttcgtctgggctagagaaggtcaacctgcctgattagtaatttagtggtagtagtcttcttccttccatccagtagtagttcataagtaagaatcaaaccgtcgtgtaggggagggtcttgagtcttgacgtagtgaaattacagtcggagacgcagagtagtagtcaccgaaggggtgcaacgtaggggtaggaatgatttatcccggtaacgaaggatgtacttactagctgacgacaatggcgctgtcgacgttgctgcaggcgaagatggcctgtgcagctgtggttacccttccccgttcctcatgaaaatgaaagatatcttctcccagttttttttttttttgttt

SEQ ID NO: 47614 - DNA, 2507 bp, Zea Mays
atcacacaggtcgcagcaaggaaccccaggagaggggaaaagttgtgtgtggcgtttgcgtttccacgacatgtcacagtcaacggcctttttgcaggctcgccactatcgtgtcacattggtgctcgcctgcgctgtatctgtatatatacacataccacacgcggtggggttggatgcatagagagcagttggattggatcaaagagaggagggctttgctttccgttttccttctccaaatggctcattagctcgtgcttcttccttccttgctaccgagttcggggcgctaaccaatgcgcagcgacaagctgatctctctctgccacgggatggaggtggaggctctagagaaggggtacacagcttttgccaaggcggtgaagtcttttacttcttcagaacggtacaagcgatcagagagctattttgaggacatgtatggtacagatgctttgcgttcttcagacaagacaattgttctacctatgccagaagctgtaaaagctaaggtgaaaggtgatatcagcaaggaagctcaacctggaaggggagcacaaagcaccttgagaaaggagatccttgagcttgagaagcacttcagggaacaacaggttgtgagtggtgcactggaaaacgctttaggacctaacgccggttcagtcaacttttcaccagagaatccaatgccaaaggcagctaatgaactgatacgggagattgccacattggagctcgaggtgaagaacatggagcagtatctcctgacactctaccgcaaagcattcgagcagcaagcgccggcactctctccccctgattgccgggaagcttcgaagccgtcagtgagctcacgctttgggcagctccgagaaacacccgtggcggcgaagtcttgcaagagtggaggaggggatgcggcactccggaccagttacccgccgccggcgcataagaaactgaacgatccgttggcagactgctgcacatctgctcgctcccatagagcggttgattcagatgtcctccgctgccagtcagccctgtcgtaccgcggagtttgctcgtccagggtactgccttcagaagaggatgatgatagcctcgcgagggctcttcgctcgtgccactcacagccattctcattcgcagaggaaggagagggggccggtgcatctggaggagcgataagcttagcagagtatctaggaaccaacgtagccgaccacatcccggaaacccccaacaacctgtcggaggagatggtgagatgcatggcggggatatactgcaggcttgcagaccctcccttggtccaccacggctcgtcgtcctcgccgacattgtccttctcctcgaccaccagcgcagtctctccacagtacgtcggagacgacatgtggagtcccagctaccgcaggagagaagcgacgaccctggactcccgcctgatcaacccgttccacgtcgagggtctgaaggagttcagtgggccttacaacacgatggtcgaggttcctacgatcagccgtgacggtcggaggatgaaagaagccgaggacctgctccagacttacaggctggttttgtaccggctggaagccgttgatctgaggacgatgacgaacgaagaaaagatagcgttctgggtgaacgtacacaatgccttgctgatgcatgcttatctggagaacggcgtcccacagaacaaaacatccctgcttgctaaggccgcctgcaaaatagctggacgcagcatcaacgcggccgttatccagagcgttgttcttggatgtaccacgcactgccccggacagtggctacgacggacgctgctctaccccaggaccaaaagcaaagtgagcaaagcggggcatgagtggcgagcctttgccgtcgcacaaccggagcctcttttgcgctttgcgctttgctccggcagccattctgatcccgcggtgagggtgtacactccgaagcggctgttccaccagctggaggcggccaaggaggagttcatccgggcgacggccggcgtgtggaaggagcagaagctgcttctccccaagctggtggaggcgtacgccaaggacgtgaggctgtcgccgcagggcctcgtggacatggtccagcgccacctcccggagaccatgagggtggccgtgcagcggtgccagcagggcggcagggcgtcgtcgggcaaggtcgtcgtcgactgggtgccccacaacccggccttccggtacctgctcgcaagggacctcgcgttccctcacctcagctgacgctgacactgagcatatatcgatgggcatgggctcaagtagtatatgcatgtgtcaaagggttaggacttaggagtaaagaagggatcgtgtgcagtttttgtgtgggtggttatcaatggcgtggcgtgtaaagatgcttctgtagtctgtagatgatgaacaggaaaggaaacagttgacgaaatgatagaaagcacgtttgacggttgactcgcc

SEQ ID NO: 47615 - DNA, 2580 bp, Zea Mays
gcatagagagcagttggattggatcaaagagaggagggctttgctttccgttttccttctccaaatggctcattagctcgtgcttcttccttccttgctaccgagttcggggcgctaaccaatgcgcagcgacaagctgatctctctctgccacgggatggaggtggaggctctagagaaggggtacacagcttttgccaaggcggtgaagtcttttacttcttcagaacggtacaagcgatcagagagtcgcagctattttgaggacatgtatggtacagatgctttgcgttcttcagacaagacaattgttctacctatgccagaagctgtaaaagctaaggtgaaaggtgatatcagcaaggaagctcaacctggaaggggagcacaaagcaccttgagaaaggagatccttgagcttgagaagcacttcagggaacaacaggttgtgagtggtgcactggaaaacgctttaggacctaacgccggttcagtcaacttttcaccagagaatccaatgccaaaggcagctaatgaactgatacgggagattgccacattggagctcgaggtgaagaacatggagcagtatctcctgacactctaccgcaaagcattcgagcagcaagcgccggcactctctccccctgattgccgggaagcttcgaagccgtcagtgagctcacgctttgggcagctccgagaaacacccgtggcggcgaagtcttgcaagagtggaggaggggatgcggcactccggaccagttacccgccgccggcgcataagaaactgaacgatccgttggcagactgctgcacatctgctcgctcccatagagcggttgattcagatgtcctccgctgccagtcagccctgtcgtaccgcggagtttgctcgtccagggtactgccttcagaagaggatgatgatagcctcgcgagggctcttcgctcgtgccactcacagccattctcattcgcagaggaaggagagggggccggtgcatctggaggagcgataagcttagcagagtatctaggaaccaacgtagccgaccacatcccggaaacccccaacaacctgtcggaggagatggtgagatgcatggcggggatatactgcaggcttgcagaccctcccttggtccaccacggctcgtcgtcctcgccgacattgtccttctcctcgaccaccagcgcagtctctccacagtacgtcggagacgacatgtggagtcccagctaccgcaggagagaagcgacgaccctggactcccgcctgatcaacccgttccacgtcgagggtctgaaggagttcagtgggccttacaacacgatggtcgaggttcctacgatcagccgtgacggtcggaggatgaaagaagccgaggacctgctccagacttacaggctggttttgtaccggctggaagccgttgatctgaggacgatgacgaacgaagaaaagatagcgttctgggtgaacgtacacaatgccttgctgatgcatgcttatctggagaacggcgtcccacagaacaaaacatccctgcttgctaaggccgcctgcaaaatagctggacgcagcatcaacgcggccgttatccagagcgttgttcttggatgtaccacgcactgccccggacagtggctacgacggacgctgctctaccccaggaccaaaagcaaagtgagcaaagcggggcatgagtggcgagcctttgccgtcgcacaaccggagcctcttttgcgctttgcgctttgctccggcagccattctgatcccgcggtaagcaacaatttcccaagacccgcaggtgtcgttgcatcaaagcaacaagttccgaatcttttcgtctgccatcatgttaggaatctcacgctgttgcatcaaagcacactgctgctaccttaattactactggatgtgccaagccgaccctcttttttctgaattctcaacgcagcagcatcaccatctcacttcgctttgttttgttttaatttgttttggctgcgttgcaatgcatgcaggtgagggtgtacactccgaagcggctgttccaccagctggaggcggccaaggaggagttcatccgggcgacggccggcgtgtggaaggagcagaagctgcttctccccaagctggtggaggcgtacgccaaggacgtgaggctgtcgccgcagggcctcgtggacatggtccagcgccacctcccggagaccatgagggtggccgtgcagcggtgccagcagggcggcagggcgtcgtcgggcaaggtcgtcgtcgactgggtgccccacaacccggccttccggtacctgctcgcaagggacctcgcgttccctcacctcagctgacgctgacactgagcatatatcgatgggcatgggctcaagtagtatatgcatgtgtcaaagggttaggacttaggagtaaagaagggatcgtgtgcagtttttgtgtgggtggttatcaatggcgtggcgtgtaaagatgcttctgtagtctgtagatgatgaacaggaaaggaaacagttgacgaaatgatagaaagcacgtttgacggttgactcgcc

SEQ ID NO: 47616 - DNA, 2311 bp, Zea Mays
gcatagagagcagttggattggatcaaagagaggagggctttgctttccgttttccttctccaaatggctcattagctcgtgcttcttccttccttgctaccgagttcggggcgctaaccaatgcgcagcgacaagctgatctctgtggaggctctagagaaggggtacacagcttttgccaaggcggtgaagtcttttacttcttcagaacggtacaagcgatcagagagctattttgaggacatgtatggtacagatgctttgcgttcttcagacaagacaattgttctacctatgccagaagctgtaaaagctaaggtgaaaggtgatatcagcaaggaagctcaacctggaaggggagcacaaagcaccttgagaaaggagatccttgagcttgagaagcacttcagggaacaacaggttgtgagtggtgcactggaaaacgctttaggacctaacgccggttcagtcaacttttcaccagagaatccaatgccaaaggcagctaatgaactgatacgggagattgccacattggagctcgaggtgaagaacatggagcagtatctcctgacactctaccgcaaagcattcgagcagcaagcgccggcactctctccccctgattgccgggaagcttcgaagccgtcagtgagctcacgctttgggcagctccgagaaacacccgtggcggcgaagtcttgcaagagtggaggaggggatgcggcactccggaccagttacccgccgccggcgcataagaaactgaacgatccgttggcagactgctgcacatctgctcgctcccatagagcggttgattcagatgtcctccgctgccagtcagccctgtcgtaccgcggagtttgctcgtccagggtactgccttcagaagaggatgatgatagcctcgcgagggctcttcgctcgtgccactcacagccattctcattcgcagaggaaggagagggggccggtgcatctggaggagcgataagcttagcagagtatctaggaaccaacgtagccgaccacatcccggaaacccccaacaacctgtcggaggagatggtgagatgcatggcggggatatactgcaggcttgcagaccctcccttggtccaccacggctcgtcgtcctcgccgacattgtccttctcctcgaccaccagcgcagtctctccacagtacgtcggagacgacatgtggagtcccagctaccgcaggagagaagcgacgaccctggactcccgcctgatcaacccgttccacgtcgagggtctgaaggagttcagtgggccttacaacacgatggtcgaggttcctacgatcagccgtgacggtcggaggatgaaagaagccgaggacctgctccagacttacaggctggttttgtaccggctggaagccgttgatctgaggacgatgacgaacgaagaaaagatagcgttctgggtgaacgtacacaatgccttgctgatgcatgcttatctggagaacggcgtcccacagaacaaaacatccctgcttgctaaggccgcctgcaaaatagctggacgcagcatcaacgcggccgttatccagagcgttgttcttggatgtaccacgcactgccccggacagtggctacgacggacgctgctctaccccaggaccaaaagcaaagtgagcaaagcggggcatgagtggcgagcctttgccgtcgcacaaccggagcctcttttgcgctttgcgctttgctccggcagccattctgatcccgcggtgagggtgtacactccgaagcggctgttccaccagctggaggcggccaaggaggagttcatccgggcgacggccggcgtgtggaaggagcagaagctgcttctccccaagctggtggaggcgtacgccaaggacgtgaggctgtcgccgcagggcctcgtggacatggtccagcgccacctcccggagaccatgagggtggccgtgcagcggtgccagcagggcggcagggcgtcgtcgggcaaggtcgtcgtcgactgggtgccccacaacccggccttccggtacctgctcgcaagggacctcgcgttccctcacctcagctgacgctgacactgagcatatatcgatgggcatgggctcaagtagtatatgcatgtgtcaaagggttaggacttaggagtaaagaagggatcgtgtgcagtttttgtgtgggtggttatcaatggcgtggcgtgtaaagatgcttctgtagtctgtagatgatgaacaggaaaggaaacagttgacgaaatgatagaaagcacgtttgacggttgactcgcc

SEQ ID NO: 47617 - DNA, 2362 bp, Zea Mays
gcatagagagcagttggattggatcaaagagaggagggctttgctttccgttttccttctccaaatggctcattagctcgtgcttcttccttccttgctaccgagttcggggcgctaaccaatgcgcagcgacaagctgatctctttcctgattgactcttattagtcttagctctgccacgggatggaggtggaggctctagagaaggggtacacagcttttgccaaggcggtgaagtcttttacttcttcagaacggtacaagcgatcagagagtcgcagctattttgaggacatgtatggtacagatgctttgcgttcttcagacaagacaattgttctacctatgccagaagctgtaaaagctaaggtgaaaggtgatatcagcaaggaagctcaacctggaaggggagcacaaagcaccttgagaaaggagatccttgagcttgagaagcacttcagggaacaacaggttgtgagtggtgcactggaaaacgctttaggacctaacgccggttcagtcaacttttcaccagagaatccaatgccaaaggcagctaatgaactgatacgggagattgccacattggagctcgaggtgaagaacatggagcagtatctcctgacactctaccgcaaagcattcgagcagcaagcgccggcactctctccccctgattgccgggaagcttcgaagccgtcagtgagctcacgctttgggcagctccgagaaacacccgtggcggcgaagtcttgcaagagtggaggaggggatgcggcactccggaccagttacccgccgccggcgcataagaaactgaacgatccgttggcagactgctgcacatctgctcgctcccatagagcggttgattcagatgtcctccgctgccagtcagccctgtcgtaccgcggagtttgctcgtccagggtactgccttcagaagaggatgatgatagcctcgcgagggctcttcgctcgtgccactcacagccattctcattcgcagaggaaggagagggggccggtgcatctggaggagcgataagcttagcagagtatctaggaaccaacgtagccgaccacatcccggaaacccccaacaacctgtcggaggagatggtgagatgcatggcggggatatactgcaggcttgcagaccctcccttggtccaccacggctcgtcgtcctcgccgacattgtccttctcctcgaccaccagcgcagtctctccacagtacgtcggagacgacatgtggagtcccagctaccgcaggagagaagcgacgaccctggactcccgcctgatcaacccgttccacgtcgagggtctgaaggagttcagtgggccttacaacacgatggtcgaggttcctacgatcagccgtgacggtcggaggatgaaagaagccgaggacctgctccagacttacaggctggttttgtaccggctggaagccgttgatctgaggacgatgacgaacgaagaaaagatagcgttctgggtgaacgtacacaatgccttgctgatgcatgcttatctggagaacggcgtcccacagaacaaaacatccctgcttgctaaggccgcctgcaaaatagctggacgcagcatcaacgcggccgttatccagagcgttgttcttggatgtaccacgcactgccccggacagtggctacgacggacgctgctctaccccaggaccaaaagcaaagtgagcaaagcggggcatgagtggcgagcctttgccgtcgcacaaccggagcctcttttgcgctttgcgctttgctccggcagccattctgatcccgcggtgagggtgtacactccgaagcggctgttccaccagctggaggcggccaaggaggagttcatccgggcgacggccggcgtgtggaaggagcagaagctgcttctccccaagctggtggaggcgtacgccaaggacgtgaggctgtcgccgcagggcctcgtggacatggtccagcgccacctcccggagaccatgagggtggccgtgcagcggtgccagcagggcggcagggcgtcgtcgggcaaggtcgtcgtcgactgggtgccccacaacccggccttccggtacctgctcgcaagggacctcgcgttccctcacctcagctgacgctgacactgagcatatatcgatgggcatgggctcaagtagtatatgcatgtgtcaaagggttaggacttaggagtaaagaagggatcgtgtgcagtttttgtgtgggtggttatcaatggcgtggcgtgtaaagatgcttctgtagtctgtagatgatgaacaggaaaggaaacagttgacgaaatgatagaaagcacgtttgacggttgactcgcc

SEQ ID NO: 47618 - DNA, 2331 bp, Zea Mays
gcatagagagcagttggattggatcaaagagaggagggctttgctttccgttttccttctccaaatggctcattagctcgtgcttcttccttccttgctaccgagttcggggcgctaaccaatgcgcagcgacaagctgatctcttcttagctctgccacgggatggaggtggaggctctagagaaggggtacacagcttttgccaaggcggtgaagtcttttacttcttcagaacggtacaagcgatcagagagctattttgaggacatgtatggtacagatgctttgcgttcttcagacaagacaattgttctacctatgccagaagctgtaaaagctaaggtgaaaggtgatatcagcaaggaagctcaacctggaaggggagcacaaagcaccttgagaaaggagatccttgagcttgagaagcacttcagggaacaacaggttgtgagtggtgcactggaaaacgctttaggacctaacgccggttcagtcaacttttcaccagagaatccaatgccaaaggcagctaatgaactgatacgggagattgccacattggagctcgaggtgaagaacatggagcagtatctcctgacactctaccgcaaagcattcgagcagcaagcgccggcactctctccccctgattgccgggaagcttcgaagccgtcagtgagctcacgctttgggcagctccgagaaacacccgtggcggcgaagtcttgcaagagtggaggaggggatgcggcactccggaccagttacccgccgccggcgcataagaaactgaacgatccgttggcagactgctgcacatctgctcgctcccatagagcggttgattcagatgtcctccgctgccagtcagccctgtcgtaccgcggagtttgctcgtccagggtactgccttcagaagaggatgatgatagcctcgcgagggctcttcgctcgtgccactcacagccattctcattcgcagaggaaggagagggggccggtgcatctggaggagcgataagcttagcagagtatctaggaaccaacgtagccgaccacatcccggaaacccccaacaacctgtcggaggagatggtgagatgcatggcggggatatactgcaggcttgcagaccctcccttggtccaccacggctcgtcgtcctcgccgacattgtccttctcctcgaccaccagcgcagtctctccacagtacgtcggagacgacatgtggagtcccagctaccgcaggagagaagcgacgaccctggactcccgcctgatcaacccgttccacgtcgagggtctgaaggagttcagtgggccttacaacacgatggtcgaggttcctacgatcagccgtgacggtcggaggatgaaagaagccgaggacctgctccagacttacaggctggttttgtaccggctggaagccgttgatctgaggacgatgacgaacgaagaaaagatagcgttctgggtgaacgtacacaatgccttgctgatgcttatctggagaacggcgtcccacagaacaaaacatccctgcttgctaaggccgcctgcaaaatagctggacgcagcatcaacgcggccgttatccagagcgttgttcttggatgtaccacgcactgccccggacagtggctacgacggacgctgctctaccccaggaccaaaagcaaagtgagcaaagcggggcatgagtggcgagcctttgccgtcgcacaaccggagcctcttttgcgctttgcgctttgctccggcagccattctgatcccgcggtgagggtgtacactccgaagcggctgttccaccagctggaggcggccaaggaggagttcatccgggcgacggccggcgtgtggaaggagcagaagctgcttctccccaagctggtggaggcgtacgccaaggacgtgaggctgtcgccgcagggcctcgtggacatggtccagcgccacctcccggagaccatgagggtggccgtgcagcggtgccagcagggcggcagggcgtcgtcgggcaaggtcgtcgtcgactgggtgccccacaacccggccttccggtacctgctcgcaagggacctcgcgttccctcacctcagctgacgctgacactgagcatatatcgatgggcatgggctcaagtagtatatgcatgtgtcaaagggttaggacttaggagtaaagaagggatcgtgtgcagtttttgtgtgggtggttatcaatggcgtggcgtgtaaagatgcttctgtagtctgtagatgatgaacaggaaaggaaacagttgacgaaatgatagaaagcacgtttgacggttgactcgcc

SEQ ID NO: 47619 - DNA, 2147 bp, Zea Mays
ctcgggtatcccgtatttctgtcgcgtactaccgtactcgcgtcctcattaaaaaaatcttcaggaaaaaaagagaaaatcttcaatatctgcctgctcctcgtctccacctggaccgctggacctcacgccaccggcaaacatgctgatttctccaagacttgcagcaccggccgcctcccggacctccccctctctccccaccaccacgcccacacgtccaggtatccgcggtcggaggcgaagcggtttcgacgcaccggtcgacgcggcatcccttcaccacggcgaccgtacccgcccggcgctccgcttcacataccccgcaccctccgcctctgtcacgactaccagctcaccggagcccatcgattgccgattggacagcgatgagctcggaaggctgtaccgagaacacaaccctgaggccgccgttagcttgctcgacgaaatgctccaacgaggcagcgccgaacaactcgagccggaggaacaggccgcactcctccaggcctgcgccgacacgcggtcgctgccctcgctcaggcgcgcccaccgcctgctcacttccacgtcggggtccgcgattcccgcgcccgtcctgcacaggatcgccacgctgtacctcaagctcggcgcccgcggcgacgcgcggcgggtcctcgaggagcgtacaaggcggcgtccggcgagggaggacgacgcggcggtccaggccaagcggcgagaggcgtacactaaggtgcgggagctccacgcgcagatccgcgcggcagggtacgtgccggacacgcgctacgtgctccacgacatcgacgaggacgccaaggcccgcgcgctcatgtaccacagcgagcgcctggccatcgccttcgggctggtgagcacgccgcccgggacgccgctccgcgtcatgaagaacctccgcatctgcggcgactgccacaacgccgtcaagctcattgccaaggtcaccggccgcgagatcgtcgtcagggacaacaagcgcttccaccatttcaaggacggcgcctgctcctgcggagactactggtgaggaagccttcacagctagcacgcacaaaggttacattctccataaaatgtttgtaaattcgtaacacttgttagtggcgagagaaggatcaaagaattggttgagccaacttgtagaagcattggccagcaacatcaccgacttccaagtacgatttgtgcgctgcaactgcaaactgcaaatatgcaattgaatgatcgaacatggaaaaggacacaataactgcgcaggccgcaggggaaactcagggaatttttcacaaatccaaggaaagaatcaagagaacagaacaatgaactcgaagctaggatgtgcaatggctaagaactcaggggctctgctcaatgcgtggccggcgagtccgtgccaccaccgtccgctgctgcgactggcagacctgcgccgggaacttgcacccgaaccgcttcgtcactatcgcgccccacctcccatccgccggcggcacagacggcgctcccctatccaccggtgccccgcctcgccggtccatcttgtcgatggctttcctcatgctcgtgcactcgcgctcgagctcctgcacgcggttccgcatgctgtccatgtcgagccgcagcatctggttgccccgtgccgccacgcgccatgtaccgccgccgtcgctctcaccgccttcctcccctgacccggctgcgccgccttcgttcgccatgatcgtctgagcgatggcccggcgcagctggagctgctcgaagaagagcacctgcacgaccgtccgcagcggcagccgttcgttctgcgccgcgtgcgtgcaggcctccagcgtgagcttccgcccgtccaccacgccgctcaccttctccttctcttcttcactcagacccggatgagcctgcagagagacgagccaaaacaaaacaagcattcatcactcgtcagcaccggcattgtttcacaagctagcgagccagaagataacaagaacgcgctgctccctcgccttgaggtagatgtcgacagctcggtaaaggccatcatcgtacacgcgggcgccgtccggcaacgcccaggcgaggtcgcagaatttgtccggcttcaggttggcatctgt

SEQ ID NO: 47620 - DNA, 647 bp, Zea Mays
gccgccgccgacatgcctgccggtgcgcgacagcccggggatggaccgcttagcgtacgcaatgagagccccctcaatgacctcagggccgacgccgcgctccttcatggcggcaatgacacgggtgaacgtggccaaggacaggccagcgaggtcgtcggaccaggtggccccggcggcggcggcggcgttcttgcggcgctggcgttcgccggccctgtcgtcgtcggcgatgggccagccgaagagtgccgtgggcgttgacgcggcggccttggcggcgactgcgtccacgcagcgcgacacgaggccgaggtcgtcggcgagggggagcaggccctcgcaggacttgagggcgcggatggcatccctggggttcctcagcacggtctgcgatatgaaccggtcggcgcgggagacgaggttgtcgtccgagtggtcgtcagacatgccgaggcgctcggcggcgcagcgcagcggcgcggccgtggccggcgtgaggtcgagcttcacgccgtagcagaacttggcggccagctcgaacgcctccgcgccgccggggaactccaggaggtggatgcggtgcacgcccgcctcctcgtcctcctccagcacaaggtccgcttcctcctctctgatctccccca

SEQ ID NO: 47621 - DNA, 158 bp, Zea Mays
gtagagattgagttgttcaaaaaaaaaagaattgaagaactggaggcaagattcaccaaccttgtggagatgaaaggtcatgtctcccacctcgatcactacatcgctgggcaatcctgtggtgcagaacctgacgagcacagacttgcagatgagag

SEQ ID NO: 47622 - DNA, 1522 bp, Zea Mays
gattgggttactgcttctctgccttacgtgttgggcctttccaaagcccataattgcccagtcctcatgcatcgcacgattccgggctgcgtggcgccacgctggccacccacatcatccttctccagttctcctccgcctctccgggtttgactctgctgcgagcccgaacccgaagcagcagagctgcaaaatctagtctagagcgaaagaaatggcgagcgtggcctccgcgaggtgttacggccttctcctcccgccaagcttcgccggagcacggtgctgctcccgtccgtcctcttcgctccgtctgcggccgcggtggggcctgcgccggccgaggacccccctcgcctgcgtcgcgccgcccgactccgcggagccacagacggatgagcaggctgtgaaagctgaatctatccaagaagatgctccgactagtacacccgaggatgctgggcttccagctctcccgaataaggatctcaacagaagggtagcactactgtccactcttggagcggtggctctgtttgcatcccagaggctcaatcttagcgaggcatctcttaaagatcttgcagccaattcggttccatatgaagaggctctttcaaatggcaggcccactgtggttgagttttatgcagactggtgcgaggtctgcagagaattagctccggatatctacaaagtggaacagcaatacaaggaccgtgtcaattttgtgatgctgaatgttgacaacacgaagtgggagcaagagcttgacgagttcggggtggaaggcattcctcacttcgcctttctggataaggaaggaaacgaggaaggcaatgttgtcgggagacttccaaagcagtatttccttgacaacgtggttgcgcttgcttctggtgatcccgagataccgcacgcacgagtggtcggtcagttctcgagcgctgaatctaggaaagttcatcaagtcgctgatcccagaagtcatggctagcagtagttgttttctatgtggacagctgtaatcatagttctaatgccaagaccgtttgacaagaggagatcctaggctatatactatagttcattcagccctccctgtatcgaacatgcgggcgctgcaaagagctggtagattccacaaaacccggaagaaaaggctggcgcggattccttcagtgatactgaaacgaattcaggtcgaaaaggagagagccagcctcggcccaccatattcgcatcgccgtctcctttgtgtgatcaggctgtctgccactctgttgcccggcaaccttttatgcgtctcttgttttttttttaaagggagagagagttactcttgatttcacaatcaatgatcgcggtgataagataatcgcaaaagtcgtgcgacggagactcgggagggcaggcaaaaggagggcgtgatcccggtggaacgctgaccgcgcggtcaagtcagccattggagccgcggtgcgaaagagcgcgtggtcagatgagtcaaaccggagcaggaggg

SEQ ID NO: 47623 - DNA, 1165 bp, Zea Mays
gggtttgactctgctgcgagcccgaacccgaagcagcagagctgcaaaatctagtctagagcgaaagaaatggcgagcgtggcctccgcgaggtgttacggccttctcctcccgccaagcttcgccggagcacggtgctgctcccgtccgtcctcttcgctccgtctgcggccgcggtggggcctgcgccggccgaggacccccctcgcctgcgtcgcgccgcccgactccgcggagccacagacggatgagcaggctgtgaaagctgaatctatccaagaagatgctccgactagtacacccgaggatgctgggcttccagctctcccgaataaggatctcaacagaagggtagcactactgtccactcttggagcggtggctctgtttgcatcccagaggctcaatcttagcgaggcatctcttaaagatcttgcagccaattcggttccatatgaagaggctctttcaaatggcaggcccactgtggttgagttttatgcagactggtgcgaggtctgcagagaattagctccggatatctacaaagtggaacagcaatacaaggaccgtgtcaattttgtgatgctgaatgttgacaacacgaagtgggagcaagagcttgacgagttcggggtggaaggcattcctcacttcgcctttctggataaggaaggaaacgaggaaggcaatgttgtcgggagacttccaaagcagtatttccttgacaacgtggttgcgcttgcttctggtgatcccgagataccgcacgcacgagtggtcggtcagttctcgagcgctgaatctaggaaagttcatcaagtcgctgatcccagaagtcatggctagcagtagttgttttctatgtggacagctgtaatcatagttctaatgccaagaccgtttgacaagaggagatcctaggctatatactatagttcattcagccctccctgtatcgaacatgcgggcgctgcaaagagctggtagattccacaaaacccggaagaaaaggctggcgcggattccttcagtgatactgaaacggttgcatgttattattatacgagatactgttacgttttttaaaagcagtatagaggaattcaggtcgaaaaggagagagccagcctcggcccaccatattcgcatcgccgtctccttt

SEQ ID NO: 47624 - DNA, 1616 bp, Zea Mays
cttaatactggccatccgatctttgatccaaaggctgagatcgcttacaatgtatttcattcttcacaaggctcttttatagcttctctctgtgtgtttggcacaatgtgttaatccagctaggtgaagtaacacttataattttgagactgtttgtcataaccagatttgttttcttcctgtagcaggcggctatacctatctctaccatcatgaagagagagagagagagagagagaggaattctattgagagcttaatgattgttatcaaagaaatcgggtttgtctaagtgctgaaagtgcaaactctgatttccatcagctcttgaccatgtcaccaaggttccattgttatagcgctaccaggcggccttccttctccttttgtgcaacacatcgttgccatgtttgaggatgatcttggctgctgctgcaaattgattctagaactagaacaacttgcccaaatgaaggatggcaaggcctttgctgaatcattggactgtctgtcaaatgttatgtgtaatgttcatgactatctaatccatgtggcattaagagttcacaaatcaacttcttcaaacttgtctgctgggaatgctaagttcactcagtctcctttcccagagttgctagctcatgtccatcttttttaacttcctgtttgcaattatgataaaaaaatgtgaactgctgcgtatcagaattgcaaacatgaagttaaatccctcatgtgcattatgttttctcccctctaatatattgtaaacggggaatgtccctgtttggaaactacacatcttggcatgttcgtttatgatgaacattcttgtttgtgctggtggaacattttcatcggtatgctgaaacaacagtggaaactcagtatctgaatgatcgaaggcgcaggggtggagagtaatcctttactcaaggcaaataaaagagatggagctaagccagaagcaactgacagaacagtccatccgatgttacatctaacacctccaggccagccgccaacgctggctgacgcgccaatggtagcaaaccaaccacagcaaacttcattccctactgtagcaacttccccaatctcttatccaactgttctattgccttcttctgttttgcctcccatccaagcacacaaaccagtcctgctccacaccaaccaaccctttcagttcattttgtctcgctgcttgcactttgtgttaatctttggtcattgtgactgattgttggttttcaggatttagtttacttcctgccttattttggctattgtttttccaaataattatactccagcctccaggtttcccttattagtaagaattacctaatggcgtgccttaatattcatatgcaggtggagcagcagcttctggcataccttctattgttagttgacttcacagagtcagagctgtggcgtgtgttgattgctattcaatttttattgatttgaagccagttttctgtgcatatccacagcagccccggtcctatgattttgagggcccccgggcgaactgattatagtgggccctctagactatataaaaaagtttatgatatacagtggagcaaattaatatttcgtatgta

SEQ ID NO: 47625 - DNA, 1371 bp, Zea Mays
cttaatactggccatccgatctttgatccaaaggctgagatcgcttacaatgtatttcattcttcacaaggctcttttatagcttctctctgtgtgtttggcacaatgtgttaatccagctaggtgaagtaacacttataattttgagactgtttgtcataaccagatttgttttcttcctgtagcaggcggctatacctatctctaccatcatgaagagagagagagagagagagagaggaattctattgagagcttaatgattgttatcaaagaaatcgggtttgtctaagtgctgaaagtgcaaactctgatttccatcagctcttgaccatgtcaccaaggttccattgttatagcgctaccaggcggccttccttctccttttgtgcaacacatcgttgccatgtttgaggatgatcttggctgctgctgcaaattgattctagaactagaacaacttgcccaaatgaaggatggcaaggcctttgctgaatcattggactgtctgtcaaatgttatgtgtaatgttcatgactatctaatccatgtggcattaaggtaaatcttacacataatggataataaccatcacagctactccagaacttaacacggcatgcatttttttttctatcatgataacagagttcacaaatcaacttcttcaaacttgtctgctgggaatgctaagttcactcagtctcctttcccagagttgctagctcatgtccatcttttttaacttcctgtttgcaattatgataaaaaaatgtgaactgctgcgtatcagaattgcaaacatgaagttaaatccctcatgtgcattatgttttctcccctctaatatattgtaaacggggaatgtccctgtttggaaactacacatcttggcatgttcgtttatgatgaacattcttgtttgtgctggtggaacattttcatcggtatgctgaaacaacagtggaaactcagtatctgaatgatcgaaggcgcaggggtggagagtaatcctttactcaaggcaaataaaagagatggagctaagccagaagcaactgacagaacagtccatccgatgttacatctaacacctccaggccagccgccaacgctggctgacgcgccaatggtggagcagcagcttctggcataccttctattgttagttgacttcacagagtcagagctgtggcgtgtgttgattgctattcaatttttattgatttgaagccagttttctgtgcatatccacagcagccccggtcctatgattttgagggcccccgggcgaactgattatagtgggccctctagactatataaaaaagtttatgatatacagtggagcaaattaatatttcgtatgta

SEQ ID NO: 47626 - DNA, 2143 bp, Zea Mays
atggcgaacgacgatcacacggagggtatggtcgtacaaacgcgcgacgacgtgagcgtcatgactaggcagtgggcaacacatgtcgcgtggtccatgtgcatcgggcgtcctttggaggtcatgcctgtgcacggtgcaagacgtgaggtcatgcatctctctcttatggctcgtgggcggccaccacgtgaggacactgtccatatgtgtgttgaacaacaagtggccatgtttctaaatacaattgggcataaccttagaaataggttgattggcacaaattttggtagatctggggaaacagttagtcgttgtttcaataaagttcttcgtgcaattggtgagctacgaggcgaactaattaggccaccttcattggacactccaaccaaaatatcagggaactacagatgggatccgtactttaaggactgtattggagctattgatggtacacatgtaagagccactgttcctagagatatggagcatgcctttcgtggtaggaagtcctatgcgactcaaaatgtaatggcagctgtagattttgatctacgcttcacttatgtgttggctggttgggagggaacagctcatgatgctaatgtattacgagatgctttagaacgtgtgaatggccttcgcgttccacaaggtaaattctaccttgttgatgcgggatatggagcaaaaccgggattcttgcctcctttccgtggtgtgagataccatttaaacgaatggggcaataatcccgtacaaaatgagaaagagttgtttaatctaaggcactcatctcttcgtgtcacagttgagcgtgcattcgggtcattgaagagaagattcaagattttagatgatgcatctcctttcttcccttttccaacacaagtcgatattgttgttgcttgttgtatcattcataattgggtcatacaagatggtcgtgatgattttattatacaagattctaattggcctagtcatagccatgctacatctttagttggccaagcaagtgagcatgctgctatggttgctttgaggcaaggaattgcagaccagatgtggacagaccatcagaactacaatggaaactagtatcttgtaatatttgtaagaactatttgtaaggatgctatgttattgcaaggatgtattggctactgtcttttatcagtaagaactatttgtaaggatgctatgttattgcaaggatgtatcttttatctgtaagaattatttgtaaggatgctatgttattgtaagggcatattggttgctgattttaatgttgctatgtcattgtaaggaagtattgtttgctaattttaatgttgctatgttattgtaaggaagtattgtttgctgatttttatgatcttgatacttgtagggaagaaatggaagctgaaggacaaggcttcactaatgggcatgctacctggacatcagcaatgtcctctttcatgttgtcctacctgtccaatgtggtgtcaagtggcgaaaggacatcgtctggttttaagaaagttcactacaatagttgtgcaaaagctatcaatgaaaagttccaaatcgccctcaatggcgagcagattaaaaatcatctaaaaacttggtccagaaggtttgccaagataaataggataagaaaagtgagtggtataggctgggatgaagatagttttactattactatggatgaagagcactataatggctatgttaagctttaggcgaagatgatgaagttgataatgaagaggtgatggcacatgctttcactaaaaggatgtccaattgtgatgataatgccacaacatcttctacaagcaagatcaggaagaaggcaaaaaaacgtgatagtgaagaggaggggttgattgctgcattcaaaagtgtcggggataccttatccagtgctattgagaaggttgccacaggggacactgatgtgccagatgatctttttgacagtttgataaaccttccaggttttgagcaaacccacatatctctttatttcaattatctggtggcgcaccctcacattgctagagccttcaacaagttgccattcgaccacaagttaatctgggctcgcaatttcgtcagtgaaaagttcccaggagtgtga

SEQ ID NO: 47627 - DNA, 2170 bp, Zea Mays
atggcgaacgacgatcacacggagggtatggtcgtacaaacgcgcgacgacgtgagcgtcatgactaggcagtgggcaacacatgtcgcgtggtccatgtgcatcgggcgtcctttggaggtcatgcctgtgcacggtgcaagacgtgaggtcatgcatctctctcttatggctcgtgggcggccaccacgtgaggacactgtccatatgtgtgttgaacaacaagtggccatgtttctaaatacaattgggcataaccttagaaataggttgattggcacaaattttggtagatctggggaaacagttagtcgttgtttcaataaagttcttcgtgcaattggtgagctacgaggcgaactaattaggccaccttcattggacactccaaccaaaatatcagggaactacagatgggatccgtactttaaggactgtattggagctattgatggtacacatgtaagagccactgttcctagagatatggagcatgcctttcgtggtaggaagtcctatgcgactcaaaatgtaatggcagctgtagattttgatctacgcttcacttatgtgttggctggttgggagggaacagctcatgatgctaatgtattacgagatgctttagaacgtgtgaatggccttcgcgttccacaaggtaaattctaccttgttgatgcgggatatggagcaaaaccgggattcttgcctcctttccgtggtgtgagataccatttaaacgaatggggcaataatcccgtacaaaatgagaaagagttgtttaatctaaggcactcatctcttcgtgtcacagttgagcgtgcattcgggtcattgaagagaagattcaagattttagatgatgcatctcctttcttcccttttccaacacaagtcgatattgttgttgcttgttgtatcattcataattgggtcatacaagatggtcgtgatgattttattatacaagattctaattggcctagtcatagccatgctacatctttagttggccaagcaagtgagcatgctgctatggttgctttgaggcaaggaattgcagaccagatgtggacagaccatcagaactacaatggaaactagtatcttgtaatatttgtaagaactatttgtaaggatgctatgttattgcaaggatgtattggctactgtcttttatcagtaagaactatttgtaaggatgctatgttattgcaaggatgtatcttttatctgtaagaattatttgtaaggatgctatgttattgtaagggcatattggttgctgattttaatgttgctatgtcattgtaaggaagtattgtttgctaattttaatgttgctatgttattgtaaggaagtattgtttgctgatttttatgatcttgatacttgtagggaagaaatggaagctgaaggacaaggcttcactaatgggcatgctacctggacatcagcaatgtcctctttcatgttgtcctacctgtccaatgtggtgtcaagtggcgaaaggacatcgtctggttttaagaaagttcactacaatagttgtgcaaaagctatcaatgaaaagttccaaatcgccctcaatggcgagcagattaaaaatcatctaaaaacttggtccagaaggtttgccaagataaataggataagaaaagtgagtggtataggctgggatgaagatagttttactattactatggatgaagagcactataatggctatgttaaggtaagtttgcaaaggattctaatgcagctttaggcgaagatgatgaagttgataatgaagaggtgatggcacatgctttcactaaaaggatgtccaattgtgatgataatgccacaacatcttctacaagcaagatcaggaagaaggcaaaaaaacgtgatagtgaagaggaggggttgattgctgcattcaaaagtgtcggggataccttatccagtgctattgagaaggttgccacaggggacactgatgtgccagatgatctttttgacagtttgataaaccttccaggttttgagcaaacccacatatctctttatttcaattatctggtggcgcaccctcacattgctagagccttcaacaagttgccattcgaccacaagttaatctgggctcgcaatttcgtcagtgaaaagttcccaggagtgtga

SEQ ID NO: 47628 - DNA, 2575 bp, Zea Mays
tctcttgctgtatgctctcatttttttcttcttcccagaactttgcattgcaatgccaaccaatacgacggtgtccacctaccgcccaccgctctcgttccaacctagttggaccaccccgtaaaaaatctgaggggagccggcctccacgaactcctccgctgcaacgacataaaagagccgcgtcgtcccttccctcccggcttcctggcctgcacctagcatctctccgcttcctccccatccgcgccgcctctgacgttgacctcggcggccgccaccggcgaggtcgcacctcgccggtcaccaccacccccgctgctcgatcttatatccctactccgaggatccctgtagcctcctccggccgcgcacccgcggaaccctagatctccgataccccgcgctccttcccgccgacggctacccgatcggaatgggccgccatcttcagtaaggtccaaggacccaggggtacccccctccgccttcgcgcgtgcgcggagcgccgccgcgatggccatccgcatcaccgtatcctattcgggctacctggcgcagaacctggccgcgtccttcggcctgcgctgcaccgccgccgcggctgcgggcgctggcgccgcgcccggtccagggtgccgcttcctccaggacgcgctatcccgccctttctgcctcttcgcctcctcccgccacgtcgacccccaccatgacgccgaggatcagaaccacccgaagcccgggcccaaggctctgtcccctgccgttgcagcaagaggagatggctactcactgttgctgccgcgatcgtgttccgcgaaggcgccgccgccggtggatgaccccccagcgtcgctggccgtggggctgctgtcggtgttcgcgtctgggatgggatcgactggcggcattgctggtgcatcctcccttgttgcgtcgccgtcaatatcaaccgggctcaaccctgcgtcgctcctcccgttcctgcaggcgagcaagtggctcccctgtagcgacatagtcgctgctgcaacgacgtcgcgcagctcaggacgcccagcaggtgcaacggctgcacctacaccgcgtacagctgcaccatcgcctcgtcctgcaccacgcgcagccgctccatcgccccgtcctgcaccatgcgcagccgttccatcgccccgtcatgtaccagtgccgtcacctgctgttgctgctccttccaaggtcggcatacaagcattggttgatagtgctagcatcgcctcaggttcagctgggattggaagaggggtcattgcctctggtgcagctggaatggtgaagaagagtggtgctagtcttcctgttggtgcaggggtgggaaggaagaccggttggctctcaaggtcaatgttcccaacatttgatgttggtgatcggatccttgctgagaagatttcgtacattttccgggaaccggaaattctggacattgtgatctttcgggcacctccagtccttcaggcattgggctacagcgcaggtgatgtgtttatcaagagagttgtggctaagggtggggatatcgttgaagtacgtgatggtaacttgattgttaatggagtagttcaggaggaagaatttgtgttggaaccagccgactacgaaatggatccgctggtataataactaatcttcttaccacatgctactaaagagccactattttgtagtcctactgtgcctgaaggctatgtctttgtactgggggataacagaaacaacagctttgattcacataactggggtccacttccagttaagaacatcctcgggagatctgtgctccgatactggccaccatctaggataacagatacaatatatcagcatgacatggtgcagcacacagctgttgcatcctgataatacattgtggcaataccacgtggtgcacgccaatttctcctttccctgcatagctttattgacaattgatatgcttagccgtggggttctttatttatttgttgtagccttgcctcaaatgtcgattgggcagcttggctgacagattagtttttttttccctccctacgggcagatgcttgtttaaagacagcaattcttgtactccgtagctaagaatgaatgccatataaatgttgcagtagataagcatcaaggagtgtaggatgaggatggcagttcttttgttttatgagatgagatggtgctctaaacttacgtaaaggaaatacgaagcatagaagagtgcccaagttgtgttatgtatttttttcattccttgatcttggatcaaagattcaaggcaaagtcagcctggtgcaaaggttttggttgaatccttgtatcctgccagataaggttttttgatggtgcaattttggattagcatttgccctagtatttagtgttttttagttctgtattcatttatgatgtaatacaactttgtgagcatagttctgtttggcctgctttgttcaatcgcagtgcgggttcaatactacgttgcctgatgttattgtctgttattttctttgtaactgtatatttttcatctggtactctgtttacc

SEQ ID NO: 47629 - DNA, 2518 bp, Zea Mays
tctcttgctgtatgctctcatttttttcttcttcccagaactttgcattgcaatgccaaccaatacgacggtgtccacctaccgcccaccgctctcgttccaacctagttggaccaccccgtaaaaaatctgaggggagccggcctccacgaactcctccgctgcaacgacataaaagagccgcgtcgtcccttccctcccggcttcctggcctgcacctagcatctctccgcttcctccccatccgcgccgcctctgacgttgacctcggcggccgccaccggcgaggtcgcacctcgccggtcaccaccacccccgctgctcgatcttatatccctactccgaggatccctgtagcctcctccggccgcgcacccgcggaaccctagatctccgataccccgcgctccttcccgccgacggctacccgatcggaatgggccgccatcttcagtaaggtccaaggacccaggggtacccccctccgccttcgcgcgtgcgcggagcgccgccgcgatggccatccgcatcaccgtatcctattcgggctacctggcgcagaacctggccgcgtccttcggcctgcgctgcaccgccgccgcggctgcgggcgctggcgccgcgcccggtccagggtgccgcttcctccaggacgcgctatcccgccctttctgcctcttcgcctcctcccgccacgtcgacccccaccatgacgccgaggatcagaaccacccgaagcccgggcccaaggctctgtcccctgccgttgcagcaagaggagatggctactcactgttgctgccgcgatcgtgttccgcgaaggcgccgccgccggtggatgaccccccagcgtcgctggccgtggggctgctgtcggtgttcgcgtctgggatgggatcgactggcggcattgctggtgcatcctcccttgttgcgtcgccgtcaatatcaaccgggctcaaccctgcgtcgctcctcccgttcctgcaggcgagcaagtggctcccctgtagcgacatagtcgctgctgcaacgacgtcgcgcagctcaggacgcccagcaggtgcaacggctgcacctacaccgcgtacagctgcaccatcgcctcgtcctgcaccacgcgcagccgctccatcgccccgtcctgcaccatgcgcagccgttccatcgccccgtcatgtaccagtgccgtcacctgctgttgctgctccttccaaggtcggcatacaagcattggttgatagtgctagcatcgcctcaggttcagctgggattggaagaggggtcattgcctctggtgcagctggaatggtgaagaagagtggtgctagtcttcctgttggtgcaggggtgggaaggaagaccggttggctctcaaggtcaatgttcccaacatttgatgttggtgatcggatccttgctgagaagatttcgtacattttccgggaaccggaaattctggacattgtgatctttcgggcacctccagtccttcaggcattgggctacagcgcaggtgatgtgtttatcaagagagttgtggctaagggtggggatatcgttgaagtacgtgatggtaacttgattgttaatggagtagttcaggaggaagaatttgtgttggaaccagccgactacgaaatggatccgctgactgtgcctgaaggctatgtctttgtactgggggataacagaaacaacagctttgattcacataactggggtccacttccagttaagaacatcctcgggagatctgtgctccgatactggccaccatctaggataacagatacaatatatcagcatgacatggtgcagcacacagctgttgcatcctgataatacattgtggcaataccacgtggtgcacgccaatttctcctttccctgcatagctttattgacaattgatatgcttagccgtggggttctttatttatttgttgtagccttgcctcaaatgtcgattgggcagcttggctgacagattagtttttttttccctccctacgggcagatgcttgtttaaagacagcaattcttgtactccgtagctaagaatgaatgccatataaatgttgcagtagataagcatcaaggagtgtaggatgaggatggcagttcttttgttttatgagatgagatggtgctctaaacttacgtaaaggaaatacgaagcatagaagagtgcccaagttgtgttatgtatttttttcattccttgatcttggatcaaagattcaaggcaaagtcagcctggtgcaaaggttttggttgaatccttgtatcctgccagataaggttttttgatggtgcaattttggattagcatttgccctagtatttagtgttttttagttctgtattcatttatgatgtaatacaactttgtgagcatagttctgtttggcctgctttgttcaatcgcagtgcgggttcaatactacgttgcctgatgttattgtctgttattttctttgtaactgtatatttttcatctggtactctgtttacc

SEQ ID NO: 47630 - DNA, 2675 bp, Zea Mays
tctcttgctgtatgctctcatttttttcttcttcccagaactttgcattgcaatgccaaccaatacgacggtgtccacctaccgcccaccgctctcgttccaacctagttggaccaccccgtaaaaaatctgaggggagccggcctccacgaactcctccgctgcaacgacataaaagagccgcgtcgtcccttccctcccggcttcctggcctgcacctagcatctctccgcttcctccccatccgcgccgcctctgacgttgacctcggcggccgccaccggcgaggtcgcacctcgccggtcaccaccacccccgctgctcgatcttatatccctactccgaggatccctgtagcctcctccggccgcgcacccgcggaaccctagatctccgataccccgcgctccttcccgccgacggctacccgatcggaatgggccgccatcttcagtaaggtccaaggacccaggggtacccccctccgccttcgcgcgtgcgcggagcgccgccgcgatggccatccgcatcaccgtatcctattcgggctacctggcgcagaacctggccgcgtccttcggcctgcgctgcaccgccgccgcggctgcgggcgctggcgccgcgcccggtccagggtgccgcttcctccaggacgcgctatcccgccctttctgcctcttcgcctcctcccgccacgtcgacccccaccatgacgccgaggatcagaaccacccgaagcccgggcccaaggctctgtcccctgccgttgcagcaagaggagatggctactcactgttgctgccgcgatcgtgttccgcgaaggcgccgccgccggtggatgaccccccagcgtcgctggccgtggggctgctgtcggtgttcgcgtctgggatgggatcgactggcggcattgctggtgcatcctcccttgttgcgtcgccgtcaatatcaaccgggctcaaccctgcgtcgctcctcccgttcctgcaggcgagcaagtggctcccctgtagcgacatagtcgctgctgcaacgacgtcgcgcagctcaggacgcccagcaggtgcaacggctgcacctacaccgcgtacagctgcaccatcgcctcgtcctgcaccacgcgcagccgctccatcgccccgtcctgcaccatgcgcagccgttccatcgccccgtcatgtaccagtgccgtcacctgctgttgctgctccttccaaggtcggcatacaagcattggttgatagtgctagcatcgcctcaggttcagctgggattggaagaggggtcattgcctctggtgcagctggaatggtgaagaagagtggtgctagtcttcctgttggtgcaggggtgggaaggaagaccggttggctctcaaggtgggtgagctcatgctcagatgatgcgaagaccgtctttgccgctgtgaccgtgccactgctctataaatcatccctagctgagccgaggtccatcccatccaggtcaatgttcccaacatttgatgttggtgatcggatccttgctgagaaggcatctaatgtgtagcccctatcgtgactgtagatttcgtacattttccgggaaccggaaattctggacattgtgatctttcgggcacctccagtccttcaggcattgggctacagcgcaggtgatgtgtttatcaagagagttgtggctaagggtggggatatcgttgaagtaagcttttatcccaatggtacgtgatggtaacttgattgttaatggagtagttcaggaggaagaatttgtgttggaaccagccgactacgaaatggatccgctgactgtgcctgaaggctatgtctttgtactgggggataacagaaacaacagctttgattcacataactggggtccacttccagttaagaacatcctcgggagatctgtgctccgatactggccaccatctaggataacagatacaatatatcagcatgacatggtgcagcacacagctgttgcatcctgataatacattgtggcaataccacgtggtgcacgccaatttctcctttccctgcatagctttattgacaattgatatgcttagccgtggggttctttatttatttgttgtagccttgcctcaaatgtcgattgggcagcttggctgacagattagtttttttttccctccctacgggcagatgcttgtttaaagacagcaattcttgtactccgtagctaagaatgaatgccatataaatgttgcagtagataagcatcaaggagtgtaggatgaggatggcagttcttttgttttatgagatgagatggtgctctaaacttacgtaaaggaaatacgaagcatagaagagtgcccaagttgtgttatgtatttttttcattccttgatcttggatcaaagattcaaggcaaagtcagcctggtgcaaaggttttggttgaatccttgtatcctgccagataaggttttttgatggtgcaattttggattagcatttgccctagtatttagtgttttttagttctgtattcatttatgatgtaatacaactttgtgagcatagttctgtttggcctgctttgttcaatcgcagtgcgggttcaatactacgttgcctgatgttattgtctgttattttctttgtaactgtatatttttcatctggtactctgtttacc

SEQ ID NO: 47631 - DNA, 2642 bp, Zea Mays
tctcttgctgtatgctctcatttttttcttcttcccagaactttgcattgcaatgccaaccaatacgacggtgtccacctaccgcccaccgctctcgttccaacctagttggaccaccccgtaaaaaatctgaggggagccggcctccacgaactcctccgctgcaacgacataaaagagccgcgtcgtcccttccctcccggcttcctggcctgcacctagcatctctccgcttcctccccatccgcgccgcctctgacgttgacctcggcggccgccaccggcgaggtcgcacctcgccggtcaccaccacccccgctgctcgatcttatatccctactccgaggatccctgtagcctcctccggccgcgcacccgcggaaccctagatctccgataccccgcgctccttcccgccgacggctacccgatcggaatgggccgccatcttcagtaaggtccaaggacccaggggtacccccctccgccttcgcgcgtgcgcggagcgccgccgcgatggccatccgcatcaccgtatcctattcgggctacctggcgcagaacctggccgcgtccttcggcctgcgctgcaccgccgccgcggctgcgggcgctggcgccgcgcccggtccagggtgccgcttcctccaggacgcgctatcccgccctttctgcctcttcgcctcctcccgccacgtcgacccccaccatgacgccgaggatcagaaccacccgaagcccgggcccaaggctctgtcccctgccgttgcagcaagaggagatggctactcactgttgctgccgcgatcgtgttccgcgaaggcgccgccgccggtggatgaccccccagcgtcgctggccgtggggctgctgtcggtgttcgcgtctgggatgggatcgactggcggcattgctggtgcatcctcccttgttgcgtcgccgtcaatatcaaccgggctcaaccctgcgtcgctcctcccgttcctgcaggcgagcaagtggctcccctgtagcgacatagtcgctgctgcaacgacgtcgcgcagctcaggacgcccagcaggtgcaacggctgcacctacaccgcgtacagctgcaccatcgcctcgtcctgcaccacgcgcagccgctccatcgccccgtcctgcaccatgcgcagccgttccatcgccccgtcatgtaccagtgccgtcacctgctgttgctgctccttccaaggtcggcatacaagcattggttgatagtgctagcatcgcctcaggttcagctgggattggaagaggggtcattgcctctggtgcagctggaatggtgaagaagagtggtgctagtcttcctgttggtgcaggggtgggaaggaagaccggttggctctcaaggtgggtgagctcatgctcagatgatgcgaagaccgtctttgccgctgtgaccgtgccactgctctataaatcatccctagctgagccgaggtccatcccatccaggtcaatgttcccaacatttgatgttggtgatcggatccttgctgagaagatttcgtacattttccgggaaccggaaattctggacattgtgatctttcgggcacctccagtccttcaggcattgggctacagcgcaggtgatgtgtttatcaagagagttgtggctaagggtggggatatcgttgaagtaagcttttatcccaatggtacgtgatggtaacttgattgttaatggagtagttcaggaggaagaatttgtgttggaaccagccgactacgaaatggatccgctgactgtgcctgaaggctatgtctttgtactgggggataacagaaacaacagctttgattcacataactggggtccacttccagttaagaacatcctcgggagatctgtgctccgatactggccaccatctaggataacagatacaatatatcagcatgacatggtgcagcacacagctgttgcatcctgataatacattgtggcaataccacgtggtgcacgccaatttctcctttccctgcatagctttattgacaattgatatgcttagccgtggggttctttatttatttgttgtagccttgcctcaaatgtcgattgggcagcttggctgacagattagtttttttttccctccctacgggcagatgcttgtttaaagacagcaattcttgtactccgtagctaagaatgaatgccatataaatgttgcagtagataagcatcaaggagtgtaggatgaggatggcagttcttttgttttatgagatgagatggtgctctaaacttacgtaaaggaaatacgaagcatagaagagtgcccaagttgtgttatgtatttttttcattccttgatcttggatcaaagattcaaggcaaagtcagcctggtgcaaaggttttggttgaatccttgtatcctgccagataaggttttttgatggtgcaattttggattagcatttgccctagtatttagtgttttttagttctgtattcatttatgatgtaatacaactttgtgagcatagttctgtttggcctgctttgttcaatcgcagtgcgggttcaatactacgttgcctgatgttattgtctgttattttctttgtaactgtatatttttcatctggtactctgtttacc

SEQ ID NO: 47632 - DNA, 2656 bp, Zea Mays
tctcttgctgtatgctctcatttttttcttcttcccagaactttgcattgcaatgccaaccaatacgacggtgtccacctaccgcccaccgctctcgttccaacctagttggaccaccccgtaaaaaatctgaggggagccggcctccacgaactcctccgctgcaacgacataaaagagccgcgtcgtcccttccctcccggcttcctggcctgcacctagcatctctccgcttcctccccatccgcgccgcctctgacgttgacctcggcggccgccaccggcgaggtcgcacctcgccggtcaccaccacccccgctgctcgatcttatatccctactccgaggatccctgtagcctcctccggccgcgcacccgcggaaccctagatctccgataccccgcgctccttcccgccgacggctacccgatcggaatgggccgccatcttcagtaaggtccaaggacccaggggtacccccctccgccttcgcgcgtgcgcggagcgccgccgcgatggccatccgcatcaccgtatcctattcgggctacctggcgcagaacctggccgcgtccttcggcctgcgctgcaccgccgccgcggctgcgggcgctggcgccgcgcccggtccagggtgccgcttcctccaggacgcgctatcccgccctttctgcctcttcgcctcctcccgccacgtcgacccccaccatgacgccgaggatcagaaccacccgaagcccgggcccaaggctctgtcccctgccgttgcagcaagaggagatggctactcactgttgctgccgcgatcgtgttccgcgaaggcgccgccgccggtggatgaccccccagcgtcgctggccgtggggctgctgtcggtgttcgcgtctgggatgggatcgactggcggcattgctggtgcatcctcccttgttgcgtcgccgtcaatatcaaccgggctcaaccctgcgtcgctcctcccgttcctgcaggcgagcaagtggctcccctgtagcgacatagtcgctgctgcaacgacgtcgcgcagctcaggacgcccagcaggtgcaacggctgcacctacaccgcgtacagctgcaccatcgcctcgtcctgcaccacgcgcagccgctccatcgccccgtcctgcaccatgcgcagccgttccatcgccccgtcatgtaccagtgccgtcacctgctgttgctgctccttccaaggtcggcatacaagcattggttgatagtgctagcatcgcctcaggttcagctgggattggaagaggggtcattgcctctggtgcagctggaatggtgaagaagagtggtgctagtcttcctgttggtgcaggggtgggaaggaagaccggttggctctcaaggtgggtgagctcatgctcagatgatgcgaagaccgtctttgccgctgtgaccgtgccactgctctataaatcatccctagctgagccgaggtccatcccatccaggtcaatgttcccaacatttgatgttggtgatcggatccttgctgagaaggcatctaatgtgtagcccctatcgtgactgtagatttcgtacattttccgggaaccggaaattctggacattgtgatctttcgggcacctccagtccttcaggcattgggctacagcgcaggtgatgtgtttatcaagagagttgtggctaagggtggggatatcgttgaagtacgtgatggtaacttgattgttaatggagtagttcaggaggaagaatttgtgttggaaccagccgactacgaaatggatccgctgactgtgcctgaaggctatgtctttgtactgggggataacagaaacaacagctttgattcacataactggggtccacttccagttaagaacatcctcgggagatctgtgctccgatactggccaccatctaggataacagatacaatatatcagcatgacatggtgcagcacacagctgttgcatcctgataatacattgtggcaataccacgtggtgcacgccaatttctcctttccctgcatagctttattgacaattgatatgcttagccgtggggttctttatttatttgttgtagccttgcctcaaatgtcgattgggcagcttggctgacagattagtttttttttccctccctacgggcagatgcttgtttaaagacagcaattcttgtactccgtagctaagaatgaatgccatataaatgttgcagtagataagcatcaaggagtgtaggatgaggatggcagttcttttgttttatgagatgagatggtgctctaaacttacgtaaaggaaatacgaagcatagaagagtgcccaagttgtgttatgtatttttttcattccttgatcttggatcaaagattcaaggcaaagtcagcctggtgcaaaggttttggttgaatccttgtatcctgccagataaggttttttgatggtgcaattttggattagcatttgccctagtatttagtgttttttagttctgtattcatttatgatgtaatacaactttgtgagcatagttctgtttggcctgctttgttcaatcgcagtgcgggttcaatactacgttgcctgatgttattgtctgttattttctttgtaactgtatatttttcatctggtactctgtttacc

SEQ ID NO: 47633 - DNA, 1026 bp, Zea Mays
ttttatcccaatggtacgtgatggtaacttgattgttaatggagtagttcaggaggaagaatttgtgttggaaccagccgactacgaaatggatccgctggtataataactaatcttcttaccacatgctactaaagagccactattttgtagtcctgtaaactgtgcctgaaggctatgtctttgtactgggggataacagaaacaacagctttgattcacataactggggtccacttccagttaagaacatcctcgggagatctgtgctccgatactggccaccatctaggataacagatacaatatatcagcatgacatggtgcagcacacagctgttgcatcctgataatacattgtggcaataccacgtggtgcacgccaatttctcctttccctgcatagctttattgacaattgatatgcttagccgtggggttctttatttatttgttgtagccttgcctcaaatgtcgattgggcagcttggctgacagattagtttttttttccctccctacgggcagatgcttgtttaaagacagcaattcttgtactccgtagctaagaatgaatgccatataaatgttgcagtagataagcatcaaggagtgtaggatgaggatggcagttcttttgttttatgagatgagatggtgctctaaacttacgtaaaggaaatacgaagcatagaagagtgcccaagttgtgttatgtatttttttcattccttgatcttggatcaaagattcaaggcaaagtcagcctggtgcaaaggttttggttgaatccttgtatcctgccagataaggttttttgatggtgcaattttggattagcatttgccctagtatttagtgttttttagttctgtattcatttatgatgtaatacaactttgtgagcatagttctgtttggcctgctttgttcaatcgcagtgcgggttcaatactacgttgcctgatgttattgtctgttattttctttgtaactgtatatttttcatctggtactctgtttacc

SEQ ID NO: 47634 - DNA, 2153 bp, Zea Mays
acagaaactttctgtgcaccaatgacctttaatgcaatgccatccgcaacaaatatcctcttaagccttgtgtatgtggcattcccctgcataagaattaataagtgcgacataatattcggcaaacaatcgaggaacagatcatagtgcacatttcctaacgctatgacttgacaaagcatactttcaatgaaacaggatggcatacaaaatctactaacgacaatagcctgtgatgattgttgtaagttagtgaaaagatactagcacagaatatgaagtggtcactaattcatcaaagaatgggtactatatgcagaaaaccaagaaaccatatgcttttgtcaaatgctcatcagatgtcaattaaaaagtgaattattaatacaggttcaaaagtgacaatggcagcataactcaaaatcagatatctaaaatctatccagcaaagttctaactggtaagcatcgacggggttgctttgctgctattgtaatggtgttgcaaaatgtatggcttctgtggccgatggagcctaaaattttaggtatagcagtggcacaccatgctcatacttgatattgagaacacccactctcaccggcttcatatccagtggcagaggacgaaataaattttaggtatggtgaatatgatagtatacacaatggtgtaagactcaaaacagaagtttgaatacgcatgcaaatacaagatgccatgagttgatctcacaagtgtattattctttacctgacctctttcacaaaagcattgtaaatcaacaaaccatttacttaacaacaatgaattaaaaacaactaaaataataaacaagtaaacaagctgcgcatcatgtgctaattagctaaatttctgacctatgcacatcatatgaactcaacagccagctctcgtgtagtcgtgctagacttgggtggtggccggtggccgaatgggccactttatatcacttaatgtgtcggcgtcgtggccactcaccgtatgggggctggccttaagagaagttcattagcactttagtacatttaagcccaaataatagcccaaaactgtttgttctctttctcgttgcttcgctagaaagctatggtaaactaagacaccggatggcagaaaagagatagtgtcaagtgattcgctagggttatttaggaggaatcaatgtatggcgggcgtcataccccgccagtgggtcctctgcccctgtatggctttatgcattaataataccgtgaagttcttaacaggtaatggaagggactaaacataatagcaagatcattgcagcaatacttaaacccctccaaaaagaaccataggcttcactccataaccaaagcagatctccatgtcctgttatcctattcatgctcttctccattatagtcagcaaagccagcaatactcacagtacatgacaagccagaaaaacagcatttattttatgtgtcaccagtcgttccatcttgttttttttattgagctacatttgttccaatttaaacaatcagaaagttacatccacttctatctaagaaaaccaccatctatctaaacttgcatcagtaaaatgaggacaaaaaaggcagaagcatcctaatttgaatatctacaaatactgccatctatctgtattcattaatgacaaatttccatatagcatgcaccaatgattacctactgaaacttaaatgaacacaatctattacactatgcttaaccttcaccatcaatggtccgttacttaatatccccaatttagacaagttagaatagcaccttgaatcaagctgaattctgattctacacaataccataccaatgcgcaatggcataaaaaaattgggcaaagctatccaagtgtcactacaagttgaacacacaaaacaaactaaacaagggtccgtactgatttaacattcaactactacaaacaaacaatataaagtcatcagcaacactaaatactggggtgggggatatacaggttcagatatacttcaacagtaatagctgctgctaaatcaactcagctgttgaaccataaccatcaaagctttgagctaacacagcttttacaccaacctttactcgaaaactaacatgcaagcaaccgatcgggatcggat

SEQ ID NO: 47635 - DNA, 1719 bp, Zea Mays
gaactcacggacagtattcaggagaactcacgtttctcttggtcagccagtgacatcaccaacttgttgacggtagggagagcaagttcttcggcgatttgagaagaaacgaggagcgagagagcgtgggtgcgtggggggtgggggctgcgcccggggcccccggatcacggaatcctacccttaccaaccctagcctccattggtcgccgtctcgggccatggcagggccggcgccggatcgggccgccctgactgtgggtccgggcatggacatgccgatcatgcacgacagcgaccggtacgagctcgtgcgcgacatcggctccggcaacttcggcgttgcccgcctcatgcgcgaccgccgcaccaccgaactcgtcgccgtcaagtacatcgagcgtggcgagaagatagatgagaatgtccagcgcgaaataattaaccatagatcattgaaacaccctaacattattaggtttaaagaggttattttaacaccgacccatcttgctattgtcatggaatatgcctctggcggtgagctttttgagagaatatgtaagaacgtgcgattcagtgaagatgaggctcgctacttcttccaacaactcatttcaggagtaagctactgccattcaatgcaagtatgccaccgtgatttgaagctggagaacacacttctagatgggagtgatgctcctcgcttgaagatatgtgacttcggttattccaagtcatctgttcttcattcccaaccgaagtcaactgttggaacacctgcttatattgcacctgaagttctgttgaaaaaagaatatgatggcaagattgctgatgtttggtcatgtggtgtaaccctctatgtaatggctgttggtgcatatccttttgaagacccagaagagcctaagaacttccgcaagacaattcagcgcatcttgaacgttcagtacgccattccagactacgtgaacatatctccagagtgcaggcatctaatttcgaggatttttgttggtgatcctgctatggcaagtccttgtagttataatcgtgctttgatcctgatacacgaataacaatcactgaaatccggaatcatagttggttcctgaagaaccttcctgctgatcttatggatgatgatagcatgagcaaccaatatgaggagcctgatcagccaatgcagaccatggatcagatcatgcagattttaacagaggccaccataccacctgcctgttctcgcagtataaatgttctagctgatggactggacatggacgacgacatggatgatcttgactccgattcggatcttgatgttgacagcagcggtgagattgtatacgcaatgtgagtaacatctcagtaaccatctcagtatctcaccagtcaaccaaagaaccaatcaggcatgggacaccctgatgttgtacactctgccaaagacctagcatccttttgtaaaatatctccctgtagttttctcaaagaagcgcaagcccaacctgttctggggaacacggatgctgtagtcaaactggggttattcagattgtaaaactggcctcttgcttcctgcttactctcaggcttcgacttgtgtgttgctgttgaatatgtacttacaagaaacttctacggagtactcatgttgatctgttcgaagctaacatcggaaagagcatttaaaaattctgttggtggctttca

SEQ ID NO: 47636 - DNA, 1780 bp, Zea Mays
gaactcacggacagtattcaggagaactcacgtttctcttggtcagccagtgacatcaccaacttgttgacggtagggagagcaagttcttcggcgatttgagaagaaacgaggagcgagagagcgtgggtgcgtggggggtgggggctgcgcccggggcccccggatcacggaatcctacccttaccaaccctagcctccattggtcgccgtctcgggccatggcagggccggcgccggatcgggccgccctgactgtgggtccgggcatggacatgccgatcatgcacgacagcgaccggtacgagctcgtgcgcgacatcggctccggcaacttcggcgttgcccgcctcatgcgcgaccgccgcaccaccgaactcgtcgccgtcaagtacatcgagcgtggcgagaagatagatgagaatgtccagcgcgaaataattaaccatagatcattgaaacaccctaacattattaggtttaaagaggttattttaacaccgacccatcttgctattgtcatggaatatgcctctggcggtgagctttttgagagaatatgtaagaacgtgcgattcagtgaagatgaggctcgctacttcttccaacaactcatttcaggacaagtatgccaccgtgatttgaagctggagaacacacttctagatgggagtgatgctcctcgcttgaagatatgtgacttcggttattccaagtcatctgttcttcattcccaaccgaagtcaactgttggaacacctgcttatattgcacctgaagttctgttgaaaaaagaatatgatggcaagattgctgatgtttggtcatgtggtgtaaccctctatgtaatggctgttggtgcatatccttttgaagacccagaagagcctaagaacttccgcaagacaattcagcgcatcttgaacgttcagtacgccattccagactacgtgaacatatctccagagtgcaggcatctaatttcgaggatttttgttggtgatcctgctatggcaagtccttgtagttataatcgtgctttgatcctgatacagtaggttcagaagatacgttgtttcaggtttggtcatatttatccgattttgttgtatttatgtgttatataaaatatgcagcgaataacaatcactgaaatccggaatcatagttggttcctgaagaaccttcctgctgatcttatggatgatgatagcatgagcaaccaatatgaggagcctgatcagccaatgcagaccatggatcagatcatgcagattttaacagaggccaccataccacctgcctgttctcgcagtataaatgttctagctgatggactggacatggacgacgacatggatgatcttgactccgattcggatcttgatgttgacagcagcggtgagattgtatacgcaatgtgagtaacatctcagtaaccatctcagtatctcaccagtcaaccaaagaaccaatcaggcatgggacaccctgatgttgtacactctgccaaagacctagcatccttttgtaaaatatctccctgtagttttctcaaagaagcgcaagcccaacctgttctggggaacacggatgctgtagtcaaactggggttattcagattgtaaaactggcctcttgcttcctgcttactctcaggcttcgacttgtgtgttgctgttgaatatgtacttacaagaaacttctacggagtactcatgttgatctgttcgaagctaacatcggaaagagcatttaaaaattctgttggtggctttca

SEQ ID NO: 47637 - DNA, 1687 bp, Zea Mays
gaactcacggacagtattcaggagaactcacgtttctcttggtcagccagtgacatcaccaacttgttgacggtagggagagcaagttcttcggcgatttgagaagaaacgaggagcgagagagcgtgggtgcgtggggggtgggggctgcgcccggggcccccggatcacggaatcctacccttaccaaccctagcctccattggtcgccgtctcgggccatggcagggccggcgccggatcgggccgccctgactgtgggtccgggcatggacatgccgatcatgcacgacagcgaccggtacgagctcgtgcgcgacatcggctccggcaacttcggcgttgcccgcctcatgcgcgaccgccgcaccaccgaactcgtcgccgtcaagtacatcgagcgtggcgagaagatagatgagaatgtccagcgcgaaataattaaccatagatcattgaaacaccctaacattattaggtttaaagaggttattttaacaccgacccatcttgctattgtcatggaatatgcctctggcggtgagctttttgagagaatatgtaagaacgtgcgattcagtgaagatgaggctcgctacttcttccaacaactcatttcaggagtaagctactgccattcaatgcaagtatgccaccgtgatttgaagctggagaacacacttctagatgggagtgatgctcctcgcttgaagatatgtgacttcggttattccaagtcatctgttcttcattcccaaccgaagtcaactgttggaacacctgcttatattgcacctgaagttctgttgaaaaaagaatatgatggcaagattgctgatgtttggtcatgtggtgtaaccctctatgtaatggctgttggtgcatatccttttgaagacccagaagagcctaagaacttccgcaagacaattcagcgcatcttgaacgttcagtacgccattccagactacgtgaacatatctccagagtgcaggcatctaatttcgaggatttttgttggtgatcctgctatggcaagtccttgtagttataatcgtgctttgatcctgatacattggttcctgaagaaccttcctgctgatcttatggatgatgatagcatgagcaaccaatatgaggagcctgatcagccaatgcagaccatggatcagatcatgcagattttaacagaggccaccataccacctgcctgttctcgcagtataaatgttctagctgatggactggacatggacgacgacatggatgatcttgactccgattcggatcttgatgttgacagcagcggtgagattgtatacgcaatgtgagtaacatctcagtaaccatctcagtatctcaccagtcaaccaaagaaccaatcaggcatgggacaccctgatgttgtacactctgccaaagacctagcatccttttgtaaaatatctccctgtagttttctcaaagaagcgcaagcccaacctgttctggggaacacggatgctgtagtcaaactggggttattcagattgtaaaactggcctcttgcttcctgcttactctcaggcttcgacttgtgtgttgctgttgaatatgtacttacaagaaacttctacggagtactcatgttgatctgttcgaagctaacatcggaaagagcatttaaaaattctgttggtggctttca

SEQ ID NO: 47638 - DNA, 1339 bp, Zea Mays
gtccttcctctaatcctctcttcctctactacgtgtccaggtgtccaagagacagagagagagagagatgcatggacgcatttctgaaaccatttttgtagaaccagcagtcgctgcgtttggtcagtcaggcggatgcggaaagtgtctgattcttttgttagcaactggcaggcactcagaatcttgcgataacatatacaaagtccggtcctttgacgcagcaggagcggtgtgtgcctacgcattcttcctgatcagtgttgatggtcttagactatctccaaccgagtagccaatacaatacgcatacacaaattgcctgaccttgtagcactgtagcgcttgggaaatacttccaacgggctatgcaaactaaatacgcatctacggcgctggacccctcggcacctaaaactgagtcctctccacccacgactcaaaccctggcaaaccaactgtcgggaggggaggccgaagagagcagcgagttggtggcgcagacgaccacccgcgacgggcgcacacccccaccggcgacggcgcgcgcggtcaccggcaaccgacgcggacgaccacatctgagtacgagatggaacaaaattttgatggttgcacagatggtaatgagcaagcccaggatttgtttgggcaagaccagtgggctaatggttttactgctgcacttcaagactttgatgatgctcaacctacccagtacaacatggccagcttcgaccaatctagccagatgtacgaacatgactcggacagtaatatagatatggagaatgtggatgccccatcaaagaaatctcagaagggcacaaagaaatctcagaagggcggaaaacaaaaggttgtgtcgaggagaggaggttcttttaccaaagaggaggatattgtgatttgctcggcattcctcaatgttagcaaagaccctattacaggtgtcaatcaaaattcgggtgggtattacaaacgcatgcatgaatacttcaacaagcgcaaaccagaaggttccaaccgtagccagatctcaattcaacataggtggggagccatacagaaggcagtgaataagttttgtgccctcaaatcatcagtagataggcgcaatgagagcggtaaaagcgagcaggatcgaattgatgatgctgttttcatgtatgagaagggtgaaccctttgtcttcatgcattgctggaagctacttcgcaacgaggcgaaatggaacaataggttcctagagaccatcagtaagccaccatcttctcaagtgccacccgaggcaggttccacatgtgctccatcagatccttctggagttgatgattag

SEQ ID NO: 47639 - DNA, 1358 bp, Zea Mays
ccttcctctaatcctctcttcctctactacgtgtccaggtgtccaagagacagagagagagagagatgcatggacgcatttctgaaaccatttttgtagaaccagcagtcgctgcgtttggtcagtcaggcggatgcggaaagtgtctgattcttttgttagcaactggcaggcactcagaatcttgcgataacatatacaaagtccggtcctttgacgcagcaggagcggtgtgtgcctacgcattcttcctgatcagtgttgatggtcttagactatctccaaccgagtagccaatacaatacgcatacacaaattgcctgaccttgtagcactgtagcgcttgggaaatacttccaacgggctatgcaaactaaatacgcatctacggcgctggacccctcggcacctaaaactgagtcctctccacccacgactcaaaccctggcaaaccaactgtcgggaggggaggccgaagagagcagcgagttggtggcgcagacgaccacccgcgacgggcgcacacccccaccggcgacggcgcgcgcggtcaccggcaaccgacgcggacgaccacatctgagatggtaatgagcaagcccaggatttgtttgggcaagaccagtgggctaatggttttactgctgcacttcaagactttgatgatgctcaacctacccagtacaacatggccagcttcgaccaatctagccagatgtacgaacatgactcggacagtaatatagatatggagaatgtggatgccccatcaaagaaatctcagaagggcacaaagaaatctcagaagggcggaaaacaaaaggttgtgtcgaggagaggaggttcttttaccaaagaggaggatattgtgatttgctcggcattcctcaatgttagcaaagaccctattacaggtgtcaatcaaaattcgggtgggtattacaaacgcatgcatgaatacttcaacaagcgcaaaccagaaggttccaaccgtagccagatctcaattcaacataggtggggagccatacagaaggcagtgaataagttttgtgccctcaaatcatcagtagataggcgcaatgagagcggtaaaagcgagcaggatcgaattgatgatgctgttttcatgtatgagaagggtgaaccctttgtcttcatgcattgctggaagctacttcgcaacgaggcgaaatggaacaataggttcctagagaccatcagtaagccaccatcttctcaagtgccacccgaggcagccaacagagaaggagcagggctaataagcaagctgattacagttctaggaaagaggttccacatgtgctccatcagatccttctggagttgatgattag

SEQ ID NO: 47640 - DNA, 1461 bp, Zea Mays
ctctcttcctctactacgtgtccaggtgtccaagagacagagagagagagagatgcatggacgcatttctgaaaccatttttgtagaaccagcagtcgctgcgtttggtcagtcaggcggatgcggaaagtgtctgattcttttgttagcaactggcaggcactcagaatcttgcgataacatatacaaagtccggtcctttgacgcagcaggagcggtgtgtgcctacgcattcttcctgatcagtgttgatggtcttagactatctccaaccgagtagccaatacaatacgcatacacaaattgcctgaccttgtagcactgtagcgcttgggaaatacttccaacgggctatgcaaactaaatacgcatctacggcgctggacccctcggcacctaaaactgagtcctctccacccacgactcaaaccctggcaaaccaactgtcgggaggggaggccgaagagagcagcgagttggtggcgcagacgaccacccgcgacgggcgcacacccccaccggcgacggcgcgcgcggtcaccggcaaccgacgcggacgaccacatctgagtacgagatggaacaaaattttgatggttgcacagatggtaatgagcaagcccaggatttgtttgggcaagaccagtgggctaatggttttactgctgcacttcaagactttgatgatgctcaacctacccagtacaacatggccagcttcgaccaatctagccagatgtacgaacatgactcggacagtaatatagatatggagaatgtggatgccccatcaaagaaatctcagaagggcacaaagaaatctcagaagggcggaaaacaaaaggttgtgtcgaggagaggaggttcttttaccaaagaggaggatattgtgatttgctcggcattcctcaatgttagcaaagaccctattacaggtgtcaatcaaaattcgggtgggtattacaaacgcatgcatgaatacttcaacaagcgcaaaccagaaggttccaaccgtagccagatctcaattcaacataggtggggagccatacagaaggcagtgaataagttttgtgccctcaaatcatcagtagataggcgcaatgagagcggtaaaagcgagcaggatcgaattgatgatgctgttttcatgtatgagaagggtgaaccctttgtcttcatgcattgctggaagctacttcgcaacgaggcgaaatggaacaataggttcctagagaccatcagtaagccaccatcttctcaagtgccacccgaggcagccaacagagaaggagcagggctaataagcaagctgattacagttctaggaaagaggttacataacaaaatacatgactaattatgttgcttaggcaattggctttggcacaaacggtccagactttgttccatacaggttccacatgtgctccatcagatccttctggagttgatgattag

SEQ ID NO: 47641 - DNA, 3104 bp, Zea Mays
aatgcctacattattcaatcatgatgtcatgtagggccaccactaccagtgcagatcgcgcggtcagaagcaacaaacgccggcagcaaaggcttaggcgctaagggaggaagttagcatgcagataagcatggctagaaagtaggagataagtattagggttgtttagataagaggataagtagataagaggataagtagcaggtgtttgtttagataataggataagtagcaggagtttgttagggaaccaggctatataatgttggcaggtgattgaataaagtaagcaagaattatttgtctcattcccctcctttgcctctcaaatctcacctccttcaccatcgggctgccgggcaaaaatcccgacgccattatcggtcgaggctacgaactccgtagtcgaggccccgctgtcttgggcgccgacgcccttgacatgaggcatactacttctcacaaataattcaaaacaatgtcacacaagggtttgggtttggctattcagtgactatttgagaagacaacctctcagcatatctgaaaagggtgaattcctctacctagaccaatcagtcttctgtgttatttcaccacttatttgaatgtctaacaagtgacataaggcatgaggctgcagaagaaccatataatgattaatggtacactaacacttgcagatacaatttcattgggctgtagcccatgaaatgaaagttgaaactgataaggctataccgccagtactgtaagggttttgaaaatctattttccaatttcccagaactttgctgggggccaggagacatctcactgcattctgttatcttatttccattacaacagttttcaagaagtccaacataacatgtcaaaagtgacctacaattttccgttcccgctacccacagggattttcccagttactgacaggaattggctggttgctgctgcaatttagaactctaggtattggccatagtgaatagtgttgaatatatacccaatagataatgatccatgagaatgataatgggtctttagggtaaaaggcgattaacatgaggtctatatatatgaaggggctgacatgctagagtagagagactcgtcctaatagttgtcaccaccgtctctctcctgagggttgcgggcacccaagacgccgatgccttttatcttcttgtgcgtgcaatgctagcacactagcatcgcagtgttttatcctcgcacgtgtggatatcgtggagaagttgttgttgcggtgttgatcatcatcaaacttgatgaacatgggtgaatgtgttgttgctgctagtgcgcgaggacatacgactacttccactacatcgccgcgctcctcttccgctgcgcatatagtggtaacgatccatgatcctctattgacatgctattttggttgaacgtgatagatgggctagtgcatagcatacccattttcccacagataagggcatacaacctatttctggaaggcgactgaaataaaaaagggcccaaaagaaaatagaactcaagtattagctactctagagcatctgctgaggtggcttctatgcattgcctagtgaataagagtataatagattatatggccactgttttaaagggacgcctaggcatccaaacatccaaaaaaatcctaggcgccttgctcgcctacctcgcctaggcatccaggcggcggtccaacgccttgtagtgccataccgctttaagaaccatgtatgtggcacttgcagatgatctagaccagggtaatatgaaactagatactaggaagttgttagccttaggagggaatatcattcattgtgcaacaatttcatgagttcatatgctccatagtattcaatgataacaatgaatccagaagttctagtttctctgacctcatagctcgaattccaaatacaacactacatataataattacataatgtaagggtataataaaaacagcatatcatatggtatgatattcaattataaaaagaagccttatggttcacaaaaaagagtctcctgcttgaacgattgaaccgctctatcaatatgtattgaaaaggctaagttcacatgataataaaaacagcaacacagtatccaggaaaaggaatttacctgcaggttgttctcttttatgtagtcccacattctcttcacaacatccgatcgtgataacatgctctcaccagtgccgataaatttcattaaatcatccgaaagttgaaggggcacaagaagaccagatccagctcctgaagagccacccttttgcttctttcctgcaaaagatatttcatcaacaggagagacaggacctagcaaatcatagtcaagtaagcactttggagtagaactgaaactctgctagctcctgacttctactggtacacacagaattagcgcacaatggatcaataccctcagaattcaatggccagatatgcttggtcaaagctttattcatttggaacatatcaatggaattgacattgaagatcttcttcaatctctcatcaggcaaaatcttcctcctattgttttggtcttgcagattattttctcgaatatatgcccaaagcttcttgacaacctgaaagcaaacaagcacagcaagaaagaaatcagtggcattatcatcttcatgattaattggtatcacatccaatgcaagatagatatggaaggacagtaatcaggtaatggtgtttacctctgtcctggctaactcagaggcgccgacaaactcttgaagtgccggggaaagactgcatagttttgtaaagccaccaccccttttcttgccatcattacccctatttaacacaatgtgattatacagaaacaaccagaattaccaataaggaaagttgtgcacgtgcgtaaaagagctggtaaacctgtttaacagtttaaccgtcaagaaatatgacacaaacatgcaagctggcatgctaagtgtcggtgttttgacccgagaatcctaccaactagtgaaatgatgctacgtgctccggcctagatgggtgatgcaaggtgacacaagtctttatcctggttcgggcaagagaatg

SEQ ID NO: 47642 - DNA, 3320 bp, Zea Mays
aatgcctacattattcaatcatgatgtcatgtagggccaccactaccagtgcagatcgcgcggtcagaagcaacaaacgccggcagcaaaggcttaggcgctaagggaggaagttagcatgcagataagcatggctagaaagtaggagataagtattagggttgtttagataagaggataagtagataagaggataagtagcaggtgtttgtttagataataggataagtagcaggagtttgttagggaaccaggctatataatgttggcaggtgattgaataaagtaagcaagaattatttgtctcattcccctcctttgcctctcaaatctcacctccttcaccatcgggctgccgggcaaaaatcccgacgccattatcggtcgaggctacgaactccgtagtcgaggccccgctgtcttgggcgccgacgcccttgacatgaggcatactacttctcacaaataattcaaaacaatgtcacacaagggtttgggtttggctattcagtgactatttgagaagacaacctctcagcatatctgaaaagggtgaattcctctacctagaccaatcagtcttctgtgttatttcaccacttatttgaatgtctaacaagtgacataaggcatgaggctgcagaagaaccatataatgattaatggtacactaacacttgcagatacaatttcattgggctgtagcccatgaaatgaaagttgaaactgataaggctataccgccagtactgtaagggttttgaaaatctattttccaatttcccagaactttgctgggggccaggagacatctcactgcattctgttatcttatttccattacaacagttttcaagaagtccaacataacatgtcaaaagtgacctacaattttccgttcccgctacccacagggattttcccagttactgacaggaattggctggttgctgctgcaatttagaactctaggtattggccatagtgaatagtgttgaatatatacccaatagataatgatccatgagaatgataatgggtctttagggtaaaaggcgattaacatgaggtctatatatatgaaggggctgacatgctagagtagagagactcgtcctaatagttgtcaccaccgtctctctcctgagggttgcgggcacccaagacgccgatgccttttatcttcttgtgcgtgcaatgctagcacactagcatcgcagtgttttatcctcgcacgtgtggatatcgtggagaagttgttgttgcggtgttgatcatcatcaaacttgatgaacatgggtgaatgtgttgttgctgctagtgcgcgaggacatacgactacttccactacatcgccgcgctcctcttccgctgcgcatatagtggtaacgatccatgatcctctattgacatgctattttggttgaacgtgatagatgggctagtgcatagcatacccattttcccacagataagggcatacaacctatttctggaaggcgactgaaataaaaaagggcccaaaagaaaatagaactcaagtattagctactctagagcatctgctgaggtggcttctatgcattgcctagtgaataagagtataatagattatatggccactgttttaaagggacgcctaggcatccaaacatccaaaaaaatcctaggcgccttgctcgcctacctcgcctaggcatccaggcggcggtccaacgccttgtagtgccataccgctttaagaaccatgtatgtggcacttgcagatgatctagaccagggtaatatgaaactagatactaggaagttgttagccttaggagggaatatcattcattgtgcaacaatttcatgagttcatatgctccatagtattcaatgataacaatgaatccagaagttctagtttctctgacctcatagctcgaattccaaatacaacactacatataataattacataatgtaagggtataataaaaacagcatatcatatggtatgatattcaattataaaaagaagccttatggttcacaaaaaagagtctcctgcttgaacgattgaaccgctctatcaatatgtattgaaaaggctaagttcacatgataataaaaacagcaacacagtatccaggaaaaggaatttacctgcaggttgttctcttttatgtagtcccacattctcttcacaacatccgatcgtgataacatgctctcaccagtgccgataaatttcattaaatcatccgaaagttgaaggggcacaagaagaccagatccagctcctgaagagccacccttttgcttctttcctgcaaaagatatttcatcaacaggctagtgaacagaaactcataattgtgtgaagatgtttatatatttctaaccttcattcctgtctttcttttgtggcttctctttgggtgttgatctgtcaggagagacaggacctagcaaatcatagtcaagtaagcactttggagtagaactgaaactctgctagctcctgacttctactggtacacacagaattagcgcacaatggatcaataccctcagaattcaatggccagatatgcttggtcaaagctttattcatttggaacatatcaatggaattgacattgaagatcttcttcaatctctcatcaggcaaaatcttcctcctattgttttggtcttgcagattattttctcgaatatatgcccaaagcttcttgacaacctgaaagcaaacaagcacagcaagaaagaaatcagtggcattatcatcttcatgattaattggtatcacatccaatgcaagatagatatggaaggacagtaatcaggattcgaactcagaacctaaggagtgctaatcagaccacctaaccaactcggctagaggccctttcgcacatatagaaatcactttccaacaaccagtgataagatatggttattgttgggggtctgcttcatagccgaaggtcctgtaagaagaaacaccttcagaagatcagcacagaaataacgccgaagctaccttccagggaactttggcataacgacatgccttgagacgaagggttgcaccgacttaaagatgaaaagacagattgacccatgatagtttgtgtcatagttgtaatcgattgtaaagggtatgaatgtaaatttacacaggctgcgtcctgtgcctataaatagatgaacagtacccccgtactgttcacgctgatttgtactcgctcgtgccgtcgtgcgccacgcttgtattttatctttccatcaagctgaaggtacaaatgtaattccatattatttatgtccattca

SEQ ID NO: 47643 - DNA, 2644 bp, Zea Mays
tttccctcttctacccattagcgacttcccgatgtgctggtggaagcgctactcctccccctccctctcctcatcatccatgcccgcttcccccgcccgcgcttccaccctccgtcccatattcggttggggcagcggccctagctcccgccgtgatggcagcgggggcagcagcgaaccgcagccgcggctgatcagagcccggtggatgcgctacgtcgtcgatgacctcgaggtcggggtatccgcgctcggcgtggactctccggtgaggagggacgcggcggcggggtttgggcttgcgaccgtgagctccacgccgatctcgaagtctccgagtaacatggaggtggcgccggcgagaccctcgtcgacccccgtgctgctgccgcatccgctgccccttccatcaccggcgccaaggatgctcgacggggagtggaacgggcctgcagcggacgctcccggggttttagagactgggagcgaaaggatgacggcgttactcgcacggagagtggtggcccaaacactaccaaaggctcatgagcacaacaactttcggttaaatgcgactacctgttatcagcagagaaagggatttaaagagaagttcaagggtaagaactgtgctgaaactttgaacttcagattgaacattcctgctaaaagtgctccaagcagtgggttttcaagtcctgcacaaagtactcaaggactgagtaatgtagacttctcatccactgcaatctctatccgagatactaatgtatggtcagcatggtcttatgacgcgatgggatcttcacctccttctgattcacctgacaagtttgcgggtcgtcaggagcgttctcctctctctagcccactgagaagtccggttttaagatcaagaaacccaagtgcacgtccatcaccaacgcatccaaagttattcctggtgaaccatgtttgtcgccctgatggcaatggaagtgccagttttcacccattaccgctccctccttctgtaagcccaaagcagataaatgctagccaccagttaattccaaaagctgagatgtcttcagtggctggtcaatggcagaaaggcaaactcctgggtagtggcacatttggatgcgtgtatgaggccacaaataggcacactggagccctttgtgccatgaaagaggtaaatataattccagatgatgctaaatcagctgagtctctgaagcaattggaacaggaaattaagtttcttagtcaatttaagcatgaaaatgttgtgcagtattatggcagtgaaaccatcgaagatagattctacatatacctggagtatgttcatcctggttcaatccataagtatgttcatcaacattgtggatcattgacagaatcagtcatctgtaacttcacacgtcatattctcaagggtctttctttcttacatagccaaaagattatgcatagggatatcaaaggggcaaatttgttagttgatattaatggtgtagtaaagttggctgactttggaatggcaaagcatttgagtgctgctgctcctaatctttcattgaagggaacaccatactggatggctcctgaggttgttcgggctacacttgataaacgtgcaggttatgatcttgctgttgatatttggagccttggttgcacaatcattgagatgtttacaggaaagccaccttggagtggtcttgaagggcctgctgcaatgtttaaggttttgcacacggacccaccaattccagataatatgtcccctgaagggaaggattttctgagatgctgcttaaagagaaaccctactgagcgaccaacagcaaccaagttgctcgaacacccatttatacgaacttcgaatcactacagcccgcgtaattcaattttgggaattaaatctccagatactgtgcgcagcgctgcaagagataaagtaccctggaaaaatgattcatgtaagagagggaaacatgcaaatggtgaaacaagcagtgctcggtcgtcagggtcattgacttatcgattgatgacacctctacccaacttgggaaccaatagcttgtcacctccacctttgagttcggcttccaattctggctctgcagcacatacaccgaaaattatgcatttttcagtcgcataccatcggcctagtcctttgccaaagcctaacgggaaggaagcaataaatttgatttcacattgaataacaacatggcagctatcacaacatctgggccaaaagccacataacccttgcgctgttactcatagctgacaatttttgggtctcgtaaaaaatattttccatgtaaaaagattaccactatatgatcatagggaaatgctgctaaatggaggagccctgtgaggtctgttgtactgtttgatttctgaggaaatgattgtattttccatgtaacatgtttattagggtgtagctgtaggtaaaactaatggtcctgattctgccgacagataggacattagggttatagttgtagcgtgttgttgttgttgttgttgatgttgtgtaatgagcatacttatgtaatcgttattgatttttttggggccgtgtaataatacacgtcaattgtcaaacggggattgagattaaagatctatg

SEQ ID NO: 47644 - DNA, 2731 bp, Zea Mays
atgtgctggtggaagcgctactcctccccctccctctcctcatcatccatgcccgcttcccccgcccgcgcttccaccctccgtcccatattcggttggggcagcggccctagctcccgccgtgatggcagcgggggcagcagcgaaccgcagccgcggctgatcagagcccggtggatgcgctacgtcgtcgatgacctcgaggtcggggtatccgcgctcggcgtggactctccggtgaggagggacgcggcggcggggtttgggcttgcgaccgtgagctccacgccgatctcgaagtctccgagtaacatggaggtggcgccggcgagaccctcgtcgacccccgtgctgctgccgcatccgctgccccttccatcaccggcgccaaggatgctcgacggggagtggaacgggcctgcagcggacgctcccggggttttagagactgggagcgaaaggatgacggcgttactcgcacggagagtggtggcccaaacactaccaaaggctcatgagcacaacaactttcggttaaatgcgactacctgttatcagcagagaaagggatttaaagagaagttcaagggtaagaactgtgctgaaactttgaacttcagattgaacattcctgctaaaagtgctccaagcagtgggttttcaagtcctgcacaaagtactcaaggactgagtaatgtagacttctcatccactgcaatctctatccgagatactaatgtatggtcagcatggtcttatgacgcgatgggatcttcacctccttctgattcacctgacaagtttgcgggtcgtcaggagcgttctcctctctctagcccactgagaagtccggttttaagatcaagaaacccaagtgcacgtccatcaccaacgcatccaaagttattcctggtgaaccatgtttgtcgccctgatggcaatggaagtgccagttttcacccattaccgctccctccttctgtaagcccaaagcagataaatgctagccaccagttaattccaaaagctgagatgtcttcagtggctggtcaatggcagaaaggcaaactcctgggtagtggcacatttggatgcgtgtatgaggccacaaataggcacactggagccctttgtgccatgaaagaggtaaatataattccagatgatgctaaatcagctgagtctctgaagcaattggaacaggaaattaagtttcttagtcaatttaagcatgaaaatgttgtgcagtattatggcagtgaaaccatcgaagatagattctacatatacctggagtatgttcatcctggttcaatccataagtatgttcatcaacattgtggatcattgacagaatcagtcatctgtaacttcacacgtcatattctcaagggtctttctttcttacatagccaaaagattatgcatagggatatcaaaggggcaaatttgttagttgatattaatggtgtagtaaagttggctgactttggaatggcaaagcatttgagtgctgctgctcctaatctttcattgaagggaacaccatactggatggctcctgagcccgcagcagctctgacattgacacaacagccagcagcaacgcgcaaacgcactgcttccggctctacaattgtcacgatcatttttttggactctttagacatctgcataaactgaggttgttcgggctacacttgataaacgtgcaggttatgatcttgctgttgatatttggagccttggttgcacaatcattgagatgtttacaggaaagccaccttggagtggtcttgaagggcctgctgcaatgtttaaggttttgcacacggacccaccaattccagataatatgtcccctgaagggaaggattttctgagatgctgcttaaagagaaaccctactgagcgaccaacagcaaccaagttgctcgaacacccatttatacgaacttcgaatcactacagcccgcgtaattcaattttgggaattaaatctccagatactgtgcgcagcgctgcaagagataaagtaccctggaaaaatgattcatgtaagagagggaaacatgcaaatggtgaaacaagcagtgctcggtcgtcagggtcattgacttatcgattgatgacacctctacccaacttgggaaccaatagcttgtcacctccacctttgagttcggcttccaattctggctctgcagcacatacaccgaaaattatgcatttttcagtcgcataccatcggcctagtcctttgccaaagcctaacgggaaggaagcaataaatttgatttcacattgaataacaacatggcagctatcacaacatctgggccaaaagccacataacccttgcgctgttactcatagctgacaatttttgggtctcgtaaaaaatattttccatgtaaaaagattaccactatatgatcatagggaaatgctgctaaatggaggagccctgtgaggtctgttgtactgtttgatttctgaggaaatgattgtattttccatgtaacatgtttattagggtgtagctgtaggtaaaactaatggtcctgattctgccgacagataggacattagggttatagttgtagcgtgttgttgttgttgttgttgatgttgtgtaatgagcatacttatgtaatcgttattgatttttttggggccgtgtaataatacacgtcaattgtcaaacggggattgagattaaagatctatg

SEQ ID NO: 47645 - DNA, 2150 bp, Zea Mays
aacacttaggcagttaggcgggtagagtatcttgcagagaatggcaacagtttttatggtgcctatggttcagcgatattggtgatcctgatgttcacttcaattcacaaatgaatcatttgtgatatgcctattataccagagtggtggcccaaacactaccaaaggctcatgagcacaacaactttcggttaaatgcgactacctgttatcagcagagaaagggatttaaagagaagttcaagggtaagaactgtgctgaaactttgaacttcagattgaacattcctgctaaaagtgctccaagcagtgggttttcaagtcctgcacaaagtactcaaggactgagtaatgtagacttctcatccactgcaatctctatccgagatactaatgtatggtcagcatggtcttatgacgcgatgggatcttcacctccttctgattcacctgacaagtttgcgggtcgtcaggagcgttctcctctctctagcccactgagaagtccggttttaagatcaagaaacccaagtgcacgtccatcaccaacgcatccaaagttattcctggtgaaccatgtttgtcgccctgatggcaatggaagtgccagttttcacccattaccgctccctccttctgtaagcccaaagcagataaatgctagccaccagttaattccaaaagctgagatgtcttcagtggctggtcaatggcagaaaggcaaactcctgggtagtggcacatttggatgcgtgtatgaggccacaaataggcacactggagccctttgtgccatgaaagaggtaaatataattccagatgatgctaaatcagctgagtctctgaagcaattggaacaggaaattaagtttcttagtcaatttaagcatgaaaatgttgtgcagtattatggcagtgaaaccatcgaagatagattctacatatacctggagtatgttcatcctggttcaatccataagtatgttcatcaacattgtggatcattgacagaatcagtcatctgtaacttcacacgtcatattctcaagggtctttctttcttacatagccaaaagattatgcatagggatatcaaaggggcaaatttgttagttgatattaatggtgtagtaaagttggctgactttggaatggcaaagcatttgagtgctgctgctcctaatctttcattgaagggaacaccatactggatggctcctgagcctgctgcaatgtttaaggttttgcacacggacccaccaattccagataatatgtcccctgaagggaaggattttctgagatgctgcttaaagagaaaccctactgagcgaccaacagcaaccaagttgctcgaacacccatttatacgaacttcgaatcactacagcccgcgtaattcaattttgggaattaaatctccagatactgtgcgcagcgctgcaagagataaagtaccctggaaaaatgattcatgtaagagagggaaacatgcaaatggtgaaacaagcagtgctcggtcgtcagggtcattgacttatcgattgatgacacctctacccaacttgggaaccaatagcttgtcacctccacctttgagttcggcttccaattctggctctgcagcacatacaccgaaaattatgcatttttcagtcgcataccatcggcctagtcctttgccaaagcctaacgggaaggaagcaataaatttgatttcacattgaataacaacatggcagctatcacaacatctgggccaaaagccacataacccttgcgctgttactcatagctgacaatttttgggtctcgtaaaaaatattttccatgtaaaaagattaccactatatgatcatagggaaatgctgctaaatggaggagccctgtgaggtctgttgtactgtttgatttctgaggaaatgattgtattttccatgtaacatgtttattagggtgtagctgtaggtaaaactaatggtcctgattctgccgacagataggacattagggttatagttgtagcgtgttgttgttgttgttgttgatgttgtgtaatgagcatacttatgtaatcgttattgatttttttggggccgtgtaataatacacgtcaattgtcaaacggggattgagattaaagatctatg

SEQ ID NO: 47646 - DNA, 3476 bp, Zea Mays
ctctcggcccaaacagccaccaaccagacacggcccagcctcatacacccgcgcccgctgacactgctccctgccaactacccttcggccttcgcggcttcgcgtcgcccacccacgactcgtcgtacacccggtccgccctccgtcgctgagttcgttccccttcaccctcccccaccccctaccccgatcgcgcagctacggcgaaaccctagcgacgaattccccaccgaatcgaggattccaaggttcctaccggggcgagcgcgggggcagcattccgggagcggttgatggcgacctgccgcaagacggcgcgcgtcgatgtcaccgagctgaagcagcgcctggtgaagcgcctgggtcgggagcgggcggtcaagtacttcgcgcacctcgccaggctgctgaacctgaagctcaccaaggtggagttcgacaggctctgcttggccaccatcggcaaggagaacatcgcgctgcacaacgcgctcattagggggatcataggcaatgctctgtcgggggtgcctccgctcagccggcaggcggtgacggggcagtcgggcaccaccaccgcccccagcgggcagtgcgtgggcgttgcgctgccggtggtggagaatgtgggggcagtggttgattcgggtgatggcgagctggcgagggagcggggggcgccggtggggaagctggtgtccgtggaagatggggaggaggtggagcaggttaggtatgctccgtgtgtccagagccggagcccgataacagcgccattggggatttcagtcgctgggggcagtggtatgagggtaaggaggaagttggatgattcagtggtgtcatgctatgattctggacaattgctggatacgggttctctgtgcgagggtttgcagcggtggctgtacagtaacggcactggagtgacggtgcaagccgtcgatgctttgaatcatgggttagatgagctgttgcgaagattgattaaaccgaccgtagatttgtcgagggtaagagccagcagtagaagaattagcaaagtcaatcaaaagtttgctggtagaatgaattctttgcaacatccaaatcagggtcagtgtacaacgttgcaagattttgcagttgctgtgcaatctgatccacgtttgcttggtccaaattgccccacgcaaatcgagaagatacaggcaatgacatttggaggggaatgatacatagtagcccgttatagctgatgaatttctcaaaaggagatgctgttagctggcattgaagtaaatgaagcggcagatccaacagcgctacaaaatctgagtattgcagcactcacggagtcacgggcaagaaataccaaggcccaacaagtgaacaaagggtgatgcaatggacagtgtagcataaattcttttttgggaatatatagcccgtcgataataaatcgaagaatcaatatggttggctgatgtccaggtcaagctgagtaactccttgacaaacatactctcaactcttggcacagactatgttccggtagtacttttagagatttgttgcgatgttgtaatagagcattttcctcttattacagacttaaatgtaatcatttttctcagtgatcaatgatcataaatgatgcctttaatggctcattgctcctgtacattgtattcagattatggcaatgaccgattgcaattaagataaaagtttaaccctgttgaataaatatatgttttttatgcccaaggacttcaaattctctcctatggctggaatataaatgttctaaacatgcattcatccaaatgagttacagttgagttgccaggaattatgatatgtacttttctaatcgaatcaaatttctggttctctggtgtgttgatttcgcgtctattactgtagtttcttttattctagcatcaaagagtttcatattctgttttggaattttgcttgaatacactatgcaccttgttctagtatccatgaactgcgcaaaagttattcaaatgtttttttgttaacattttttaatgttttcttggagttggtattctttgttgtgattttttcagcacccggttcaagccaaagattgcatcagttgctttgggacaaatgtcttagtttagtaatttgggttttattttgagtttttgacacaacttatgctttgtttctgtacgccattacaaaactttgcttgtcttgagcatatttttctttttattatctcactgaagtggtatagacatatagggctgtaaaaaaaaaaggattttaccctcttagaatggtaagctcgagttcagactatcctcttttgttgagaagcatggtgtctttgtcgaactttttgctatgttcttagcatgtcaaatgttgttatatagtctaatttttcttgcatatgatgtttatttatcagttgacttgtttttttgacgtttccacatatctatagtgcccgctaggaaccttggtagccaggatgacagggctgaatgctaccaggtgcttgctatccttattgaagctacctggaataaccagctcaaattaggtttggttcacaagcagcttacacggttacactgtacttgaaacccccaagtttctgctgtctcagatctaagaacccatatgtgattgagaaatattatccttttaacctagaggaaattacctgaattcttatgtttagctgaccattatctcgagatcttgtactttttcagttgtcttgcaggttagtggttcgtggattgcacgtcatgcccatggacagcgatggagattcagcaagggctctggagtcacacactgtcatgaagtgcaggatttctgattagtgctgcttaagcgtagcttatggtatttcactgttcccagaagtggaatgtgttgctaaaggaggtgaatcaggagcgtagcatccatgtgaagcgcgaggttatctgctggatgaagaactttagcccttcggcttttatacccacggatgtctacgggatctaaacctggtaatagtagtctcttttacttctctctgtaaaactagagttcctagtattgtgtacctcatactgctttcataaaagctgggttcttcctctttaaaaaaaataataaatactcgtgtcattactgggcgttggtttagtttccttctattttcccatgtacgccatctcgagttatatagattccgcgatgtaatctgttgtaacagaatatacagttatattgctgattagcagtgaattgaggtgaatatcgcacaaggcttaaaagatacggcggtttcagtttgtgtcgaacagcacggaagttgttcgcttcgaattaaagccacctattgagactgctatagctgtaatctatagagataaaacaccacttattgagactgctatagctgtaatctatagagataaaacactataaaaacagtagaagccatttcggat

SEQ ID NO: 47647 - DNA, 870 bp, Zea Mays
ttcgtctccatattatatacctctatctatgaaacacgaacaagaaaaaaaagtgttaacaacatactgctcatgtgtttttcagttataagatgtgtagcccctgggtccctagcctgaagaaaacaagtctgttagacattttgaggaaatgctgttgtagattgaacttttttacatgaatctgtagattgcagaaaatgtgaatttagggctgactcccataatcttcatatagtataagttatgaccaacaaacctctttatgtcatgaacaaccttataacctattacatgaaaaaatatctctaagaaacaacaaatctataaattgtcaagtaaatattgcgtagaagcaatttttgagattagtggcataccgcttggattgaaggctaaacagtcacacattaatccttgaagcagtaagagccaaaggtctaagaatcattgcataaattatttacctatcggacacataatttgtattccaaaacaggcctatcaagctcgtaaatattgtgttcagagaatagcatgtaggctaagataactgtgaattcttgcctcctacaactcttagtaccaggcttaggggcgacttgcagtagcaatggccctgcctctgcactctcatggtccaatgttttcattagacccttctatcaaataaaatcttatgttgtagctcatttggttcaatcttctgtttaatgcaaatgtagttatgcatattcgttcagtgggtctcatgctaactatggtgcccctaccttgcaagatcctgctaacctcagaacactgataagataagcttgtgctttcaaatgtgtatgcatattctttccttaaacgatgaagcttgtgaca

SEQ ID NO: 47648 - DNA, 1668 bp, Zea Mays
tcttggcaggtccctgatgtcgtcatccacgaactgccccatgggctccttctctagcttcaccttctcctgcgggtttagcccggttcggtacttctcctttagggcccagtaccctccctcccactcctcgacccttgcttgattgtaaattcagtagcttgcacattatttttcttagcgtgtaatgactttttttagaattaatttcttagcaagttcttgatattcccggacattaactggtagattatcctccattctgctccatcaaattgttaaaaaaggtcattcgtatgttgcaaatatatcgatttcagccatacacattttagagaattagcatacagaatgttcctttttcagtgcaagcactaaatcatttcattttggagctttggacacatataaagatagagatgtgtcggtaaaagaaaacagtatatcaaaagaagagaaacatgcattggaaaccaagaatgtggaaccaaagaaaagcactgtatttttctcagggtgggtttgcttgtggcacttatttgtttgttgattggatccaagattaagcataggttataattcagcaagaatgtgggtcagctacctgttcacttaatgaagaatcatctatattaagcataggttataattcagcaaaatagcaagtggcatcctttcagtcctagcgcttggaacatatgtgcaacctagaaatatcatgaatggcaacctatatcaggataaatgtgatctcaagtacagaaataggagtatttatgcctttaaaagtactctattttcagctaaactgatttaccacataattgaaacaaagagtccatacatcctactaatctctccatagtttagggtccaaaaggcaccatttcaccctcagaaaaattcccaaatgtcctgcacttagcaacatataatcagtttgcacaatccgaaaacccacccaggttctccctgtccaaataaattgtttccaaattgtttttgatgttttcctgataagaagttagtgccattacaatagaagatcataaccacatcgaggacagtgttgtaccatgattaataatagcaagatctagtgtgagtaataagatctcaattaattatagtttatgttgctatcagactacttcaccaatttttgatgctatcagacattcagactacttcacaaatttaagaatgacatttatattcaggtttatacaatacaaatgcaattccaaaatcatgcgggacatcatctatcatttgatctaaacctcataagtaaaatcaaatgacccataaatatttcctcaaaatatctggtgttccttggggcctgcatcccacgatggcacgatgttcctccctctacgaaactaaagaatcaaatgagtaacagaaataattgatcgatataggagtcaagatgttaggatgcgcttagctcaattctgaagcagatggagttttgtgcgatccgattcaagaaacccttgcaggccattatttggatcctctactaaagacatctataggatatttcaggcaccctttcataaatcaaaagaatatagaatataaaataactcatatcgttcagaattcaacattcttttaaaaaatattccaaccaaacatggtacaataattatgaactaa

SEQ ID NO: 47649 - DNA, 710 bp, Zea Mays
gacacttcggacaaggagcatgagccaccacgtgagctgaccggtgatccttggtgatagctcttccacacccaccgtggacaagccatgcacaacccaggtccctccaaccatgtcacctatggacggtggccagcctctcgacctggccctagcgaccaccacagaggtgcctacgcctgaacctgtggcaacgccctaccatggacaaggatagtgttgatgcttcttcaatggtggacaatgagacagtatttgcacaatgcccaattcgagagagcctaacagccgagcttgcaagctggcactcttgactcctgttgttaatggttttgttccagtgttgattgctgacaagaaggatggtgttacagaggcttcatctgcaacctacaatgatgtttatcaacctcgtagggccagctctgctcaaactgcaagcaaggtttgtggcaaggctctgcctcagtcagctacacccaagggtcgttaactgtagtgtgttctcttttaaatatctttagtgtgtcatattgtaatcaattattaggcaacttagcgcttatgagaatctcagtcacaatagtggtttaaactatgtgaatgacaactggtttatttgaatctctactacaacttttgcgaatcattttacatttgggtgcttcaaacatcaaactctataccagaatttcatcaagaatgaaaag

SEQ ID NO: 47650 - DNA, 662 bp, Zea Mays
tggccgtggagagcgtgccagtgagcctgtaggagggcaggctcagcgacaccacctggccgctgccgctgcacaccatgccttcccatctacagacaccatcgcagactcgacacctccatcgacagtgcaggcgcctccaccttagatttgggctgcatgattctcgtcgatttggggcgaggatagcagggagggcaggtaggaccaccatcccgaacaacccagccatcaccatctcggccgccgcgcgcgaggcagggggagaagtggtgcggctcagccatggcctcgacgtccgagtcccttcggcggaccttccatatcaggcgcgggcgcgggcgcgggaatgggaggaggtgaggtggcggatctcccacgccatttttgtcgtgggccgaggaggaggtggcggatctcccatgccctccggcctccgcgcatcctctgagttgctggtggcggagcctccctgcgcggcggtgggttgcagccgcgacatccaggcgtccgttccgacgagcctcgaggcggggagcagcgtttgcgggtgggatcggacgacggcggcataatcggggtaggggcagggggcggagtttgtggccagccagaatcgagtgaggcgaggggaggccgggggcgacggtttcggggcgcga

SEQ ID NO: 47651 - DNA, 1781 bp, Zea Mays
tacaagtacaatccacctatagcgacgaaaagccagcagattccagcgtcagccggtcgcagtccgccggtattcacacgcagccacgctaaacaaagcccgacgagagattcgtctccatctcccctcgtcttcctccctccttcagcccgaggaaaccctagcacgtcccgtctcgcctcgccgccggcgatggccgctgcatgatcggtttccccccttggaactgcctgcctaccggcatcgccaagatcgccgccgcggctgccgtcgtcgtagcggcgctcgcgtcctccgggatcgccctcccgcgtccacgcgccgcgccgcccccatcgggattcggcctcctcatgtcgaaggcgaaggtctacaccgacgtcaacgtcctgcgtcccaaggagtactgggactacgaggcgctcaccgtccaatgggggatgactatgaagttgtcaggaaagttggaagaggtaaatatagtgaggtctttgaaggcatcaatgttaacaacaatgagaaatgcatcattaagatccttaagcctgtcaagaaaaagaagatcaaaagggagatcaaaatacttcagaatctctgtggaggtccaaacattgtgaaattgcttgatattgtcagggatcagcattcaaagactcccagtttgatatttgaattcgtcaacaacacagacttcaaagttttgtaccccacattgacggattatgacatccgctactacatatatgagctactcaaggcccttgattactgtcattctcaaggcatcatgcatcgagatgtcaagccccataatgtaatgatagatcatgagcttcgaaaacttcggttgatagactggggcttagctgagttctaccatccaggcaaggaatacaatgtccgtgttgcatcgaggtatttcaagggacctgaactccttgttgatttacaagactatgattattctttagacatgtggagtcttggttgcatgtttgctggaatgatatttcgcaaggaaccattcttttatggccatgacaaccatgaccaacttgtgaagattgcaaaggtccttggaacagatgggctgaattcttatttgaacaagtaccacattgagctggaccctcaacttgaagctcttgttggaaggcatagtagaaaaccctggttgaagttcatgaatggtgataaccaacatctagtatcacctgaggccatagattttctcgataagctcctgcgctatgatcaccaagacaggcttactgcacgggaagctatggcacatccctacttccttcaagtcagagctgtggagaacagtaggacgagagcacaataatcatggtctgcactcttgaaatggagttgttgctagttcgtgaaaatcataggcttaaatccatgttcagtattcacatcgctccaggaatctgggccatgactccatggcaatgaatcaaaatagtacgagccgcatcatgtggacaaccttggcagatctttttattcttgtctttattgctgggagcactgtagctttaaacctacaagtagtgcttgaatgagatgagattcatatcatctcctgtggtggaatgtgaaattgtatgtgacctttagactaattaaaaagtacaatacagcgctaagcatactgcttgtattatgttgtgctattatgtatctacgattcttatttattttgggcgatagtcaccgtgatgaattactttttttggatctcacggatgaaattatgagttgtctctgat

SEQ ID NO: 47652 - DNA, 695 bp, Zea Mays
caggagcatgaggaaagtcgggcaacagctgaaggaaagaaaattgctggcaggcttaagagaactacaatagtactccctttggtcgtcgatattagatgacaggattgataaagcatattcttcgacacgtacggggaatactacgaggacatgagagagttccaccagcaccttcctaagctactgaagcccggaggcatctactcgtacttcaacggcctctgcggcgacaacgcgttcttccacgccgtgtattgccagctcgtcgcgctggagctcgcgaaccttgggtactcgacgcagttcatccctctgccggtcaaagattgcctggcggaggaggtctggaagggcgtgaagcggaagtactggcaactggacacctactacctccctgcttgccagtcagaatcagaatctactatcaagtagtgatgagttatttctagtctgcgttctgaagttggttgtctgttttgagctacgtacatttttgttctgtgttacgaatgttaaccctttcactttcgggagctgaattttctttgggcgtgtggtgatttgccctctctcgtatgctcctgacgcgtgcgtgcattcgtggttcgaaaaatagaattgtcatggaaaaatttggttccctgacgatcattttccttgccatgttggaccgcgtggctctattcagaata

SEQ ID NO: 47653 - DNA, 700 bp, Zea Mays
gctcattccgagctgtactgtacctgaggatactgtgaggagcatgtttggaggacagggactgccactgccagccaggagatggtggtatcgacggcatgagacaacatggaactcatggcatattcttcgacacgtacggggaatactacgaggacatgagagagttccaccagcaccttcctaagctactgaagcccggaggcatctactcgtacttcaacggcctctgcggcgacaacgcgttcttccacgccgtgtattgccagctcgtcgcgctggagctcgcgaaccttgggtactcgacgcagttcatccctctgccggtcaaagattgcctggcggaggaggtctggaagggcgtgaagcggaagtactggcaactggacacctactacctccctgcttgccagtcagaatcagaatctactatcaagtagtgatgagttatttctagtctgcgttctgaagttggttgtctgttttgagctacgtacatttttgttctgtgttacgaatgttaaccctttcactttcgggagctgaattttctttgggcgtgtggtgatttgccctctctcgtatgctcctgacgcgtgcgtgcattcgtggttcgaaaaatagaattgtcatggaaaaatttggttccctgacgatcattttccttgccatgttggaccgcgtggctctattcagaata

SEQ ID NO: 47654 - DNA, 632 bp, Zea Mays
ctggagggagtatattcaaagttttcaagttagtgcttctaaagctttcagagcatattcttcgacacgtacggggaatactacgaggacatgagagagttccaccagcaccttcctaagctactgaagcccggaggcatctactcgtacttcaacggcctctgcggcgacaacgcgttcttccacgccgtgtattgccagctcgtcgcgctggagctcgcgaaccttgggtactcgacgcagttcatccctctgccggtcaaagattgcctggcggaggaggtctggaagggcgtgaagcggaagtactggcaactggacacctactacctccctgcttgccagtcagaatcagaatctactatcaagtagtgatgagttatttctagtctgcgttctgaagttggttgtctgttttgagctacgtacatttttgttctgtgttacgaatgttaaccctttcactttcgggagctgaattttctttgggcgtgtggtgatttgccctctctcgtatgctcctgacgcgtgcgtgcattcgtggttcgaaaaatagaattgtcatggaaaaatttggttccctgacgatcattttccttgccatgttggaccgcgtggctctattcagaata

SEQ ID NO: 47655 - DNA, 1954 bp, Zea Mays
cgcctctccgcccccacacgcgctttcgctgcaccaaagcgtcgtgtgagctgctacttaacctaaccaacccccaccgccaaagccaaaccattccccccgttcctgattccaattccaaccagcccatcccccttcgaccatacacacagagcggaggcgaaggcaagagcaaacagagtagccgccgccgccgccgtcgtcgtcgtgtgttgagcagggttttgtttttacggcttagctttgagcagcagagatgttgcgagcgctggcggcgaggtgctgcggccactggccgccgggcgccgcggcggcggacgggatgctgtggcaggcggagctgcggccgcacgcggcgggggagttctcgatggccgcggcgcaggccaacctggccatggaggaccaggcgcaggtgctggcgtccccggccgccacgctcgtcggcgtctacgacggccacggcggggccgacgcatcccggttccttcgctcccggctcttcctgcatgtccaacgcgtcgtgcaggagcaggggggcatgagcgccgaggcgattcggagcgcgttcggcgcggccgaggaggagttccataggcaggtgaggcaggagtggaggagccggccgcggctcgctgccgtgggctcctgctgcctgctcggggccatctccggggacacgctgtacgtggccaacgccggcgattcccgcgccgtgctcggccgtcgagtgcccggcggcggggcggccgtcgccgagcggctctccgccgagcacaacgcggcgtgcgaggaggtgcggcgcgagctcgccgcgctcaaccccgacgacgcgcagatcgttgtgcacgccaggggagcctggagggtcaaggggataattcaggtgtcgagatccattggcgatttttatctcaagaaaccggagtatagcctggaccccttgttccggcaagttggggcccctattgcgctgaagaggccagctctcagcgctgaaccatcagttcaagtacgcaagctgaaaccaaacgacctgttcctgatatttgcttcagatggcctttgggagcacctcagcgacgatgctgcggtgcagattgtcttcaagaatccgagaactgggatagccagcagactggtgaaggctgccttgaaggaagcgaccaggaagagggaggtcaggtaccgtgatctgaggacgatcgagagaggggtgaggcggcatttccacgacgacatcagcgtcgtcgtggtctacctcgatggccaccgcgagcgccgccacaccagggtcgttgactcgagcagcaactgcaccagtgcgcccgtcgacatccactcctccaactcccgctagtttccggagccccttgcaacgcgagctgaactctgggtgggaggtgaggtgggtgcagccgtagccatcggaatcggaacaagtcgatatgtacatagcaagcccgtccattggatcggacttatttttaaggtaagaaatagttgatgacgaactggaggttggttaatggagaccaaagaatatatgctctgctcagtgctcaggatcatagaatttaggttccggcctgagaatatatactctttgcaacggatgagatgctcttatttcatttagcatcgtttttttttgtcggaaacttctttatgtatgcagtgccaagattaccactacctggaatcgttgaaactctgcatggttcgtgctgtggaacggattgctcaaatatcttttcgtactgtttagggaacggactgttcagattgttcgctgcgttattaccctttccgtttggataatgatgtataagacacgttcggttgagttttgatttctaaaaaaactgctacgagctttgagttgtgaatgaaaaagttagtgtagattgtggtttgtgaaaaaaaacattgtgatctgtttaattcaaatctc

SEQ ID NO: 47656 - DNA, 1591 bp, Zea Mays
ccaattccaaccagcccatcccccttcgaccatacacacagagcggaggcgaaggcaagagcaaacagagtagccgccgccgccgccgtcgtcgtcgtgtgttgagcagggttttgtttttacggcttagctttgagcagcagagatgttgcgagcgctggcggcgaggtgctgcggccactggccgccgggcgccgcggcggcggacgggatgctgtggcaggcggagctgcggccgcacgcggcgggggagttctcgatggccgcggcgcaggccaacctggccatggaggaccaggcgcaggtgctggcgtccccggccgccacgctcgtcggcgtctacgacggccacggcggggccgacgcatcccggttccttcgctcccggctcttcctgcatgtccaacgtgtcgagatccattggcgatttttatctcaagaaaccggagtatagcctggaccccttgttccggcaagttggggcccctattgcgctgaagaggccagctctcagcgctgaaccatcagttcaagtacgcaagctgaaaccaaacgacctgttcctgatatttgcttcagatggcctttgggagcacctcagcgacgatgctgcggtgcagattgtcttcaagaatccgagaactgggatagccagcagactggtgaaggctgccttgaaggaagcgaccaggaagagggaggtcaggtaccgtgatctgaggacgatcgagagaggggtgaggcggcatttccacgacgacatcagcgtcgtcgtggtctacctcgatggccaccgcgagcgccgccacaccagggtcgttgactcgagcagcaactgcaccagtgcgcccgtcgacatccactcctccaactcccgctagtttccggagccccttgcaacgcgagctgaactctgggtgggaggtgaggtgggtgcagccgtagccatcggaatcggaacaagtcgatatgtacataggtaggagtgggtgcgtggcatcttgatgccggagaagatcatttggtctcgaaactacttagcacaagtggttaatgactgcatttttcttgtttctttttgtctgaaaccagcagcaagcccgtccattggatcggacttatttttaaggtaagaaatagttgatgacgaactggaggttggttaatggagaccaaagaatatatgctctgctcagtgctcaggatcatagaatttaggttccggcctgagaatatatactctttgcaacggatgagatgctcttatttcatttagcatcgtttttttttgtcggaaacttctttatgtatgcagtgccaagattaccactacctggaatcgttgaaactctgcatggttcgtgctgtggaacggattgctcaaatatcttttcgtactgtttagggaacggactgttcagattgttcgctgcgttattaccctttccgtttggataatgatgtataagacacgttcggttgagttttgatttctaaaaaaactgctacgagctttgagttgtgaatgaaaaagttagtgtagattgtggtttgtgaaaaaaaacattgtgatctgtttaattcaaatctc

SEQ ID NO: 47657 - DNA, 3729 bp, Zea Mays
cctcctccccgctaatcaccacgccgcgcacgcgccgcgcgaggcccgtcttcgttcccccaccgctaatctcgccgcggcatccatggcgctgccctcgccctcccccacctatccacgccggcgccccctccctcgcgccccacctcaatctcctccattgcgcgcccaagaacgcacagatcccccattcccgcgcccctccctcgtgcctcgatggaatcgccgcagcatccatggtatggtcctcaggatccacctccaccgcgtcgccacagttcgcaggggccgagggtgccccgacggtggggatttgtactgtggtcaggagcatgcgtgttcaagcaagcactcttgctcttcgtccacaacaagctctccatgtgccctaggcacgcgacaaatgtttggggtggtgggcattaccgtcacctccctcgtgtcccgtgccgccgtggccggggtctgcttcctcgccttccgcaatgagcaatccgcggggtacgccacctctgcctacgacttcctaacaagctccccgggcgccctcatcaccgtctccggcccaggatgcgtccacaggctcgcgggcctctcccacgccaccaccaacgcctggtcgctcctcatgatctccagatcctgcgaccaggctgacgctggcaggggcgacttccaggagctcgactagatcgccgcggtgtctggtttgctcacgcggtccctcacgctccaccaaactctggcgcaattcgagcaacttcagccctcacactccgtcaatccgagcaactccaacgcaattcgagcaacccgcccttcacgcaccgtgctgcacgcagtctcgccccaatcctcattggtgtcgacttcatctgcatggaagcacatttcagagatggccagattggcgtagagacacagaacaattgcaacatgtactggttgttggtacttcacctgtgttagacggaacaccacaattgcaacctggaaaggagaatgacaaatgtttgaacagcagtggccagataggcgtagagacacagaacacaatattgttctctctacttgagatggaagaattacaagacaaggaattggaggatgcttaggaggatagacaaaaatgtgaagctaaagaaagagaagctcttagagcttatcgcaaagcacatagagctttacttgaggcaaatgaaagatgtgcaattctttgtagaaaaagggagattttctcttcacaagtccatggtttaattgcagagaattcttctttggtgcagtctttgagtattcggaatcctgaagatggccttgcaatgccatcactgctcaattctcaaattcatgcagttagtcagattcctgaaaatcagggtggtagacacaggttgtgtcctgaagaaccttctaagcagcaaattgataagcatgaagatgaagcacgtccacactattgtgataagcttgctgccagcacagctgatcccagctctatgagtgctgtcaatgctgacaacatcctttcagattatatggaagatgttcttctgttcccgactagatagacaagatcagaatgtgctctggatgttgagaatcaaatggaagaaactatacatgtatatgcataggaaaacatacaagttcctggtgacggtggtcaggattatgaacttttagaagcttctttgaggtctagatgccaccgtctctgaaccaaagcaagaaaaagtcttgccccatatctaaacagaacagataatttgcaataaaagataagcaattccatgtgcaagaaaatacattgactaaatttctttggctcgacgcttaagaaatctcgtccttccatggtttttgccatccgctagaaacaaagaaaagctaccactcactgaaagtctgaaaccaaattcagatcgcaaataaaggacccgtctgaaggttatgctacctggacatagaacataccatgagacttgcttctctgcctctgtgggatataaacataacctatgccaatgaccagaaatcagatgacacaaagtttctcaactgtaatcagttgacgatatcacttcatcatcaggtctaatactcttgtacccatactataagtactatattcccagtatcatgcaggcataatatgagtttaattaataatcttttttgctggacctgacatcgtcattcaatactaattcatagagtacaattcattttgttatgtattttgcactgtaatttctggtgaaaatggagccaaatttggtacatgaaagagagttgttaaatcacatatctaaactttattttatgtttcagagcttatcctcaatcaaatggatataatctctcttcctgctacttaatctttattttcagacgcaagtaggatatgaaatgcaaaataatagttgcacattacgactagccagacagtagtatgtgattaatggagacgtttggcatgtcagtttaattttgcattactgaatacatgaacacaaggtacatgaaagagagttgttaaatacatatctaaactttgttttatgtttcagagcttatcctcaatcaactgaatataatctctcttcctgctacttaagctttattttcagacgcatgtaggatatgaaatgcaaaataatagttgcacattacgattagccaaacagtagtatgtgattaatggagacatttgccatgtcagtttaattttgcattagtgaatacatgagcacaatagttattattcttgcattgcaatatctagctgttcactgaattgcatcttttgttctctgttgtcttcacaggtggaagagactttgttcaaacaaactaaggtgtttctctgctcatattctggtgtttatttataacgtgcctttgttttattattttggttcttttgagtgtaatgcttatatcctggtttggatatccagtttaaagatatcccatctattggacgaaccatcaatgcatgcctatgttgtttcataactgttatttcactgtaaaaggcatgtagtgtttgttgccctatagcataaaccagacttcggggtttagcttttaattacaaaaatgagtttgccggaaatttggatttcatacatgtaaattttactgattgcttcggcgtttcttgattttattgctagctgtttacgtgtatttgttccttcccacatcgtgatccgggttgcggaaattttgaaagttttagacatcgccggtgagcgcagcctcatcgacaactttttctgaagttaataggtgtggatttcaagactgcacttcatgaaaagtgggtagccgctgagctagaagattaagctggaactgcagtgagtcgagcaattgcagagcatcctgtgcagaaccattaaatcttggaagagaagttgcttcctctattcctttctctttttttccacatgattcaattgcagcaatgctctcctcaagctgtgaaacatattatggaaagaactaaactgtgaactagatgtttgtttcaaactggttgtgaactgaaagagtgaacaaatgtatgtttcaatctggttttagcctgtcaactgaaactgaaaatgtgaactacctatcaatttaaactgtgaactacctatcacatgtgaactaaacatgtgaacttgtgatctcaaaattgaagctgtgcacttgcaaactcaaattgaaacttgg

SEQ ID NO: 47658 - DNA, 2543 bp, Zea Mays
cctcctccccgctaatcaccacgccgcgcacgcgccgcgcgaggcccgtcttcgttcccccaccgctaatctcgccgcggcatccatggcgctgccctcgccctcccccacctatccacgccggcgccccctccctcgcgccccacctcaatctcctccattgcgcgcccaagaacgcacagatcccccattcccgcgcccctccctcgtgcctcgatggaatcgccgcagcatccatggtatggtcctcaggatccacctccaccgcgtcgccacagttcgcaggggccgagggtgccccgacggtggggatttgtactgtggtcaggagcatgcgtgttcaagcaagcactcttgctcttcgtccacaacaagctctccatgtgccctaggcacgcgacaaatgtttggggtggtgggcattaccgtcacctccctcgtgtcccgtgccgccgtggccggggtctgcttcctcgccttccgcaatgagcaatccgcggggtacgccacctctgcctacgacttcctaacaagctccccgggcgccctcatcaccgtctccggcccaggatgcgtccacaggctcgcgggcctctcccacgccaccaccaacgcctggtcgctcctcatgatctccagatcctgcgaccaggctgacgctggcaggggcgacttccaggagctcgactagatcgccgcggtgtctggtttgctcacgcggtccctcacgctccaccaaactctggcgcaattcgagcaacttcagccctcacactccgtcaatccgagcaactccaacgcaattcgagcaacccgcccttcacgcaccgtgctgcacgcagtctcgccccaatcctcattggtgtcgacttcatctgcatggaagcacatttcagagatggccagattggcgtagagacacagaacaattgcaacatgtactggttgttggtacttcacctgtgttagacggaacaccacaattgcaacctggaaaggagaatgacaaatgtttgaacagcagtggccagataggcgtagagacacagaacacaatattgttctctctacttgagatggaagaattacaagacaaggaattggaggatgcttaggaggatagacaaaaatgtgaagctaaagaaagagaagctcttagagcttatcgcaaagcacatagagctttacttgaggcaaatgaaagatgtgcaattctttgtagaaaaagggagattttctcttcacaagtccatggtttaattgcagagaattcttctttggtgcagtctttgagtattcggaatcctgaagatggccttgcaatgccatcactgctcaattctcaaattcatgcagttagtcagattcctgaaaatcagggtggtagacacaggttgtgtcctgaagaaccttctaagcagcaaattgataagcatgaagatgaagcacgtccacactattgtgataagcttgctgccagcacagctgatcccagctctatgagtgctgtcaatgctgacaacatcctttcagattatatggaagatgttcttctgttcccgactagatagacaagatcagaatgtgctctggatgttgagaatcaaatggaagaaactatacatgtatatgcataggaaaacatacaagttcctggtgacggtggtcaggattatgaacttttagaagcttctttgaggtctagatgccaccgtctctgaaccaaagcaagaaaaagtcttgccccatatctaaacagaacagataatttgcaataaaagataagcaattccatgtgcaagaaaatacattgactaaatttctttggctcgacgcttaagaaatctcgtccttccatggtttttgccatccgctagaaacaaagaaaagctaccactcactgaaagtctgaaaccaaattcagatcgcaaataaaggacccgtctgaaggttatgctacctggacatagaacataccatgagacttgcttctctgcctctgtgggatataaacataacctatgccaatgaccagaaatcagatgacacaaagtttctcaactgtaatcagttgacgatatcacttcatcatcaggtggaagagactttgttcaaacaaactaagactgcacttcatgaaaagtgggtagccgctgagctagaagattaagctggaactgcagtgagtcgagcaattgcagagcatcctgtgcagaaccattaaatcttggaagagaagttgcttcctctattcctttctctttttttccacatgattcaattgcagcaatgctctcctcaagctgtgaaacatattatggaaagaactaaactgtgaactagatgtttgtttcaaactggttgtgaactgaaagagtgaacaaatgtatgtttcaatctggttttagcctgtcaactgaaactgaaaatgtgaactacctatcaatttaaactgtgaactacctatcacatgtgaactaaacatgtgaacttgtgatctcaaaattgaagctgtgcacttgcaaactcaaattgaaacttgg

SEQ ID NO: 47659 - DNA, 2959 bp, Zea Mays
cctcctccccgctaatcaccacgccgcgcacgcgccgcgcgaggcccgtcttcgttcccccaccgctaatctcgccgcggcatccatggcgctgccctcgccctcccccacctatccacgccggcgccccctccctcgcgccccacctcaatctcctccattgcgcgcccaagaacgcacagatcccccattcccgcgcccctccctcgtgcctcgatggaatcgccgcagcatccatggtatggtcctcaggatccacctccaccgcgtcgccacagttcgcaggggccgagggtgccccgacggtggggatttgtactgtggtcaggagcatgcgtgttcaagcaagcactcttgctcttcgtccacaacaagctctccatgtgccctaggcacgcgacaaatgtttggggtggtgggcattaccgtcacctccctcgtgtcccgtgccgccgtggccggggtctgcttcctcgccttccgcaatgagcaatccgcggggtacgccacctctgcctacgacttcctaacaagctccccgggcgccctcatcaccgtctccggcccaggatgcgtccacaggctcgcgggcctctcccacgccaccaccaacgcctggtcgctcctcatgatctccagatcctgcgaccaggctgacgctggcaggggcgacttccaggagctcgactagatcgccgcggtgtctggtttgctcacgcggtccctcacgctccaccaaactctggcgcaattcgagcaacttcagccctcacactccgtcaatccgagcaactccaacgcaattcgagcaacccgcccttcacgcaccgtgctgcacgcagtctcgccccaatcctcattggtgtcgacttcatctgcatggaagcacatttcagagatggccagattggcgtagagacacagaacaattgcaacatgtactggttgttggtacttcacctgtgttagacggaacaccacaattgcaacctggaaaggagcagtggccagataggcgtagagacacagaacacaatattgttctctctacttgagatggaagaattacaagacaaggaattggaggatgcttaggaggatagacaaaaatgtgaagctaaagaaagagaagctcttagagcttatcgcaaagcacatagagctttacttgaggcaaatgaaagatgtgcaattctttgtagaaaaagggagattttctcttcacaagtccatggtttaattgcagagaattcttctttggtgcagtctttgagtattcggaatcctgaagatggccttgcaatgccatcactgctcaattctcaaattcatgcagttagtcagattcctgaaaatcagggtggtagacacaggttgtgtcctgaagaaccttctaagcagcaaattgataagcatgaagatgaagcacgtccacactattgtgataagcttgctgccagcacagctgatcccagctctatgagtgctgtcaatgctgacaacatcctttcagattatatggaagatgttcttctgttcccgactagatagacaagatcagaatgtgctctggatgttgagaatcaaatggaagaaactatacatgtatatgcataggaaaacatacaagttcctggtgacggtggtcaggattatgaacttttagaagcttctttgaggtctagatgccaccgtctctgaaccaaagcaagaaaaagtcttgccccatatctaaacagaacagataatttgcaataaaagataagcaattccatgtgcaagaaaatacattgactaaatttctttggctcgacgcttaagaaatctcgtccttccatggtttttgccatccgctagaaacaaagaaaagctaccactcactgaaagtctgaaaccaaattcagatcgcaaataaaggacccgtctgaaggttatgctacctggacatagaacataccatgagacttgcttctctgcctctgtgggatataaacataacctatgccaatgaccagaaatcagatgacacaaagtttctcaactgtaatcagttgacgatatcacttcatcatcaggtggaagagactttgttcaaacaaactaaggtgtttctctgctcatattctggtgtttatttataacgtgcctttgttttattattttggttcttttgagtgtaatgcttatatcctggtttggatatccagtttaaagatatcccatctattggacgaaccatcaatgcatgcctatgttgtttcataactgttatttcactgtaaaaggcatgtagtgtttgttgccctatagcataaaccagacttcggggtttagcttttaattacaaaaatgagtttgccggaaatttggatttcatacatgtaaattttactgattgcttcggcgtttcttgattttattgctagctgtttacgtgtatttgttccttcccacatcgtgatccgggttgcggaaattttgaaagttttagacatcgccggtgagcgcagcctcatcgacaactttttctgaagttaatagactgcacttcatgaaaagtgggtagccgctgagctagaagattaagctggaactgcagtgagtcgagcaattgcagagcatcctgtgcagaaccattaaatcttggaagagaagttgcttcctctattcctttctctttttttccacatgattcaattgcagcaatgctctcctcaagctgtgaaacatattatggaaagaactaaactgtgaactagatgtttgtttcaaactggttgtgaactgaaagagtgaacaaatgtatgtttcaatctggttttagcctgtcaactgaaactgaaaatgtgaactacctatcaatttaaactgtgaactacctatcacatgtgaactaaacatgtgaacttgtgatctcaaaattgaagctgtgcacttgcaaactcaaattgaaacttgg

SEQ ID NO: 47660 - DNA, 2993 bp, Zea Mays
cctcctccccgctaatcaccacgccgcgcacgcgccgcgcgaggcccgtcttcgttcccccaccgctaatctcgccgcggcatccatggcgctgccctcgccctcccccacctatccacgccggcgccccctccctcgcgccccacctcaatctcctccattgcgcgcccaagaacgcacagatcccccattcccgcgcccctccctcgtgcctcgatggaatcgccgcagcatccatggtatggtcctcaggatccacctccaccgcgtcgccacagttcgcaggggccgagggtgccccgacggtggggatttgtactgtggtcaggagcatgcgtgttcaagcaagcactcttgctcttcgtccacaacaagctctccatgtgccctaggcacgcgacaaatgtttggggtggtgggcattaccgtcacctccctcgtgtcccgtgccgccgtggccggggtctgcttcctcgccttccgcaatgagcaatccgcggggtacgccacctctgcctacgacttcctaacaagctccccgggcgccctcatcaccgtctccggcccaggatgcgtccacaggctcgcgggcctctcccacgccaccaccaacgcctggtcgctcctcatgatctccagatcctgcgaccaggctgacgctggcaggggcgacttccaggagctcgactagatcgccgcggtgtctggtttgctcacgcggtccctcacgctccaccaaactctggcgcaattcgagcaacttcagccctcacactccgtcaatccgagcaactccaacgcaattcgagcaacccgcccttcacgcaccgtgctgcacgcagtctcgccccaatcctcattggtgtcgacttcatctgcatggaagcacatttcagagatggccagattggcgtagagacacagaacaattgcaacatgtactggttgttggtacttcacctgtgttagacggaacaccacaattgcaacctggaaaggagaatgacaaatgtttgaacagcagtggccagataggcgtagagacacagaacacaatattgttctctctacttgagatggaagaattacaagacaaggaattggaggatgcttaggaggatagacaaaaatgtgaagctaaagaaagagaagctcttagagcttatcgcaaagcacatagagctttacttgaggcaaatgaaagatgtgcaattctttgtagaaaaagggagattttctcttcacaagtccatggtttaattgcagagaattcttctttggtgcagtctttgagtattcggaatcctgaagatggccttgcaatgccatcactgctcaattctcaaattcatgcagttagtcagattcctgaaaatcagggtggtagacacaggttgtgtcctgaagaaccttctaagcagcaaattgataagcatgaagatgaagcacgtccacactattgtgataagcttgctgccagcacagctgatcccagctctatgagtgctgtcaatgctgacaacatcctttcagattatatggaagatgttcttctgttcccgactagatagacaagatcagaatgtgctctggatgttgagaatcaaatggaagaaactatacatgtatatgcataggaaaacatacaagttcctggtgacggtggtcaggattatgaacttttagaagcttctttgaggtctagatgccaccgtctctgaaccaaagcaagaaaaagtcttgccccatatctaaacagaacagataatttgcaataaaagataagcaattccatgtgcaagaaaatacattgactaaatttctttggctcgacgcttaagaaatctcgtccttccatggtttttgccatccgctagaaacaaagaaaagctaccactcactgaaagtctgaaaccaaattcagatcgcaaataaaggacccgtctgaaggttatgctacctggacatagaacataccatgagacttgcttctctgcctctgtgggatataaacataacctatgccaatgaccagaaatcagatgacacaaagtttctcaactgtaatcagttgacgatatcacttcatcatcaggtggaagagactttgttcaaacaaactaaggtgtttctctgctcatattctggtgtttatttataacgtgcctttgttttattattttggttcttttgagtgtaatgcttatatcctggtttggatatccagtttaaagatatcccatctattggacgaaccatcaatgcatgcctatgttgtttcataactgttatttcactgtaaaaggcatgtagtgtttgttgccctatagcataaaccagacttcggggtttagcttttaattacaaaaatgagtttgccggaaatttggatttcatacatgtaaattttactgattgcttcggcgtttcttgattttattgctagctgtttacgtgtatttgttccttcccacatcgtgatccgggttgcggaaattttgaaagttttagacatcgccggtgagcgcagcctcatcgacaactttttctgaagttaataggtgtggatttcaagactgcacttcatgaaaagtgggtagccgctgagctagaagattaagctggaactgcagtgagtcgagcaattgcagagcatcctgtgcagaaccattaaatcttggaagagaagttgcttcctctattcctttctctttttttccacatgattcaattgcagcaatgctctcctcaagctgtgaaacatattatggaaagaactaaactgtgaactagatgtttgtttcaaactggttgtgaactgaaagagtgaacaaatgtatgtttcaatctggttttagcctgtcaactgaaactgaaaatgtgaactacctatcaatttaaactgtgaactacctatcacatgtgaactaaacatgtgaacttgtgatctcaaaattgaagctgtgcacttgcaaactcaaattgaaacttgg

SEQ ID NO: 47661 - DNA, 2649 bp, Zea Mays
cctcctccccgctaatcaccacgccgcgcacgcgccgcgcgaggcccgtcttcgttcccccaccgctaatctcgccgcggcatccatggcgctgccctcgccctcccccacctatccacgccggcgccccctccctcgcgccccacctcaatctcctccattgcgcgcccaagaacgcacagatcccccattcccgcgcccctccctcgtgcctcgatggaatcgccgcagcatccatggtatggtcctcaggatccacctccaccgcgtcgccacagttcgcaggggccgagggtgccccgacggtggggatttgtactgtggtcaggagcatgcgtgttcaagcaagcactcttgctcttcgtccacaacaagctctccatgtgccctaggcacgcgacaaatgtttggggtggtgggcattaccgtcacctccctcgtgtcccgtgccgccgtggccggggtctgcttcctcgccttccgcaatgagcaatccgcggggtacgccacctctgcctacgacttcctaacaagctccccgggcgccctcatcaccgtctccggcccaggatgcgtccacaggctcgcgggcctctcccacgccaccaccaacgcctggtcgctcctcatgatctccagatcctgcgaccaggctgacgctggcaggggcgacttccaggagctcgactagatcgccgcggtgtctggtttgctcacgcggtccctcacgctccaccaaactctggcgcaattcgagcaacttcagccctcacactccgtcaatccgagcaactccaacgcaattcgagcaacccgcccttcacgcaccgtgctgcacgcagtctcgccccaatcctcattggtgtcgacttcatctgcatggaagcacatttcagagatggccagattggcgtagagacacagaacaattgcaacatgtactggttgttggtacttcacctgtgttagacggaacaccacaattgcaacctggaaaggagtggccagataggcgtagagacacagaacacaatattgttctctctacttgagatggaagaattacaagacaaggaattggaggatgcttaggaggatagacaaaaatgtgaagctaaagaaagagaagctcttagagcttatcgcaaagcacatagagctttacttgaggcaaatgaaagatgtgcaattctttgtagaaaaagggagattttctcttcacaagtccatggtttaattgcagagaattcttctttggtgcagtctttgagtattcggaatcctgaagatggccttgcaatgccatcactgctcaattctcaaattcatgcagttagtcagattcctgaaaatcagggtggtagacacaggttgtgtcctgaagaaccttctaagcagcaaattgataagcatgaagatgaagcacgtccacactattgtgataagcttgctgccagcacagctgatcccagctctatgagtgctgtcaatgctgacaacatcctttcagattatatggaagatgttcttctgttcccgactagatagacaagatcagaatgtgctctggatgttgagaatcaaatggaagaaactatacatgtatatgcataggaaaacatacaagttcctggtgacggtggtcaggattatgaacttttagaagcttctttgaggtctagatgccaccgtctctgaaccaaagcaagaaaaagtcttgccccatatctaaacagaacagataatttgcaataaaagataagcaattccatgtgcaagaaaatacattgactaaatttctttggctcgacgcttaagaaatctcgtccttccatggtttttgccatccgctagaaacaaagaaaagctaccactcactgaaagtctgaaaccaaattcagatcgcaaataaaggacccgtctgaaggttatgctacctggacatagaacataccatgagacttgcttctctgcctctgtgggatataaacataacctatgccaatgaccagaaatcagatgacacaaagtttctcaactgtaatcagttgacgatatcacttcatcatcaggtggaagagactttgttcaaacaaactaagctgtttacgtgtatttgttccttcccacatcgtgatccgggttgcggaaattttgaaagttttagacatcgccggtgagcgcagcctcatcgacaactttttctgaagttaataggtgtggatttcaagactgcacttcatgaaaagtgggtagccgctgagctagaagattaagctggaactgcagtgagtcgagcaattgcagagcatcctgtgcagaaccattaaatcttggaagagaagttgcttcctctattcctttctctttttttccacatgattcaattgcagcaatgctctcctcaagctgtgaaacatattatggaaagaactaaactgtgaactagatgtttgtttcaaactggttgtgaactgaaagagtgaacaaatgtatgtttcaatctggttttagcctgtcaactgaaactgaaaatgtgaactacctatcaatttaaactgtgaactacctatcacatgtgaactaaacatgtgaacttgtgatctcaaaattgaagctgtgcacttgcaaactcaaattgaaacttgg

SEQ ID NO: 47662 - DNA, 2672 bp, Zea Mays
cctcctccccgctaatcaccacgccgcgcacgcgccgcgcgaggcccgtcttcgttcccccaccgctaatctcgccgcggcatccatggcgctgccctcgccctcccccacctatccacgccggcgccccctccctcgcgccccacctcaatctcctccattgcgcgcccaagaacgcacagatcccccattcccgcgcccctccctcgtgcctcgatggaatcgccgcagcatccatggtatggtcctcaggatccacctccaccgcgtcgccacagttcgcaggggccgagggtgccccgacggtggggatttgtactgtggtcaggagcatgcgtgttcaagcaagcactcttgctcttcgtccacaacaagctctccatgtgccctaggcacgcgacaaatgtttggggtggtgggcattaccgtcacctccctcgtgtcccgtgccgccgtggccggggtctgcttcctcgccttccgcaatgagcaatccgcggggtacgccacctctgcctacgacttcctaacaagctccccgggcgccctcatcaccgtctccggcccaggatgcgtccacaggctcgcgggcctctcccacgccaccaccaacgcctggtcgctcctcatgatctccagatcctgcgaccaggctgacgctggcaggggcgacttccaggagctcgactagatcgccgcggtgtctggtttgctcacgcggtccctcacgctccaccaaactctggcgcaattcgagcaacttcagccctcacactccgtcaatccgagcaactccaacgcaattcgagcaacccgcccttcacgcaccgtgctgcacgcagtctcgccccaatcctcattggtgtcgacttcatctgcatggaagcacatttcagagatggccagattggcgtagagacacagaacaattgcaacatgtactggttgttggtacttcacctgtgttagacggaacaccacaattgcaacctggaaaggagaatgacaaatgtttgaacagcagtggccagataggcgtagagacacagaacacaatattgttctctctacttgagatggaagaattacaagacaaggaattggaggatgcttaggaggatagacaaaaatgtgaagctaaagaaagagaagctcttagagcttatcgcaaagcacatagagctttacttgaggcaaatgaaagatgtgcaattctttgtagaaaaagggagattttctcttcacaagtccatggtttaattgcagagaattcttctttggtgcagtctttgagtattcggaatcctgaagatggccttgcaatgccatcactgctcaattctcaaattcatgcagttagtcagattcctgaaaatcagggtggtagacacaggttgtgtcctgaagaaccttctaagcagcaaattgataagcatgaagatgaagcacgtccacactattgtgataagcttgctgccagcacagctgatcccagctctatgagtgctgtcaatgctgacaacatcctttcagattatatggaagatgttcttctgttcccgactagatagacaagatcagaatgtgctctggatgttgagaatcaaatggaagaaactatacatgtatatgcataggaaaacatacaagttcctggtgacggtggtcaggattatgaacttttagaagcttctttgaggtctagatgccaccgtctctgaaccaaagcaagaaaaagtcttgccccatatctaaacagaacagataatttgcaataaaagataagcaattccatgtgcaagaaaatacattgactaaatttctttggctcgacgcttaagaaatctcgtccttccatggtttttgccatccgctagaaacaaagaaaagctaccactcactgaaagtctgaaaccaaattcagatcgcaaataaaggacccgtctgaaggttatgctacctggacatagaacataccatgagacttgcttctctgcctctgtgggatataaacataacctatgccaatgaccagaaatcagatgacacaaagtttctcaactgtaatcagttgacgatatcacttcatcatcaggtggaagagactttgttcaaacaaactaagctgtttacgtgtatttgttccttcccacatcgtgatccgggttgcggaaattttgaaagttttagacatcgccggtgagcgcagcctcatcgacaactttttctgaagttaataggtgtggatttcaagactgcacttcatgaaaagtgggtagccgctgagctagaagattaagctggaactgcagtgagtcgagcaattgcagagcatcctgtgcagaaccattaaatcttggaagagaagttgcttcctctattcctttctctttttttccacatgattcaattgcagcaatgctctcctcaagctgtgaaacatattatggaaagaactaaactgtgaactagatgtttgtttcaaactggttgtgaactgaaagagtgaacaaatgtatgtttcaatctggttttagcctgtcaactgaaactgaaaatgtgaactacctatcaatttaaactgtgaactacctatcacatgtgaactaaacatgtgaacttgtgatctcaaaattgaagctgtgcacttgcaaactcaaattgaaacttgg

SEQ ID NO: 47663 - DNA, 3554 bp, Zea Mays
aaataacagccagagtgccaggtgctgtagtagtagtacaacggggcagcactgcactgcactgcaactgcgaatttccgtcagcttggagcggtccaagcgccctgcgaagcaaactacgccgatggcttcggcggcggcgtgggagggtccgacggccgcggagctgaagacagcgggggcggaggtgattcccggcggcgtgcgagtgaaggggtgggtcatccagtcccacaaaggccctatcctcaacgccgcctctctgcaacgctttgaagatgaacttcaaacaacacatttacctgagatggtttttggagagagtttcttgtcacttcaacatacacaaactggcatcaaatttcattttaatgcgcttgatgcactcaaggcatggaagaaagaggcactgccacctgttgaggttcctgctgcagcaaaatggaagttcagaagtaagccttctgaccaggttatacttgactacgactatacatttacgacaccatattgtgggagtgatgctgtggttgtgaactctggcactccacaaacaagtttagatggatgcggcactttgtgttgggaggatactaatgatcggattgacattgttgccctttcagcaaaagaacccattcttttctacgacgaggttatcttgtatgaagatgagttagctgacaatggtatctcatttcttactgtgcgagtgagggtaatgccaactggttggtttctgcttttgcgtttttgggtatgttctaataccttgcttttttttggatttgatgcctcattaacatgaagacaatttctgagggtgatgtattgctaataagatggaacctgttagatttgtagtgagtttgtgacaattcagactcagatggttgcccagtgttctgttcctcttaagccgatatttttttcaggaaaacttgtgaagagctgttcattaaataacttcactactcttgtgactgactttatgctgatcccttcgaaataaaatgacaaagccttcaagttccaagcaagttaaggtaggctaaagtaatcctatggatcaagaaaagatacaacttttgaaggggcaaatattaattattgaggcctaagtttgaactgaagatcctccaaacagacgtagtcatatgttggagtaatatataaccgtgtaacagtattcccccacgtttaagatgcaagtttttgacatatgtaggattttgaagatacttatcttcatatatgaaccagcttgtccatactgatgattgcctgtcgacctaacagcttagagttgatggtgtactgatgaggttgagagacactcggttacattgcctgtttggaaacggcgacggagccaagccagtggtacttcgtgagtgctgctggagggaagcaacatttgctactttgtctgcgaaaggatatccttcggactctgcagcgtacgcggacccgaaccttattgcccataagcttcctattgtgacgcagaagacccaaaagctgaaaaatcttacctgactgacacaaaggcgccctaccgcgtgtacatcatgactgtcctgtcctatcgttgccttttgtgtttgccacatgttgtggatgtacgtttctatgacgaaacaccatagtccatttcgcctgggccgaacagagatagctgcttgtcatgtcacgtttgaattagaccattccttagcccttttttttttcctcctcttattctctgtctgccagtctataaaacgtcttacatttgttgacctgaacatgctcacgagtgcgcactccgtgaatgtcctatcagatcttctgaagaacgtcatacatagcctcacgagttgtacacaaagcctccagcggaacagccttgggcatcgtcagtccgctgccctcgctcatgtcaacctccacgccatcgactctgttccagtggaagcactggatgagggaccccagcgccaccccgaccgtctgcagcgcgagcctctctccggggcacttgcgccgccccatcccaaacggcgccacgaacagcccctcggctttcccgccctcgaaccgctccggcacgaacctgcccggctcctcccacacagccgggtccctgtggatcgcgtacacgttcaccagcagcgccgtgccgcgcgggacgtcgtagccgccgaccttgcagtctgccgacgactcgtgcgggagcagcagcggcgcggcggggtacaggcgcagcgtctcggcgatgatgcacctgaggtagccgagacgcggcaggtcgcccgcgttgagcaagcgggagtgccccacagcggcgtcgatctctgctcgtgccttctcgagtgtccctggattgttgagcagcagcgacatggcccattcgactgtggtcgaggtcgtctctgttccagctccaaataggttcttctcaaaaaaacgatccgacgttcaaccatcgtcagtgacagagaagagaaccaacgtctctgtactaggctagccagtcgagtatccggtgaaaaatgaatcgaacgaaaaaaaaatgaatccctcaccgaacagaaagccgtgatcacggtgtcggtgtaaacctccggctccagcttctgcagggcgagcagcacggcgatcaagctcttcttctcgccgcagacgccgtcggccatcctccgccgctccgcgtcgatcagccgccgcagaaacgcgtccctcctgctcaccgcggccaggatcctgctcctcacgccggccacgtcgaaccaccgcagcaccggcaggtagtcccacagcaccgagctgacgtacgggaagacctcgtcgatgacccgcttgaactcctgcgcttccggcgacatgtcggtggtgccgtccgcgtctggctccggctccgggtcccggcgcgccgccttggtctccgcgatggcctccatgaggacgctgagcgagagctcgaacagcctgcgcttcagctcgacccgcgcgccggcgcccgcggccgcggcagccgcgcggtgcaggcgccgcaccatggcgcgcacctcgccgcagatgacgcccgacatgcagccgacgcggtgcgccgagaggagctgcaccacggcgacgcggcggaggtcgcgccagcgcggcccgtagctggccgtgccgagcgcggcgccgtcgaaggtcacgagcctctgcgagggcagcagcgagcggttggcgaacgtcacgtcgtgctccgtgaagcactcccgcgcgcacgccggggacgtcaccaccgcggcgtcgcgggagcccaggcgcagcgtgaagaccggcccgtggcgctgcgcgaggccggacagcgtggcgtggaacggcttcttgatcaggtggaggtggccgaggaaggggacggcgcctggagggctcggcggcggccgccgcatgctcctgctcttgccgtcgcgtctggcgagaccatggacgcggcgtaggaggaagaggaagactaaggagagaatggcgatgtaggccgccagatccatcatgcttgttaagcttagacgtgttgcgtttgc

SEQ ID NO: 47664 - DNA, 987 bp, Zea Mays
agtagtagtacaacggggcagcactgcactgcactgcaactgcgaatttccgtcagcttggagcggtccaagcgccctgcgaagcaaactacgccgatggcttcggcggcggcgtgggagggtccgacggccgcggagctgaagacagcgggggcggaggtgattcccggcggcgtgcgagtgaaggggtgggtcatccagtcccacaaaggccctatcctcaacgccgcctctctgcaacgctttgaagatgaacttcaaacaacacatttacctgagatggtttttggagagagtttcttgtcacttcaacatacacaaactggcatcaaatttcattttaatgcgcttgatgcactcaaggcatggaagaaagaggcactgccacctgttgaggttcctgctgcagcaaaatggaagttcagaaggtcatctataactgtaattcattttagtactcaattcagtactaccgagcatttgtagtgaaagatgttaggttagtttggcatcacccaccctgtttgaaagcagtccactttgtcttaaagttttcaaggttatgttcacaatacagatttgtggatggaaataattaaataaatttatttactttgtatcttgcattgtttcaagaaaagtacaatagcacacagtttgaggtgtttatattggtcttagctgaaaaaagaagttcagataattaaaacatcatgcgttaatttgtgagttcattaaaaagcctaagcacgggttgttttaacttgttttcttgcagtaagccttctgaccaggttatacttgactacgactatacatttacgacaccatattgtgggagtgatgctgtggttgtgaactctggcactccacaaacaagtttagatggatgcggcactttgtgttgggaggatactaatgatcggattgacattgttgccctttcagcaaaagaacccattcttttctacgacgaggatgtatgta

SEQ ID NO: 47665 - DNA, 3095 bp, Zea Mays
agtagtagtacaacggggcagcactgcactgcactgcaactgcgaatttccgtcagcttggagcggtccaagcgccctgcgaagcaaactacgccgatggcttcggcggcggcgtgggagggtccgacggccgcggagctgaagacagcgggggcggaggtgattcccggcggcgtgcgagtgaaggggtgggtcatccagtcccacaaaggccctatcctcaacgccgcctctctgcaacgctttgaagatgaacttcaaacaacacatttacctgagatggtttttggagagagtttcttgtcacttcaacatacacaaactggcatcaaatttcattttaatgcgcttgatgcactcaaggcatggaagaaagaggcactgccacctgttgaggttcctgctgcagcaaaatggaagttcagaagtaagccttctgaccaggttatacttgactacgactatacatttacgacaccatattgtgggagtgatgctgtggttgtgaactctggcactccacaaacaagtttagatggatgcggcactttgtgttgggaggatactaatgatcggattgacattgttgccctttcagcaaaagaacccattcttttctacgacgaggttatcttgtatgaagatgagttagctgacaatggtatctcatttcttactgtgcgagtgagggtaatgccaactggttggtttctgcttttgcgtttttgggaaaacttgtgaagagctgttcattaaataacttcactactcttgtgactgactttatgctgatcccttcgaaataaaatgacaaagccttcaagttccaagcaagttaagcttagagttgatggtgtactgatgaggttgagagacactcggttacattgcctgtttggaaacggcgacggagccaagccagtggtacttcgtgagtgctgctggagggaagcaacatttgctactttgtctgcgaaaggatatccttcggactctgcagcgtacgcggacccgaaccttattgcccataagcttcctattgtgacgcagaagacccaaaagctgaaaaatcttacctgactgacacaaaggcgccctaccgcgtgtacatcatgactgtcctgtcctatcgttgccttttgtgtttgccacatgttgtggatgtacgtttctatgacgaaacaccatagtccatttcgcctgggccgaacagagatagctgcttgtcatgtcacgtttgaattagaccattccttagcccttttttttttcctcctcttattctctgtctgccagtctataaaacgtcttacatttgttgacctgaacatgctcacgagtgcgcactccgtgaatgtcctatcagatcttctgaagaacgtcatacatagcctcacgagttgtacacaaagcctccagcggaacagccttgggcatcgtcagtccgctgccctcgctcatgtcaacctccacgccatcgactctgttccagtggaagcactggatgagggaccccagcgccaccccgaccgtctgcagcgcgagcctctctccggggcacttgcgccgccccatcccaaacggcgccacgaacagcccctcggctttcccgccctcgaaccgctccggcacgaacctgcccggctcctcccacacagccgggtccctgtggatcgcgtacacgttcaccagcagcgccgtgccgcgcgggacgtcgtagccgccgaccttgcagtctgccgacgactcgtgcgggagcagcagcggcgcggcggggtacaggcgcagcgtctcggcgatgatgcacctgaggtagccgagacgcggcaggtcgcccgcgttgagcaagcgggagtgccccacagcggcgtcgatctctgctcgtgccttctcgagtgtccctggattgttgagcagcagcgacatggcccattcgactgtggtcgaggtcgtctctgttccagctccaaataggttcttctcaaaaaaacgatccgacgttcaaccatcgtcagtgacagagaagagaaccaacgtctctgtactaggctagccagtcgagtatccggtgaaaaatgaatcgaacgaaaaaaaaatgaatccctcaccgaacagaaagccgtgatcacggtgtcggtgtaaacctccggctccagcttctgcagggcgagcagcacggcgatcaagctcttcttctcgccgcagacgccgtcggccatcctccgccgctccgcgtcgatcagccgccgcagaaacgcgtccctcctgctcaccgcggccaggatcctgctcctcacgccggccacgtcgaaccaccgcagcaccggcaggtagtcccacagcaccgagctgacgtacgggaagacctcgtcgatgacccgcttgaactcctgcgcttccggcgacatgtcggtggtgccgtccgcgtctggctccggctccgggtcccggcgcgccgccttggtctccgcgatggcctccatgaggacgctgagcgagagctcgaacagcctgcgcttcagctcgacccgcgcgccggcgcccgcggccgcggcagccgcgcggtgcaggcgccgcaccatggcgcgcacctcgccgcagatgacgcccgacatgcagccgacgcggtgcgccgagaggagctgcaccacggcgacgcggcggaggtcgcgccagcgcggcccgtagctggccgtgccgagcgcggcgccgtcgaaggtcacgagcctctgcgagggcagcagcgagcggttggcgaacgtcacgtcgtgctccgtgaagcactcccgcgcgcacgccggggacgtcaccaccgcggcgtcgcgggagcccaggcgcagcgtgaagaccggcccgtggcgctgcgcgaggccggacagcgtggcgtggaacggcttcttgatcaggtggaggtggccgaggaaggggacggcgcctggagggctcggcggcggccgccgcatgctcctgctcttgccgtcgcgtctggcgagaccatggacgcggcgtaggaggaagaggaagactaaggagagaatggcgatgtaggccgccagatccatcatgcttgttaagcttagacgtgttgcgtttgc

SEQ ID NO: 47666 - DNA, 2514 bp, Zea Mays
gggttctgccggttcttcaaacgcgcgtgacattgacctgtaccatctcccgcttctttatcctactcccaccctctccgatgatttacatgccgcgcctttgcggggcaggaaagcagacggatcaacacgcttcctcagcgccatacgcacacacaggggacagaggtcctctcgctgccatttctctaatcgcatgcacatcacgttctcgcgtggaggatatgtcttgccttgcattcgccattgcggattgcaggcagagggaggcagctgaggattaattcaggctgcctctggctgctcgtctgctcgctcgcctgtccgcttcaaaattgacgcccgtgacctttggtaaaagcgagagctttcttcttagcattatccgctgggaaataaagagagtgcgggagacagttggaggccgttcggttgctggatcgtttgacaagggtaactgatgtctctttttttttttgatttggtgatcgtcatctgactcttttttttctgttatgcaagtaatagaaatggagtgatctccgttcgaaaaaaaaaatctgactctgatcagttcttgaaggttgctgattctgcaaggtgcgactcgaattttcttgcgcagcctagctagctaggcgagggcggccaatgggttcctgcgtgtcgtcgacgaggcaccggcggcggccgaggaagctgtcggtcgcggcgaggaagatccggcggaaggtgtgcacggcgatcgccgacgcgcccatcatctgcggcgcggcgagctgcctcgcccggcacggggtcgtccacgtggaggcgccggactccagcgtcaccctgcacctcaccaagctgcagtggcagcgcagccagacggacgccgggaacgtgatttgcgaggaagcatggtacgattctgtcagcatcctggagtcaccggactccgacgacgatctcgacaacgatttcgctagcgtcagcggagaccctctccctgatgtcaccggcggctcaaatgcacaacagtgcaaggacgcggcgtgcttcttggacaccatgcagctcctcaggagcattgcaaacgcggaagcctgtgaccgaagggaacagcctgacaagagcgatgactcgaacggcgaggagtgctgcagtagcagcacactgaaggagcttcaggccgcaatgtcgccgcggccgttcccggcgtcgattccgagcaacaaggtccagccgatgccgatcgctggtgccagcccgcaccagcagcagcagaagaagaaaacggccgtggtcaggctctcgttcaggacaaggtcatacgagggcgacgagatgaccgaaacgagtggttctgcgaattacttgtaccgcccaagggcaggtttcacggtgccgtgttgttccacgggcgagaagctgtcggaaggttgctggtcggttcttgagccatcgacgttcagggtccgaggggagagcttcttcaaagacaagaggaaatacccggccccagactgctccccttacacccccattggagcagacatgttcgcctacacgagaaagattcatcacattgcgcagcacctctcgcttccgtctctcaagacacacgaagcctttcctaccctcctcattgtgaacattcagctgcccacataccctgctacagtgtttggcgacaacgacggcgacgggataagcctagttctgtatttcaagttatctgacagttttgacaaggagatctctcctcaattgcaggacagcatcaagaggcttatgaatgatgagatggaaaaggtgaagggatttgcagtagacagcattgtgccctacacagagaggctgaaaatcctggctggtctggcaaaccctgaagacctgcagctgagcacggcagagaggaagctcgtgcagacttacaatcagaagcctgtgctatctcgcccacaacacaaattctacaagggcccaaattactttgagatcgatctcgatgtgcatcggttcagcttcatatcgcggaaagggctcgagacattacgggagcggctcaggcatggcgttcttgatcttggtctaactattcaggcacaaaaggctgaggagctgccagagcatgtcttgtgctgcatgaggctgaacaagatcgacttcgccgacaacgggcatataccgacgctgataactgcagctgacgagtaaatctgtcgtgttactgtagggcactaactttcaggaaaaagcaaaagagactagagtgtggttcgtagatgttcttgagatgctgttgtatagagcggcagatagttgtaggaactaactcaagtttgagatgctgttgtatagagcggcaaatacttgttgatcgttgctccaaaagaggaggggggaaaaagacattgcagcaggctgcattctgaactctgaagaagtgaagatgtatatgcatgcctgtgttttcttttcttttttttgaaacggaatacatgtctgtgttttcaattcgtatatgca

SEQ ID NO: 47667 - DNA, 2315 bp, Zea Mays
cggatcaacacgcttcctcagcgccatacgcacacacaggggacagaggtcctctcgctgccatttctctaatcgcatgcacatcacgttctcgcgtggaggatatgtcttgccttgcattcgccattgcggattgcaggcagagggaggcagctgaggattaattcaggctgcctctggctgctcgtctgctcgctcgcctgtccgcttcaaaattgacgcccgtgacctttggtaaaagcgagagctttcttcttagcattatccgctgggaaataaagagagtgcgggagacagttggaggccgttcggttgctggatcgtttgacaagggttgctgattctgcaaggtgcgactcgaattttcttgcgcagcctagctagctaggcgagggcggccaatgggttcctgcgtgtcgtcgacgaggcaccggcggcggccgaggaagctgtcggtcgcggcgaggaagatccggcggaaggtgtgcacggcgatcgccgacgcgcccatcatctgcggcgcggcgagctgcctcgcccggcacggggtcgtccacgtggaggcgccggactccagcgtcaccctgcacctcaccaagctgcagtggcagcgcagccagacggacgccgggaacgtgatttgcgaggaagcatggtacgattctgtcagcatcctggagtcaccggactccgacgacgatctcgacaacgatttcgctagcgtcagcggagaccctctccctgatgtcaccggcggctcaaatgcacaacagtgcaaggacgcggcgtgcttcttggacaccatgcagctcctcaggagcattgcaaacgcggaagcctgtgaccgaagggaacagcctgacaagagcgatgactcgaacggcgaggagtgctgcagtagcagcacactgaaggagcttcaggccgcaatgtcgccgcggccgttcccggcgtcgattccgagcaacaaggtccagccgatgccgatcgctggtgccagcccgcaccagcagcagcagaagaagaaaacggccgtggtcaggctctcgttcaggacaaggtcatacgagggcgacgagatgaccgaaacgatgccgttcagtggctggattattacttcgctgacaagtcctgcaatcccaggtggttctgcgaattacttgtaccgcccaagggcaggtttcacggtgccgtgttgttccacgggcgagaagctgtcggaaggttgctggtcggttcttgagccatcgacgttcagggtccgaggggagagcttcttcaaagacaagaggaaatacccggccccagactgctccccttacacccccattggagcagacatgttcgcctacacgagaaagattcatcacattgcgcagcacctctcgcttccgtctctcaagacacacgaagcctttcctaccctcctcattgtgaacattcagctgcccacataccctgctacagtgtttggcgacaacgacggcgacgggataagcctagttctgtatttcaagttatctgacagttttgacaaggagatctctcctcaattgcaggacagcatcaagaggcttatgaatgatgagatggaaaaggtgaagggatttgcagtagacagcattgtgccctacacagagaggctgaaaatcctggctggtctggcaaaccctgaagacctgcagctgagcacggcagagaggaagctcgtgcagacttacaatcagaagcctgtgctatctcgcccacaacacaaattctacaagggcccaaattactttgagatcgatctcgatgtgcatcggttcagcttcatatcgcggaaagggctcgagacattacgggagcggctcaggcatggcgttcttgatcttggtctaactattcaggcacaaaaggctgaggagctgccagagcatgtcttgtgctgcatgaggctgaacaagatcgacttcgccgacaacgggcatataccgacgctgataactgcagctgacgagtaaatctgtcgtgttactgtagggcactaactttcaggaaaaagcaaaagagactagagtgtggttcgtagatgttcttgagatgctgttgtatagagcggcagatagttgtaggaactaactcaagtttgagatgctgttgtatagagcggcaaatacttgttgatcgttgctccaaaagaggaggggggaaaaagacattgcagcaggctgcattctgaactctgaagaagtgaagatgtatatgcatgcctgtgttttcttttcttttttttgaaacggaatacatgtctgtgttttcaattcgtatatgca

SEQ ID NO: 47668 - DNA, 2095 bp, Zea Mays
ctttggtaaaagcgagagctttcttcttagcattatccgctgggaaataaagagagtgcgggagacagttggaggccgttcggttgctggatcgtttgacaaggttcttgaaggttgctgattctgcaaggtgcgactcgaattttcttgcgcagcctagctagctaggcgagggcggccaatgggttcctgcgtgtcgtcgacgaggcaccggcggcggccgaggaagctgtcggtcgcggcgaggaagatccggcggaaggtgtgcacggcgatcgccgacgcgcccatcatctgcggcgcggcgagctgcctcgcccggcacggggtcgtccacgtggaggcgccggactccagcgtcaccctgcacctcaccaagctgcagtggcagcgcagccagacggacgccgggaacgtgatttgcgaggaagcatggtacgattctgtcagcatcctggagtcaccggactccgacgacgatctcgacaacgatttcgctagcgtcagcggagaccctctccctgatgtcaccggcggctcaaatgcacaacagtgcaaggacgcggcgtgcttcttggacaccatgcagctcctcaggagcattgcaaacgcggaagcctgtgaccgaagggaacagcctgacaagagcgatgactcgaacggcgaggagtgctgcagtagcagcacactgaaggagcttcaggccgcaatgtcgccgcggccgttcccggcgtcgattccgagcaacaaggtccagccgatgccgatcgctggtgccagcccgcaccagcagcagcagaagaagaaaacggccgtggtcaggctctcgttcaggacaaggtcatacgagggcgacgagatgaccgaaacgatgccgttcagtggctggattattacttcgctgacaagtcctgcaatcccaggtggttctgcgaattacttgtaccgcccaagggcaggtttcacggtgccgtgttgttccacgggcgagaagctgtcggaaggttgctggtcggttcttgagccatcgacgttcagggtccgaggggagagcttcttcaaagacaagaggaaatacccggccccagactgctccccttacacccccattggagcagacatgttcgcctacacgagaaagattcatcacattgcgcagcacctctcgcttccgtctctcaagacacacgaagcctttcctaccctcctcattgtgaacattcagctgcccacataccctgctacagtgtttggcgacaacgacggcgacgggataagcctagttctgtatttcaagttatctgacagttttgacaaggagatctctcctcaattgcaggacagcatcaagaggcttatgaatgatgagatggaaaaggtgaagggatttgcagtagacagcattgtgccctacacagagaggctgaaaatcctggctggtctggcaaaccctgaagacctgcagctgagcacggcagagaggaagctcgtgcagacttacaatcagaagcctgtgctatctcgcccacaacacaaattctacaagggcccaaattactttgagatcgatctcgatgtgcatcggttcagcttcatatcgcggaaagggctcgagacattacgggagcggctcaggcatggcgttcttgatcttggtctaactattcaggcacaaaaggctgaggagctgccagagcatgtcttgtgctgcatgaggctgaacaagatcgacttcgccgacaacgggcatataccgacgctgataactgcagctgacgagtaaatctgtcgtgttactgtagggcactaactttcaggaaaaagcaaaagagactagagtgtggttcgtagatgttcttgagatgctgttgtatagagcggcagatagttgtaggaactaactcaagtttgagatgctgttgtatagagcggcaaatacttgttgatcgttgctccaaaagaggaggggggaaaaagacattgcagcaggctgcattctgaactctgaagaagtgaagatgtatatgcatgcctgtgttttcttttcttttttttgaaacggaatacatgtctgtgttttcaattcgtatatgca

SEQ ID NO: 47669 - DNA, 4376 bp, Zea Mays
ggtcgttccattcccttcctcagaggagagagaaagagagcgagcaagtctgggagggggaggcacagcagtcaggcaggcaggcaacgcccaccccccacagaggagagagagagagaaagaggcagcagagcacataaccaaacgacacccatccgaaaaccccgaaaggaggagggaaaagggtgagagaaaaccacgcagtcgcttgtccagacaaaacaagaacaagaacccaccagtacgcacttcctcctcctcctcctcctctctgcctctctctcctccctccctccgccagtccgctcccccctggcccatcagatccaattccttcccccgacccccgtcccggatccgccgcaattccttcctgcgtcgagctcgactgctccctctccctgcccgcaagaatcccgccgtggccggcggcttagtgggactcccaagtcgaagccaaggctggtggggggcgcgctcctgccgggcgtagcgggccatgggcgcgctgttgccgttcgtgcgtcgggtaaccagggccgtcaggctcagtccgctgcagcgcagcgccgaggatcggtgaggtaatttctcgtgaacgcattccgctattgactgctcgccctgtcgagcagattgagctatccaatatccatttagctcgacacagtgaagaactgaagatacacattgggcttgcttgtgttccgtctctctcaaacatcctgttggtgtgctgtgaaggtctgaaggtcacataatccacttggctatatgccggggtgggtaatgtgagtcgggcttgataaatgcagacttgttaacttgttttgcaacaagaatgggggcaaaagtagaacgggaaagttatatgcctggatattatgccacgggggatctcaatttggaaccaaatggtagatggtctccatactatgaggagatgacatcaaatgatcagttatgcaatggcttcacaacaaaaccaacaaatgactattcagaatttgacaaagaaatactcaagcatcaaatacttgaacatgaagctgtgtttagacaacaggtgtatgaactgcaccgagtttacaaaatacagaaggatatgatgaaacaacatcaaagcaaagaggtatattcatacccaactttggcagttgcatcacatacaaattcaccatcacaagtgccacaaaacggtgcaaagatgatgtggcagatgccagttcctccaatgtccacaacatacaggaaagctattggagagcataatgatacaaaccagtcctccatgaagttccttagagaaggcagtgtgcagtcctcaccaaatggatttatatcaagtgatgttggtccaagaagcagacaaggcacttttgaccttcaacttccagctgatcattatatagatgacgatggcacatcagataacaagcccatagatttccttggtttggcatcagatacaaaaccccggaatgatgctgagcttacattagttagtgcagaaggcttgggcaagttcagtgataatagttcatcctcgggtttgcagactacaaataatcttggaccccggcaggttaccgacctgaatgaatcaaatactggcttccatatgggtagagcaaatggatcagtttccagaggccttccgcgtacccttgagaactcatggaaccaaccaatattgagagcaaacacaactaatttcagtttcagtaaaaaacactccaaagaaaagcacacagatgaaggtacaagctcaaatttctttgacacaagtgtgaaaacaatacatgacgacaaaccatcaatcaataaaggtaaacaagtcagcagtgtaacttttttagcacccagatataatgatgctgaccccccaaaatacttcaaagctgttgatgggaggcctgccactgccagttataaccactttgtttaccaaggtcagaatagttcagttggatggattgcacaaagtcctctggaaccttctgttatcaataattttgctagagttgaccgtccacatcatttgaatatgggtacatttactgcccccgtctctattcctcaaatagacaatccttcaattgtctccccgatgggttcttgcacagcagacccaaggagcagcgttatcaataatcctgctttaattccaagattcaatgggttctcaactgtgaattcgtacaccagtcttagtgctgtgacgcagagcattggaacttcaatcccaaagctgataaatgtggataatgtagataaacgctatcgtggttttccacttgattcgttttccgtgtctcactcacgacatcaggtagcagtttcaagtaacctggagcaaaagaattcccagaagttggaagattcagatcaacagtcccatggcaagggtatgaagaacttcaatttgaatgagacactgtcagattgtcaggaagatggtcttgtagaacaagatgggagatgtgcttccagttttcagcatgataaagatggggggtcagtacttgggatctcttggctcaaaaaaaaacttatgtctgctgacccaacagctgtggagaagccagggaagatttttggacattcattgggaactgcaatagagctgaaaaatactaaagaccagaatgaaccagctgtgactattcggaatttgtcagattctgcttctacatctgttggctgtgcaattaagaaggataggccttcggataacattgttaccggaactctgcctgtctgtaataaagcccaagagggtgctacatgtttacctctttcgtgccagaagcatgtgcctaaagatggacaagccgctgaaggagccaccaagaaaagtggcgcccccatcaggaacttcatcgatctcaatgatgatgtaccaaatgatgacaattctgaggaatcagtagtgtcacacgaatgccacgtggaaccttcacggaacaaccatcctaaacgagcatttgtgattgatttagaggtgccggcctgtgaagaggacgcttcgtgggatattgatcaagaatgcgcgcagccgaaacctgatgcgtaccaggaagttgacgacggatctgatacatccgctctagctgcagccgagaacatcgtagcgttgtcaaggaatacgccaacagccgcagaggcatcggacgatacgttgcagtggtttgcagatctcgctgtattaaacatcaacgaccttgctgagcaagctgaactccaagcttgtacgaatgattccagtaactacgagtcggattcattcgagtccttgacactgaagctggaagagaccaagatcgacgatctctggagcaggccactggaacctgaaaccgcaaccgatgaacagacagtttcagctgctcaccttctcaccaagcccagaaggggccagcaaaggagacggcggcagaagcgagatttccagagagatgtcttgcctggcctttcgtcgctttcccggcctgagatcacagaggacgtccagttgctcgaggggttagtccaggcttccgggggatcctgggagtcgagcttgactaggcgaggacgttgtggtgggcgtgctagaggcaggaaacctcggaaaactgtagtaaccgtaattgtagaggaggaggaagaggaggaggtagaggttagcccaccgccaaaacctgctggcactggggaattggaagccgatggcaggggtatgatcgggtggggcagaacaacaaggcggtgtcgcagagcgagatgtccgtcaggtaacagcatggctactgcgtcttgagtgggagggtatttcttggcagcaagcattggacctgattaggtactgggtggttcacaattgttgtattgactccgatggatgggctggtggtataaggtgatcacactcatatgagtgtcggcctactggtctcagcacaactttcgtgcttttgggtcgaaacatggtttacgttcttataataagttcggtaaattagctggcgagacatttctgcgacagcattgtactaagctgttccaggttatgaggcccggtgccccggtatatattcattgtgagaaaaactgcaatgcatgtaaaccaccttgatctctgaagaatagctcatcacatgtgtaacaaaagggtgtgaatgaggctctgagcctgtattctttttgtagctgtatgccctgcctaattggcgctagtatccagcatgcgaattgctaatttagttttataccgtggatattgctcatatcgtgtcccaacgcttttcttccctatgggaatgcatatgccactgctatgtataaggcaaatactgtaattatttgttcaaatatttgccaaactctatctccaa

SEQ ID NO: 47670 - DNA, 4132 bp, Zea Mays
ggtcgttccattcccttcctcagaggagagagaaagagagcgagcaagtctgggagggggaggcacagcagtcaggcaggcaggcaacgcccaccccccacagaggagagagagagagaaagaggcagcagagcacataaccaaacgacacccatccgaaaaccccgaaaggaggagggaaaagggtgagagaaaaccacgcagtcgcttgtccagacaaaacaagaacaagaacccaccagtacgcacttcctcctcctcctcctcctctctgcctctctctcctccctccctccgccagtccgctcccccctggcccatcagatccaattccttcccccgacccccgtcccggatccgccgcaattccttcctgcgtcgagctcgactgctccctctccctgcccgcaagaatcccgccgtggccggcggcttagtgggactcccaagtcgaagccaaggctggtggggggcgcgctcctgccgggcgtagcgggccatgggcgcgctgttgccgttcgtgcgtcgggtaaccagggccgtcaggctcagtccgctgcagcgcagcgccgaggatcggtgagttttgcaacaagaatgggggcaaaagtagaacgggaaagttatatgcctggatattatgccacgggggatctcaatttggaaccaaatggtagatggtctccatactatgaggagatgacatcaaatgatcagttatgcaatggcttcacaacaaaaccaacaaatgactattcagaatttgacaaagaaatactcaagcatcaaatacttgaacatgaagctgtgtttagacaacaggtgtatgaactgcaccgagtttacaaaatacagaaggatatgatgaaacaacatcaaagcaaagaggtatattcatacccaactttggcagttgcatcacatacaaattcaccatcacaagtgccacaaaacggtgcaaagatgatgtggcagatgccagttcctccaatgtccacaacatacaggaaagctattggagagcataatgatacaaaccagtcctccatgaagttccttagagaaggcagtgtgcagtcctcaccaaatggatttatatcaagtgatgttggtccaagaagcagacaaggcacttttgaccttcaacttccagctgatcattatatagatgacgatggcacatcagataacaagcccatagatttccttggtttggcatcagatacaaaaccccggaatgatgctgagcttacattagttagtgcagaaggcttgggcaagttcagtgataatagttcatcctcgggtttgcagactacaaataatcttggaccccggcaggttaccgacctgaatgaatcaaatactggcttccatatgggtagagcaaatggatcagtttccagaggccttccgcgtacccttgagaactcatggaaccaaccaatattgagagcaaacacaactaatttcagtttcagtaaaaaacactccaaagaaaagcacacagatgaaggtacaagctcaaatttctttgacacaagtgtgaaaacaatacatgacgacaaaccatcaatcaataaaggtaaacaagtcagcagtgtaacttttttagcacccagatataatgatgctgaccccccaaaatacttcaaagctgttgatgggaggcctgccactgccagttataaccactttgtttaccaaggtcagaatagttcagttggatggattgcacaaagtcctctggaaccttctgttatcaataattttgctagagttgaccgtccacatcatttgaatatgggtacatttactgcccccgtctctattcctcaaatagacaatccttcaattgtctccccgatgggttcttgcacagcagacccaaggagcagcgttatcaataatcctgctttaattccaagattcaatgggttctcaactgtgaattcgtacaccagtcttagtgctgtgacgcagagcattggaacttcaatcccaaagctgataaatgtggataatgtagataaacgctatcgtggttttccacttgattcgttttccgtgtctcactcacgacatcaggtagcagtttcaagtaacctggagcaaaagaattcccagaagttggaagattcagatcaacagtcccatggcaagggtatgaagaacttcaatttgaatgagacactgtcagattgtcaggaagatggtcttgtagaacaagatgggagatgtgcttccagttttcagcatgataaagatggggggtcagtacttgggatctcttggctcaaaaaaaaacttatgtctgctgacccaacagctgtggagaagccagggaagatttttggacattcattgggaactgcaatagagctgaaaaatactaaagaccagaatgaaccagctgtgactattcggaatttgtcagattctgcttctacatctgttggctgtgcaattaagaaggataggccttcggataacattgttaccggaactctgcctgtctgtaataaagcccaagagggtgctacatgtttacctctttcgtgccagaagcatgtgcctaaagatggacaagccgctgaaggagccaccaagaaaagtggcgcccccatcaggaacttcatcgatctcaatgatgatgtaccaaatgatgacaattctgaggaatcagtagtgtcacacgaatgccacgtggaaccttcacggaacaaccatcctaaacgagcatttgtgattgatttagaggtgccggcctgtgaagaggacgcttcgtgggatattgatcaagaatgcgcgcagccgaaacctgatgcgtaccaggaagttgacgacggatctgatacatccgctctagctgcagccgagaacatcgtagcgttgtcaaggaatacgccaacagccgcagaggcatcggacgatacgttgcagtggtttgcagatctcgctgtattaaacatcaacgaccttgctgagcaagctgaactccaagcttgtacgaatgattccagtaactacgagtcggattcattcgagtccttgacactgaagctggaagagaccaagatcgacgatctctggagcaggccactggaacctgaaaccgcaaccgatgaacagacagtttcagctgctcaccttctcaccaagcccagaaggggccagcaaaggagacggcggcagaagcgagatttccagagagatgtcttgcctggcctttcgtcgctttcccggcctgagatcacagaggacgtccagttgctcgaggggttagtccaggcttccgggggatcctgggagtcgagcttgactaggcgaggacgttgtggtgggcgtgctagaggcaggaaacctcggaaaactgtagtaaccgtaattgtagaggaggaggaagaggaggaggtagaggttagcccaccgccaaaacctgctggcactggggaattggaagccgatggcaggggtatgatcgggtggggcagaacaacaaggcggtgtcgcagagcgagatgtccgtcaggtaacagcatggctactgcgtcttgagtgggagggtatttcttggcagcaagcattggacctgattaggtactgggtggttcacaattgttgtattgactccgatggatgggctggtggtataaggtgatcacactcatatgagtgtcggcctactggtctcagcacaactttcgtgcttttgggtcgaaacatggtttacgttcttataataagttcggtaaattagctggcgagacatttctgcgacagcattgtactaagctgttccaggttatgaggcccggtgccccggtatatattcattgtgagaaaaactgcaatgcatgtaaaccaccttgatctctgaagaatagctcatcacatgtgtaacaaaagggtgtgaatgaggctctgagcctgtattctttttgtagctgtatgccctgcctaattggcgctagtatccagcatgcgaattgctaatttagttttataccgtggatattgctcatatcgtgtcccaacgcttttcttccctatgggaatgcatatgccactgctatgtataaggcaaatactgtaattatttgttcaaatatttgccaaactctatctccaa

SEQ ID NO: 47671 - DNA, 4155 bp, Zea Mays
gtcgttccattcccttcctcagaggagagagaaagagagcgagcaagtctgggagggggaggcacagcagtcaggcaggcaggcaacgcccaccccccacagaggagagagagagagaaagaggcagcagagcacataaccaaacgacacccatccgaaaaccccgaaaggaggagggaaaagggtgagagaaaaccacgcagtcgcttgtccagacaaaacaagaacaagaacccaccagtacgcacttcctcctcctcctcctcctctctgcctctctctcctccctccctccgccagtccgctcccccctggcccatcagatccaattccttcccccgacccccgtcccggatccgccgcaattccttcctgcgtcgagctcgactgctccctctccctgcccgcaagaatcccgccgtggccggcggcttagtgggactcccaagtcgaagccaaggctggtggggggcgcgctcctgccgggcgtagcgggccatgggcgcgctgttgccgttcgtgcgtcgggtaaccagggccgtcaggctcagtccgctgcagcgcagcgccgaggatcggtgagttttgcaacaagaatgggggcaaaagtagaacgggaaagttatatgcctggatattatgccacgggggatctcaatttggaaccaaatggtagatggtctccatactatgaggagatgacatcaaatgatcagttatgcaatggcttcacaacaaaaccaacaaatgactattcagaatttgacaaagaaatactcaagcatcaaatacttgaacatgaagctgtgtttagacaacagcctcacaacccactcgctatccaggtgtatgaactgcaccgagtttacaaaatacagaaggatatgatgaaacaacatcaaagcaaagaggtatattcatacccaactttggcagttgcatcacatacaaattcaccatcacaagtgccacaaaacggtgcaaagatgatgtggcagatgccagttcctccaatgtccacaacatacaggaaagctattggagagcataatgatacaaaccagtcctccatgaagttccttagagaaggcagtgtgcagtcctcaccaaatggatttatatcaagtgatgttggtccaagaagcagacaaggcacttttgaccttcaacttccagctgatcattatatagatgacgatggcacatcagataacaagcccatagatttccttggtttggcatcagatacaaaaccccggaatgatgctgagcttacattagttagtgcagaaggcttgggcaagttcagtgataatagttcatcctcgggtttgcagactacaaataatcttggaccccggcaggttaccgacctgaatgaatcaaatactggcttccatatgggtagagcaaatggatcagtttccagaggccttccgcgtacccttgagaactcatggaaccaaccaatattgagagcaaacacaactaatttcagtttcagtaaaaaacactccaaagaaaagcacacagatgaaggtacaagctcaaatttctttgacacaagtgtgaaaacaatacatgacgacaaaccatcaatcaataaaggtaaacaagtcagcagtgtaacttttttagcacccagatataatgatgctgaccccccaaaatacttcaaagctgttgatgggaggcctgccactgccagttataaccactttgtttaccaaggtcagaatagttcagttggatggattgcacaaagtcctctggaaccttctgttatcaataattttgctagagttgaccgtccacatcatttgaatatgggtacatttactgcccccgtctctattcctcaaatagacaatccttcaattgtctccccgatgggttcttgcacagcagacccaaggagcagcgttatcaataatcctgctttaattccaagattcaatgggttctcaactgtgaattcgtacaccagtcttagtgctgtgacgcagagcattggaacttcaatcccaaagctgataaatgtggataatgtagataaacgctatcgtggttttccacttgattcgttttccgtgtctcactcacgacatcaggtagcagtttcaagtaacctggagcaaaagaattcccagaagttggaagattcagatcaacagtcccatggcaagggtatgaagaacttcaatttgaatgagacactgtcagattgtcaggaagatggtcttgtagaacaagatgggagatgtgcttccagttttcagcatgataaagatggggggtcagtacttgggatctcttggctcaaaaaaaaacttatgtctgctgacccaacagctgtggagaagccagggaagatttttggacattcattgggaactgcaatagagctgaaaaatactaaagaccagaatgaaccagctgtgactattcggaatttgtcagattctgcttctacatctgttggctgtgcaattaagaaggataggccttcggataacattgttaccggaactctgcctgtctgtaataaagcccaagagggtgctacatgtttacctctttcgtgccagaagcatgtgcctaaagatggacaagccgctgaaggagccaccaagaaaagtggcgcccccatcaggaacttcatcgatctcaatgatgatgtaccaaatgatgacaattctgaggaatcagtagtgtcacacgaatgccacgtggaaccttcacggaacaaccatcctaaacgagcatttgtgattgatttagaggtgccggcctgtgaagaggacgcttcgtgggatattgatcaagaatgcgcgcagccgaaacctgatgcgtaccaggaagttgacgacggatctgatacatccgctctagctgcagccgagaacatcgtagcgttgtcaaggaatacgccaacagccgcagaggcatcggacgatacgttgcagtggtttgcagatctcgctgtattaaacatcaacgaccttgctgagcaagctgaactccaagcttgtacgaatgattccagtaactacgagtcggattcattcgagtccttgacactgaagctggaagagaccaagatcgacgatctctggagcaggccactggaacctgaaaccgcaaccgatgaacagacagtttcagctgctcaccttctcaccaagcccagaaggggccagcaaaggagacggcggcagaagcgagatttccagagagatgtcttgcctggcctttcgtcgctttcccggcctgagatcacagaggacgtccagttgctcgaggggttagtccaggcttccgggggatcctgggagtcgagcttgactaggcgaggacgttgtggtgggcgtgctagaggcaggaaacctcggaaaactgtagtaaccgtaattgtagaggaggaggaagaggaggaggtagaggttagcccaccgccaaaacctgctggcactggggaattggaagccgatggcaggggtatgatcgggtggggcagaacaacaaggcggtgtcgcagagcgagatgtccgtcaggtaacagcatggctactgcgtcttgagtgggagggtatttcttggcagcaagcattggacctgattaggtactgggtggttcacaattgttgtattgactccgatggatgggctggtggtataaggtgatcacactcatatgagtgtcggcctactggtctcagcacaactttcgtgcttttgggtcgaaacatggtttacgttcttataataagttcggtaaattagctggcgagacatttctgcgacagcattgtactaagctgttccaggttatgaggcccggtgccccggtatatattcattgtgagaaaaactgcaatgcatgtaaaccaccttgatctctgaagaatagctcatcacatgtgtaacaaaagggtgtgaatgaggctctgagcctgtattctttttgtagctgtatgccctgcctaattggcgctagtatccagcatgcgaattgctaatttagttttataccgtggatattgctcatatcgtgtcccaacgcttttcttccctatgggaatgcatatgccactgctatgtataaggcaaatactgtaattatttgttcaaatatttgccaaactctatctccaa

SEQ ID NO: 47672 - DNA, 4081 bp, Zea Mays
gtcgttccattcccttcctcagaggagagagaaagagagcgagcaagtctgggagggggaggcacagcagtcaggcaggcaggcaacgcccaccccccacagaggagagagagagagaaagaggcagcagagcacataaccaaacgacacccatccgaaaaccccgaaaggaggagggaaaagggtgagagaaaaccacgcagtcgcttgtccagacaaaacaagaacaagaacccaccagtacgcacttcctcctcctcctcctcctctctgcctctctctcctccctccctccgccagtccgctcccccctggcccatcagatccaattccttcccccgacccccgtcccggatccgccgcaattccttcctgcgtcgagctcgactgctccctctccctgcccgcaagaatcccgccgtggccggcggcttagtgggactcccaagtcgaagccaaggctggtggggggcgcgctcctgccgggcgtagcgggccatgggcgcgctgttgccgttcgtgcgtcgggtaaccagggccgtcaggctcagtccgctgcagcgcagcgccgaggatcgttttgcaacaagaatgggggcaaaagtagaacgggaaagttatatgcctggatattatgccacgggggatctcaatttggaaccaaatggtagatggtctccatactatgaggagatgacatcaaatgatcagttatgcaatggcttcacaacaaaaccaacaaatgactattcagaatttgacaaagaaatactcaagcatcaaatacttgaacatgaagctgtgtttagacaacagcctcacaacccactcgctatccaggtgtatgaactgcaccgagtttacaaaatacagaaggatatgatgaaacaacatcaaagcaaagaggtatattcatacccaactttggcagttgcatcacatacaaattcaccatcacaagtgccacaaaacggtgcaaagatgatgtggcagatgccagttcctccaatgtccacaacatacaggaaagctattggagagcataatgatacaaaccagtcctccatgaagttccttagagaaggcagtgtgcagtcctcaccaaatggatttatatcaagtgatgttggtccaagaagcagacaaggcacttttgaccttcaacttccagctgatcattatatagatgacgatggcacatcagataacaagcccatagatttccttggtttggcatcagatacaaaaccccggaatgatgctgagcttacattagttagtgcagaaggcttgggcaagttcagtgataatagttcatcctcgggtttgcagactacaaataatcttggaccccggcaggttaccgacctgaatgaatcaaatactggcttccatatgggtagagcaaatggatcagtttccagaggccttccgcgtacccttgagaactcatggaaccaaccaatattgagagcaaacacaactaatttcagtttcagtaaaaaacactccaaagaaaagcacacagatgaaggtaaacaagtcagcagtgtaacttttttagcacccagatataatgatgctgaccccccaaaatacttcaaagctgttgatgggaggcctgccactgccagttataaccactttgtttaccaaggtcagaatagttcagttggatggattgcacaaagtcctctggaaccttctgttatcaataattttgctagagttgaccgtccacatcatttgaatatgggtacatttactgcccccgtctctattcctcaaatagacaatccttcaattgtctccccgatgggttcttgcacagcagacccaaggagcagcgttatcaataatcctgctttaattccaagattcaatgggttctcaactgtgaattcgtacaccagtcttagtgctgtgacgcagagcattggaacttcaatcccaaagctgataaatgtggataatgtagataaacgctatcgtggttttccacttgattcgttttccgtgtctcactcacgacatcaggtagcagtttcaagtaacctggagcaaaagaattcccagaagttggaagattcagatcaacagtcccatggcaagggtatgaagaacttcaatttgaatgagacactgtcagattgtcaggaagatggtcttgtagaacaagatgggagatgtgcttccagttttcagcatgataaagatggggggtcagtacttgggatctcttggctcaaaaaaaaacttatgtctgctgacccaacagctgtggagaagccagggaagatttttggacattcattgggaactgcaatagagctgaaaaatactaaagaccagaatgaaccagctgtgactattcggaatttgtcagattctgcttctacatctgttggctgtgcaattaagaaggataggccttcggataacattgttaccggaactctgcctgtctgtaataaagcccaagagggtgctacatgtttacctctttcgtgccagaagcatgtgcctaaagatggacaagccgctgaaggagccaccaagaaaagtggcgcccccatcaggaacttcatcgatctcaatgatgatgtaccaaatgatgacaattctgaggaatcagtagtgtcacacgaatgccacgtggaaccttcacggaacaaccatcctaaacgagcatttgtgattgatttagaggtgccggcctgtgaagaggacgcttcgtgggatattgatcaagaatgcgcgcagccgaaacctgatgcgtaccaggaagttgacgacggatctgatacatccgctctagctgcagccgagaacatcgtagcgttgtcaaggaatacgccaacagccgcagaggcatcggacgatacgttgcagtggtttgcagatctcgctgtattaaacatcaacgaccttgctgagcaagctgaactccaagcttgtacgaatgattccagtaactacgagtcggattcattcgagtccttgacactgaagctggaagagaccaagatcgacgatctctggagcaggccactggaacctgaaaccgcaaccgatgaacagacagtttcagctgctcaccttctcaccaagcccagaaggggccagcaaaggagacggcggcagaagcgagatttccagagagatgtcttgcctggcctttcgtcgctttcccggcctgagatcacagaggacgtccagttgctcgaggggttagtccaggcttccgggggatcctgggagtcgagcttgactaggcgaggacgttgtggtgggcgtgctagaggcaggaaacctcggaaaactgtagtaaccgtaattgtagaggaggaggaagaggaggaggtagaggttagcccaccgccaaaacctgctggcactggggaattggaagccgatggcaggggtatgatcgggtggggcagaacaacaaggcggtgtcgcagagcgagatgtccgtcaggtaacagcatggctactgcgtcttgagtgggagggtatttcttggcagcaagcattggacctgattaggtactgggtggttcacaattgttgtattgactccgatggatgggctggtggtataaggtgatcacactcatatgagtgtcggcctactggtctcagcacaactttcgtgcttttgggtcgaaacatggtttacgttcttataataagttcggtaaattagctggcgagacatttctgcgacagcattgtactaagctgttccaggttatgaggcccggtgccccggtatatattcattgtgagaaaaactgcaatgcatgtaaaccaccttgatctctgaagaatagctcatcacatgtgtaacaaaagggtgtgaatgaggctctgagcctgtattctttttgtagctgtatgccctgcctaattggcgctagtatccagcatgcgaattgctaatttagttttataccgtggatattgctcatatcgtgtcccaacgcttttcttccctatgggaatgcatatgccactgctatgtataaggcaaatactgtaattatttgttcaaatatttgccaaactctatctccaa

SEQ ID NO: 47673 - DNA, 4126 bp, Zea Mays
gtcgttccattcccttcctcagaggagagagaaagagagcgagcaagtctgggagggggaggcacagcagtcaggcaggcaggcaacgcccaccccccacagaggagagagagagagaaagaggcagcagagcacataaccaaacgacacccatccgaaaaccccgaaaggaggagggaaaagggtgagagaaaaccacgcagtcgcttgtccagacaaaacaagaacaagaacccaccagtacgcacttcctcctcctcctcctcctctctgcctctctctcctccctccctccgccagtccgctcccccctggcccatcagatccaattccttcccccgacccccgtcccggatccgccgcaattccttcctgcgtcgagctcgactgctccctctccctgcccgcaagaatcccgccgtggccggcggcttagtgggactcccaagtcgaagccaaggctggtggggggcgcgctcctgccgggcgtagcgggccatgggcgcgctgttgccgttcgtgcgtcgggtaaccagggccgtcaggctcagtccgctgcagcgcagcgccgaggatcgttttgcaacaagaatgggggcaaaagtagaacgggaaagttatatgcctggatattatgccacgggggatctcaatttggaaccaaatggtagatggtctccatactatgaggagatgacatcaaatgatcagttatgcaatggcttcacaacaaaaccaacaaatgactattcagaatttgacaaagaaatactcaagcatcaaatacttgaacatgaagctgtgtttagacaacaggtgtatgaactgcaccgagtttacaaaatacagaaggatatgatgaaacaacatcaaagcaaagaggtatattcatacccaactttggcagttgcatcacatacaaattcaccatcacaagtgccacaaaacggtgcaaagatgatgtggcagatgccagttcctccaatgtccacaacatacaggaaagctattggagagcataatgatacaaaccagtcctccatgaagttccttagagaaggcagtgtgcagtcctcaccaaatggatttatatcaagtgatgttggtccaagaagcagacaaggcacttttgaccttcaacttccagctgatcattatatagatgacgatggcacatcagataacaagcccatagatttccttggtttggcatcagatacaaaaccccggaatgatgctgagcttacattagttagtgcagaaggcttgggcaagttcagtgataatagttcatcctcgggtttgcagactacaaataatcttggaccccggcaggttaccgacctgaatgaatcaaatactggcttccatatgggtagagcaaatggatcagtttccagaggccttccgcgtacccttgagaactcatggaaccaaccaatattgagagcaaacacaactaatttcagtttcagtaaaaaacactccaaagaaaagcacacagatgaaggtacaagctcaaatttctttgacacaagtgtgaaaacaatacatgacgacaaaccatcaatcaataaaggtaaacaagtcagcagtgtaacttttttagcacccagatataatgatgctgaccccccaaaatacttcaaagctgttgatgggaggcctgccactgccagttataaccactttgtttaccaaggtcagaatagttcagttggatggattgcacaaagtcctctggaaccttctgttatcaataattttgctagagttgaccgtccacatcatttgaatatgggtacatttactgcccccgtctctattcctcaaatagacaatccttcaattgtctccccgatgggttcttgcacagcagacccaaggagcagcgttatcaataatcctgctttaattccaagattcaatgggttctcaactgtgaattcgtacaccagtcttagtgctgtgacgcagagcattggaacttcaatcccaaagctgataaatgtggataatgtagataaacgctatcgtggttttccacttgattcgttttccgtgtctcactcacgacatcaggtagcagtttcaagtaacctggagcaaaagaattcccagaagttggaagattcagatcaacagtcccatggcaagggtatgaagaacttcaatttgaatgagacactgtcagattgtcaggaagatggtcttgtagaacaagatgggagatgtgcttccagttttcagcatgataaagatggggggtcagtacttgggatctcttggctcaaaaaaaaacttatgtctgctgacccaacagctgtggagaagccagggaagatttttggacattcattgggaactgcaatagagctgaaaaatactaaagaccagaatgaaccagctgtgactattcggaatttgtcagattctgcttctacatctgttggctgtgcaattaagaaggataggccttcggataacattgttaccggaactctgcctgtctgtaataaagcccaagagggtgctacatgtttacctctttcgtgccagaagcatgtgcctaaagatggacaagccgctgaaggagccaccaagaaaagtggcgcccccatcaggaacttcatcgatctcaatgatgatgtaccaaatgatgacaattctgaggaatcagtagtgtcacacgaatgccacgtggaaccttcacggaacaaccatcctaaacgagcatttgtgattgatttagaggtgccggcctgtgaagaggacgcttcgtgggatattgatcaagaatgcgcgcagccgaaacctgatgcgtaccaggaagttgacgacggatctgatacatccgctctagctgcagccgagaacatcgtagcgttgtcaaggaatacgccaacagccgcagaggcatcggacgatacgttgcagtggtttgcagatctcgctgtattaaacatcaacgaccttgctgagcaagctgaactccaagcttgtacgaatgattccagtaactacgagtcggattcattcgagtccttgacactgaagctggaagagaccaagatcgacgatctctggagcaggccactggaacctgaaaccgcaaccgatgaacagacagtttcagctgctcaccttctcaccaagcccagaaggggccagcaaaggagacggcggcagaagcgagatttccagagagatgtcttgcctggcctttcgtcgctttcccggcctgagatcacagaggacgtccagttgctcgaggggttagtccaggcttccgggggatcctgggagtcgagcttgactaggcgaggacgttgtggtgggcgtgctagaggcaggaaacctcggaaaactgtagtaaccgtaattgtagaggaggaggaagaggaggaggtagaggttagcccaccgccaaaacctgctggcactggggaattggaagccgatggcaggggtatgatcgggtggggcagaacaacaaggcggtgtcgcagagcgagatgtccgtcaggtaacagcatggctactgcgtcttgagtgggagggtatttcttggcagcaagcattggacctgattaggtactgggtggttcacaattgttgtattgactccgatggatgggctggtggtataaggtgatcacactcatatgagtgtcggcctactggtctcagcacaactttcgtgcttttgggtcgaaacatggtttacgttcttataataagttcggtaaattagctggcgagacatttctgcgacagcattgtactaagctgttccaggttatgaggcccggtgccccggtatatattcattgtgagaaaaactgcaatgcatgtaaaccaccttgatctctgaagaatagctcatcacatgtgtaacaaaagggtgtgaatgaggctctgagcctgtattctttttgtagctgtatgccctgcctaattggcgctagtatccagcatgcgaattgctaatttagttttataccgtggatattgctcatatcgtgtcccaacgcttttcttccctatgggaatgcatatgccactgctatgtataaggcaaatactgtaattatttgttcaaatatttgccaaactctatctccaa

SEQ ID NO: 47674 - DNA, 3671 bp, Zea Mays
aaagaggcagcagagcacataaccaaacgacacccatccgaaaaccccgaaaggaggagggaaaagggtgagagaaaaccacgcagtcgcttgtccagacaaaacaagaacaagaacccaccattttgcaacaagaatgggggcaaaagtagaacgggaaagttatatgcctggatattatgccacgggggatctcaatttggaaccaaatggtagatggtctccatactatgaggagatgacatcaaatgatcagttatgcaatggcttcacaacaaaaccaacaaatgactattcagaatttgacaaagaaatactcaagcatcaaatacttgaacatgaagctgtgtttagacaacaggtgtatgaactgcaccgagtttacaaaatacagaaggatatgatgaaacaacatcaaagcaaagaggtatattcatacccaactttggcagttgcatcacatacaaattcaccatcacaagtgccacaaaacggtgcaaagatgatgtggcagatgccagttcctccaatgtccacaacatacaggaaagctattggagagcataatgatacaaaccagtcctccatgaagttccttagagaaggcagtgtgcagtcctcaccaaatggatttatatcaagtgatgttggtccaagaagcagacaaggcacttttgaccttcaacttccagctgatcattatatagatgacgatggcacatcagataacaagcccatagatttccttggtttggcatcagatacaaaaccccggaatgatgctgagcttacattagttagtgcagaaggcttgggcaagttcagtgataatagttcatcctcgggtttgcagactacaaataatcttggaccccggcaggttaccgacctgaatgaatcaaatactggcttccatatgggtagagcaaatggatcagtttccagaggccttccgcgtacccttgagaactcatggaaccaaccaatattgagagcaaacacaactaatttcagtttcagtaaaaaacactccaaagaaaagcacacagatgaaggtacaagctcaaatttctttgacacaagtgtgaaaacaatacatgacgacaaaccatcaatcaataaaggtaaacaagtcagcagtgtaacttttttagcacccagatataatgatgctgaccccccaaaatacttcaaagctgttgatgggaggcctgccactgccagttataaccactttgtttaccaaggtcagaatagttcagttggatggattgcacaaagtcctctggaaccttctgttatcaataattttgctagagttgaccgtccacatcatttgaatatgggtacatttactgcccccgtctctattcctcaaatagacaatccttcaattgtctccccgatgggttcttgcacagcagacccaaggagcagcgttatcaataatcctgctttaattccaagattcaatgggttctcaactgtgaattcgtacaccagtcttagtgctgtgacgcagagcattggaacttcaatcccaaagctgataaatgtggataatgtagataaacgctatcgtggttttccacttgattcgttttccgtgtctcactcacgacatcaggtagcagtttcaagtaacctggagcaaaagaattcccagaagttggaagattcagatcaacagtcccatggcaagggtatgaagaacttcaatttgaatgagacactgtcagattgtcaggaagatggtcttgtagaacaagatgggagatgtgcttccagttttcagcatgataaagatggggggtcagtacttgggatctcttggctcaaaaaaaaacttatgtctgctgacccaacagctgtggagaagccagggaagatttttggacattcattgggaactgcaatagagctgaaaaatactaaagaccagaatgaaccagctgtgactattcggaatttgtcagattctgcttctacatctgttggctgtgcaattaagaaggataggccttcggataacattgttaccggaactctgcctgtctgtaataaagcccaagagggtgctacatgtttacctctttcgtgccagaagcatgtgcctaaagatggacaagccgctgaaggagccaccaagaaaagtggcgcccccatcaggaacttcatcgatctcaatgatgatgtaccaaatgatgacaattctgaggaatcagtagtgtcacacgaatgccacgtggaaccttcacggaacaaccatcctaaacgagcatttgtgattgatttagaggtgccggcctgtgaagaggacgcttcgtgggatattgatcaagaatgcgcgcagccgaaacctgatgcgtaccaggaagttgacgacggatctgatacatccgctctagctgcagccgagaacatcgtagcgttgtcaaggaatacgccaacagccgcagaggcatcggacgatacgttgcagtggtttgcagatctcgctgtattaaacatcaacgaccttgctgagcaagctgaactccaagcttgtacgaatgattccagtaactacgagtcggattcattcgagtccttgacactgaagctggaagagaccaagatcgacgatctctggagcaggccactggaacctgaaaccgcaaccgatgaacagacagtttcagctgctcaccttctcaccaagcccagaaggggccagcaaaggagacggcggcagaagcgagatttccagagagatgtcttgcctggcctttcgtcgctttcccggcctgagatcacagaggacgtccagttgctcgaggggttagtccaggcttccgggggatcctgggagtcgagcttgactaggcgaggacgttgtggtgggcgtgctagaggcaggaaacctcggaaaactgtagtaaccgtaattgtagaggaggaggaagaggaggaggtagaggttagcccaccgccaaaacctgctggcactggggaattggaagccgatggcaggggtatgatcgggtggggcagaacaacaaggcggtgtcgcagagcgagatgtccgtcaggtaacagcatggctactgcgtcttgagtgggagggtatttcttggcagcaagcattggacctgattaggtactgggtggttcacaattgttgtattgactccgatggatgggctggtggtataaggtgatcacactcatatgagtgtcggcctactggtctcagcacaactttcgtgcttttgggtcgaaacatggtttacgttcttataataagttcggtaaattagctggcgagacatttctgcgacagcattgtactaagctgttccaggttatgaggcccggtgccccggtatatattcattgtgagaaaaactgcaatgcatgtaaaccaccttgatctctgaagaatagctcatcacatgtgtaacaaaagggtgtgaatgaggctctgagcctgtattctttttgtagctgtatgccctgcctaattggcgctagtatccagcatgcgaattgctaatttagttttataccgtggatattgctcatatcgtgtcccaacgcttttcttccctatgggaatgcatatgccactgctatgtataaggcaaatactgtaattatttgttcaaatatttgccaaactctatctccaa

SEQ ID NO: 47675 - DNA, 3842 bp, Zea Mays
tttctgcctttttcctcctcctcctcctcttcttctttgagccgtccaaggtaatttctcgtgaacgcattccgctattgactgctcgccctgtcgagcagattgagctatccaatatccatttagctcgacacagtgaagaactgaagatacacattgggcttgcttgtgttccgtctctctcaaacatcctgttggtgtgctgtgaaggtctgaaggtcacataatccacttggctatatgccggggtgggtaatgtgagtcgggcttgataaatgcagacttgttaacttgttttgcaacaagaatgggggcaaaagtagaacgggaaagttatatgcctggatattatgccacgggggatctcaatttggaaccaaatggtagatggtctccatactatgaggagatgacatcaaatgatcagttatgcaatggcttcacaacaaaaccaacaaatgactattcagaatttgacaaagaaatactcaagcatcaaatacttgaacatgaagctgtgtttagacaacaggtgtatgaactgcaccgagtttacaaaatacagaaggatatgatgaaacaacatcaaagcaaagaggtatattcatacccaactttggcagttgcatcacatacaaattcaccatcacaagtgccacaaaacggtgcaaagatgatgtggcagatgccagttcctccaatgtccacaacatacaggaaagctattggagagcataatgatacaaaccagtcctccatgaagttccttagagaaggcagtgtgcagtcctcaccaaatggatttatatcaagtgatgttggtccaagaagcagacaaggcacttttgaccttcaacttccagctgatcattatatagatgacgatggcacatcagataacaagcccatagatttccttggtttggcatcagatacaaaaccccggaatgatgctgagcttacattagttagtgcagaaggcttgggcaagttcagtgataatagttcatcctcgggtttgcagactacaaataatcttggaccccggcaggttaccgacctgaatgaatcaaatactggcttccatatgggtagagcaaatggatcagtttccagaggccttccgcgtacccttgagaactcatggaaccaaccaatattgagagcaaacacaactaatttcagtttcagtaaaaaacactccaaagaaaagcacacagatgaaggtacaagctcaaatttctttgacacaagtgtgaaaacaatacatgacgacaaaccatcaatcaataaaggtaaacaagtcagcagtgtaacttttttagcacccagatataatgatgctgaccccccaaaatacttcaaagctgttgatgggaggcctgccactgccagttataaccactttgtttaccaaggtcagaatagttcagttggatggattgcacaaagtcctctggaaccttctgttatcaataattttgctagagttgaccgtccacatcatttgaatatgggtacatttactgcccccgtctctattcctcaaatagacaatccttcaattgtctccccgatgggttcttgcacagcagacccaaggagcagcgttatcaataatcctgctttaattccaagattcaatgggttctcaactgtgaattcgtacaccagtcttagtgctgtgacgcagagcattggaacttcaatcccaaagctgataaatgtggataatgtagataaacgctatcgtggttttccacttgattcgttttccgtgtctcactcacgacatcaggtagcagtttcaagtaacctggagcaaaagaattcccagaagttggaagattcagatcaacagtcccatggcaagggtatgaagaacttcaatttgaatgagacactgtcagattgtcaggaagatggtcttgtagaacaagatgggagatgtgcttccagttttcagcatgataaagatggggggtcagtacttgggatctcttggctcaaaaaaaaacttatgtctgctgacccaacagctgtggagaagccagggaagatttttggacattcattgggaactgcaatagagctgaaaaatactaaagaccagaatgaaccagctgtgactattcggaatttgtcagattctgcttctacatctgttggctgtgcaattaagaaggataggccttcggataacattgttaccggaactctgcctgtctgtaataaagcccaagagggtgctacatgtttacctctttcgtgccagaagcatgtgcctaaagatggacaagccgctgaaggagccaccaagaaaagtggcgcccccatcaggaacttcatcgatctcaatgatgatgtaccaaatgatgacaattctgaggaatcagtagtgtcacacgaatgccacgtggaaccttcacggaacaaccatcctaaacgagcatttgtgattgatttagaggtgccggcctgtgaagaggacgcttcgtgggatattgatcaagaatgcgcgcagccgaaacctgatgcgtaccaggaagttgacgacggatctgatacatccgctctagctgcagccgagaacatcgtagcgttgtcaaggaatacgccaacagccgcagaggcatcggacgatacgttgcagtggtttgcagatctcgctgtattaaacatcaacgaccttgctgagcaagctgaactccaagcttgtacgaatgattccagtaactacgagtcggattcattcgagtccttgacactgaagctggaagagaccaagatcgacgatctctggagcaggccactggaacctgaaaccgcaaccgatgaacagacagtttcagctgctcaccttctcaccaagcccagaaggggccagcaaaggagacggcggcagaagcgagatttccagagagatgtcttgcctggcctttcgtcgctttcccggcctgagatcacagaggacgtccagttgctcgaggggttagtccaggcttccgggggatcctgggagtcgagcttgactaggcgaggacgttgtggtgggcgtgctagaggcaggaaacctcggaaaactgtagtaaccgtaattgtagaggaggaggaagaggaggaggtagaggttagcccaccgccaaaacctgctggcactggggaattggaagccgatggcaggggtatgatcgggtggggcagaacaacaaggcggtgtcgcagagcgagatgtccgtcaggtaacagcatggctactgcgtcttgagtgggagggtatttcttggcagcaagcattggacctgattaggtactgggtggttcacaattgttgtattgactccgatggatgggctggtggtataaggtgatcacactcatatgagtgtcggcctactggtctcagcacaactttcgtgcttttgggtcgaaacatggtttacgttcttataataagttcggtaaattagctggcgagacatttctgcgacagcattgtactaagctgttccaggttatgaggcccggtgccccggtatatattcattgtgagaaaaactgcaatgcatgtaaaccaccttgatctctgaagaatagctcatcacatgtgtaacaaaagggtgtgaatgaggctctgagcctgtattctttttgtagctgtatgccctgcctaattggcgctagtatccagcatgcgaattgctaatttagttttataccgtggatattgctcatatcgtgtcccaacgcttttcttccctatgggaatgcatatgccactgctatgtataaggcaaatactgtaattatttgttcaaatatttgccaaactctatctccaa

SEQ ID NO: 47676 - DNA, 4156 bp, Zea Mays
gttttttttcctttttcttttctgctgtaattacttcatgtgtcaaatttgggttcgattgacggcacgaagctgatgattgcatctagccttcgcagcctttcggtttccgcgtttggtcggcttcttgggatttattattattattattatcaagtgcgttgaaccgtcgggtgctgacttgtcttctcccctccagttccttcctgtctcgcgagttgacatccgaacggcttcacaggaatatatttgagccttctgtcctgtttcttttgatcttctgtatgtttgcttcattatggaaaggggtcgtgtgtttccatgttgcgttttgtgtgtggtaatttctcgtgaacgcattccgctattgactgctcgccctgtcgagcagattgagctatccaatatccatttagctcgacacagtgaagaactgaagatacacattgggcttgcttgtgttccgtctctctcaaacatcctgttggtgtgctgtgaaggtctgaaggtcacataatccacttggctatatgccggggtgggtaatgtgagtcgggcttgataaatgcagacttgttaacttgttttgcaacaagaatgggggcaaaagtagaacgggaaagttatatgcctggatattatgccacgggggatctcaatttggaaccaaatggtagatggtctccatactatgaggagatgacatcaaatgatcagttatgcaatggcttcacaacaaaaccaacaaatgactattcagaatttgacaaagaaatactcaagcatcaaatacttgaacatgaagctgtgtttagacaacagcctcacaacccactcgctatccaggtgtatgaactgcaccgagtttacaaaatacagaaggatatgatgaaacaacatcaaagcaaagaggtatattcatacccaactttggcagttgcatcacatacaaattcaccatcacaagtgccacaaaacggtgcaaagatgatgtggcagatgccagttcctccaatgtccacaacatacaggaaagctattggagagcataatgatacaaaccagtcctccatgaagttccttagagaaggcagtgtgcagtcctcaccaaatggatttatatcaagtgatgttggtccaagaagcagacaaggcacttttgaccttcaacttccagctgatcattatatagatgacgatggcacatcagataacaagcccatagatttccttggtttggcatcagatacaaaaccccggaatgatgctgagcttacattagttagtgcagaaggcttgggcaagttcagtgataatagttcatcctcgggtttgcagactacaaataatcttggaccccggcaggttaccgacctgaatgaatcaaatactggcttccatatgggtagagcaaatggatcagtttccagaggccttccgcgtacccttgagaactcatggaaccaaccaatattgagagcaaacacaactaatttcagtttcagtaaaaaacactccaaagaaaagcacacagatgaaggtacaagctcaaatttctttgacacaagtgtgaaaacaatacatgacgacaaaccatcaatcaataaaggtaaacaagtcagcagtgtaacttttttagcacccagatataatgatgctgaccccccaaaatacttcaaagctgttgatgggaggcctgccactgccagttataaccactttgtttaccaaggtcagaatagttcagttggatggattgcacaaagtcctctggaaccttctgttatcaataattttgctagagttgaccgtccacatcatttgaatatgggtacatttactgcccccgtctctattcctcaaatagacaatccttcaattgtctccccgatgggttcttgcacagcagacccaaggagcagcgttatcaataatcctgctttaattccaagattcaatgggttctcaactgtgaattcgtacaccagtcttagtgctgtgacgcagagcattggaacttcaatcccaaagctgataaatgtggataatgtagataaacgctatcgtggttttccacttgattcgttttccgtgtctcactcacgacatcaggtagcagtttcaagtaacctggagcaaaagaattcccagaagttggaagattcagatcaacagtcccatggcaagggtatgaagaacttcaatttgaatgagacactgtcagattgtcaggaagatggtcttgtagaacaagatgggagatgtgcttccagttttcagcatgataaagatggggggtcagtacttgggatctcttggctcaaaaaaaaacttatgtctgctgacccaacagctgtggagaagccagggaagatttttggacattcattgggaactgcaatagagctgaaaaatactaaagaccagaatgaaccagctgtgactattcggaatttgtcagattctgcttctacatctgttggctgtgcaattaagaaggataggccttcggataacattgttaccggaactctgcctgtctgtaataaagcccaagagggtgctacatgtttacctctttcgtgccagaagcatgtgcctaaagatggacaagccgctgaaggagccaccaagaaaagtggcgcccccatcaggaacttcatcgatctcaatgatgatgtaccaaatgatgacaattctgaggaatcagtagtgtcacacgaatgccacgtggaaccttcacggaacaaccatcctaaacgagcatttgtgattgatttagaggtgccggcctgtgaagaggacgcttcgtgggatattgatcaagaatgcgcgcagccgaaacctgatgcgtaccaggaagttgacgacggatctgatacatccgctctagctgcagccgagaacatcgtagcgttgtcaaggaatacgccaacagccgcagaggcatcggacgatacgttgcagtggtttgcagatctcgctgtattaaacatcaacgaccttgctgagcaagctgaactccaagcttgtacgaatgattccagtaactacgagtcggattcattcgagtccttgacactgaagctggaagagaccaagatcgacgatctctggagcaggccactggaacctgaaaccgcaaccgatgaacagacagtttcagctgctcaccttctcaccaagcccagaaggggccagcaaaggagacggcggcagaagcgagatttccagagagatgtcttgcctggcctttcgtcgctttcccggcctgagatcacagaggacgtccagttgctcgaggggttagtccaggcttccgggggatcctgggagtcgagcttgactaggcgaggacgttgtggtgggcgtgctagaggcaggaaacctcggaaaactgtagtaaccgtaattgtagaggaggaggaagaggaggaggtagaggttagcccaccgccaaaacctgctggcactggggaattggaagccgatggcaggggtatgatcgggtggggcagaacaacaaggcggtgtcgcagagcgagatgtccgtcaggtaacagcatggctactgcgtcttgagtgggagggtatttcttggcagcaagcattggacctgattaggtactgggtggttcacaattgttgtattgactccgatggatgggctggtggtataaggtgatcacactcatatgagtgtcggcctactggtctcagcacaactttcgtgcttttgggtcgaaacatggtttacgttcttataataagttcggtaaattagctggcgagacatttctgcgacagcattgtactaagctgttccaggttatgaggcccggtgccccggtatatattcattgtgagaaaaactgcaatgcatgtaaaccaccttgatctctgaagaatagctcatcacatgtgtaacaaaagggtgtgaatgaggctctgagcctgtattctttttgtagctgtatgccctgcctaattggcgctagtatccagcatgcgaattgctaatttagttttataccgtggatattgctcatatcgtgtcccaacgcttttcttccctatgggaatgcatatgccactgctatgtataaggcaaatactgtaattatttgttcaaatatttgccaaactctatctccaa

SEQ ID NO: 47677 - DNA, 4213 bp, Zea Mays
gttttttttcctttttcttttctgctgtaattacttcatgtgtcaaatttgggttcgattgacggcacgaagctgatgattgcatctagccttcgcagcctttcggtttccgcgtttggtcggcttcttgggatttattattattattattatcaagtgcgttgaaccgtcgggtgctgacttgtcttctcccctccagttccttcctgtctcgcgagttgacatccgaacggcttcacaggaatatatttgagccttctgtcctgtttcttttgatcttctgtatgtttgcttcattatggaaaggggtcgtgtgtttccatgttgcgttttgtgtgtggtacgtacaacgcattgggccgtcttggttcctagatcttttaccttactcacttcagtgtctcaatcatttaacgggcaggtaatttctcgtgaacgcattccgctattgactgctcgccctgtcgagcagattgagctatccaatatccatttagctcgacacagtgaagaactgaagatacacattgggcttgcttgtgttccgtctctctcaaacatcctgttggtgtgctgtgaaggtctgaaggtcacataatccacttggctatatgccggggtgggtaatgtgagtcgggcttgataaatgcagacttgttaacttgttttgcaacaagaatgggggcaaaagtagaacgggaaagttatatgcctggatattatgccacgggggatctcaatttggaaccaaatggtagatggtctccatactatgaggagatgacatcaaatgatcagttatgcaatggcttcacaacaaaaccaacaaatgactattcagaatttgacaaagaaatactcaagcatcaaatacttgaacatgaagctgtgtttagacaacaggtgtatgaactgcaccgagtttacaaaatacagaaggatatgatgaaacaacatcaaagcaaagaggtatattcatacccaactttggcagttgcatcacatacaaattcaccatcacaagtgccacaaaacggtgcaaagatgatgtggcagatgccagttcctccaatgtccacaacatacaggaaagctattggagagcataatgatacaaaccagtcctccatgaagttccttagagaaggcagtgtgcagtcctcaccaaatggatttatatcaagtgatgttggtccaagaagcagacaaggcacttttgaccttcaacttccagctgatcattatatagatgacgatggcacatcagataacaagcccatagatttccttggtttggcatcagatacaaaaccccggaatgatgctgagcttacattagttagtgcagaaggcttgggcaagttcagtgataatagttcatcctcgggtttgcagactacaaataatcttggaccccggcaggttaccgacctgaatgaatcaaatactggcttccatatgggtagagcaaatggatcagtttccagaggccttccgcgtacccttgagaactcatggaaccaaccaatattgagagcaaacacaactaatttcagtttcagtaaaaaacactccaaagaaaagcacacagatgaaggtacaagctcaaatttctttgacacaagtgtgaaaacaatacatgacgacaaaccatcaatcaataaaggtaaacaagtcagcagtgtaacttttttagcacccagatataatgatgctgaccccccaaaatacttcaaagctgttgatgggaggcctgccactgccagttataaccactttgtttaccaaggtcagaatagttcagttggatggattgcacaaagtcctctggaaccttctgttatcaataattttgctagagttgaccgtccacatcatttgaatatgggtacatttactgcccccgtctctattcctcaaatagacaatccttcaattgtctccccgatgggttcttgcacagcagacccaaggagcagcgttatcaataatcctgctttaattccaagattcaatgggttctcaactgtgaattcgtacaccagtcttagtgctgtgacgcagagcattggaacttcaatcccaaagctgataaatgtggataatgtagataaacgctatcgtggttttccacttgattcgttttccgtgtctcactcacgacatcaggtagcagtttcaagtaacctggagcaaaagaattcccagaagttggaagattcagatcaacagtcccatggcaagggtatgaagaacttcaatttgaatgagacactgtcagattgtcaggaagatggtcttgtagaacaagatgggagatgtgcttccagttttcagcatgataaagatggggggtcagtacttgggatctcttggctcaaaaaaaaacttatgtctgctgacccaacagctgtggagaagccagggaagatttttggacattcattgggaactgcaatagagctgaaaaatactaaagaccagaatgaaccagctgtgactattcggaatttgtcagattctgcttctacatctgttggctgtgcaattaagaaggataggccttcggataacattgttaccggaactctgcctgtctgtaataaagcccaagagggtgctacatgtttacctctttcgtgccagaagcatgtgcctaaagatggacaagccgctgaaggagccaccaagaaaagtggcgcccccatcaggaacttcatcgatctcaatgatgatgtaccaaatgatgacaattctgaggaatcagtagtgtcacacgaatgccacgtggaaccttcacggaacaaccatcctaaacgagcatttgtgattgatttagaggtgccggcctgtgaagaggacgcttcgtgggatattgatcaagaatgcgcgcagccgaaacctgatgcgtaccaggaagttgacgacggatctgatacatccgctctagctgcagccgagaacatcgtagcgttgtcaaggaatacgccaacagccgcagaggcatcggacgatacgttgcagtggtttgcagatctcgctgtattaaacatcaacgaccttgctgagcaagctgaactccaagcttgtacgaatgattccagtaactacgagtcggattcattcgagtccttgacactgaagctggaagagaccaagatcgacgatctctggagcaggccactggaacctgaaaccgcaaccgatgaacagacagtttcagctgctcaccttctcaccaagcccagaaggggccagcaaaggagacggcggcagaagcgagatttccagagagatgtcttgcctggcctttcgtcgctttcccggcctgagatcacagaggacgtccagttgctcgaggggttagtccaggcttccgggggatcctgggagtcgagcttgactaggcgaggacgttgtggtgggcgtgctagaggcaggaaacctcggaaaactgtagtaaccgtaattgtagaggaggaggaagaggaggaggtagaggttagcccaccgccaaaacctgctggcactggggaattggaagccgatggcaggggtatgatcgggtggggcagaacaacaaggcggtgtcgcagagcgagatgtccgtcaggtaacagcatggctactgcgtcttgagtgggagggtatttcttggcagcaagcattggacctgattaggtactgggtggttcacaattgttgtattgactccgatggatgggctggtggtataaggtgatcacactcatatgagtgtcggcctactggtctcagcacaactttcgtgcttttgggtcgaaacatggtttacgttcttataataagttcggtaaattagctggcgagacatttctgcgacagcattgtactaagctgttccaggttatgaggcccggtgccccggtatatattcattgtgagaaaaactgcaatgcatgtaaaccaccttgatctctgaagaatagctcatcacatgtgtaacaaaagggtgtgaatgaggctctgagcctgtattctttttgtagctgtatgccctgcctaattggcgctagtatccagcatgcgaattgctaatttagttttataccgtggatattgctcatatcgtgtcccaacgcttttcttccctatgggaatgcatatgccactgctatgtataaggcaaatactgtaattatttgttcaaatatttgccaaactctatctccaa

SEQ ID NO: 47678 - DNA, 3373 bp, Zea Mays
cacgaccgctgaaagagaagtcaaagcgcacgggtcggcaggcagcttccgcgttcccactgcgcagtccgcgctcctcttccctcactggtgctcgccttggctgctccactcccagctccaaaaccctaaccccgcgagacatccagcagctaggagcgggtccaggagctcaccgtcgagcgaccgctacactcgacctcaccggtttctaatgctgatcaaagcatgagcttcactcctgttccaaggttcaggggggcagcctattcgcagttgtgtcctcagtctagcagttgtgctgaacatttggtaaatgtggatggggcgagtgcaaaagacttgtcagttgacccaagcacattttgtattccgcaagatgctaatcagggattttgtagccgagctttacagtacactagttctgtttcaaagcagggatttgcagctcaaggtcttcctgtaaatgctgcagagtttggtctgaataatgattcttctttggtgggaggatatcaacaatttgactaccttctggggcctcctcaaactgaagtgtgtgaaggaatgtggatgaaaaatatcaacacaagtatcatccaccggcgtagaccttctaatgcatcctgccttgatcatacagaagaactaacttcctatgaaaatgatgagggagctatctcatttggaagtagttgtagcacaggaattgcgagttatccatatagtactcctttgcaaagaaatagccacatttcggatacgcgggatggaacttgggatgctctcgtgcaaatgcaagaggctttggaagcatccaacagtgacaatggactcaatgaagagtgcagtgatttgactttcaatcatgcagaactttcaggtgggaatgccgtaaagcataaagttgtttgggacaatggctctttaaacagtccatctttcacctcaaatttattgtctttccctggtgatactgagaccaccctcacaagtgcctccactgtttattgtacctttcagaactttgctgatctccaacataagatgaacaacaatgagcaaaacaaattatctagtgaggttgaactgcctcgtcagaaagtgcccatgacaaaccatgttaatggaagtggaggtgaaatgcattctgctgaatggggaacgaaccctggtctcatagaatcttctggctttatgccaagcaatgaagacagacaaaacgatatatcacatcaaccgtcaagttcatttgtatacagtgcagatggaactgtggatcattgctcaaaaaagtcacccctcatgtatgaatgtgaagagcagatggaaattgattcacttttaaattcattcggtgtatcaactgattcattttcacaaacatatggaatgtttgagcgaagcaacaatttggttgagtttgatatgaagaccgaattagatgaaagtggttctgctgcatgctttaataataatgccccatatatgcaaactggaccacctgagtcagctatatctgatggatcttcttatcctgaacagtatcagtctacttctcaaacatgtggcttagtttatgcttcagcatctcagtggcaaaatatgtcaagttctggattgcctttactggattgtcgcaaaagtattggtgagcccacttcaataattagcctggggggaaatggtaaaggacacttgctgcccacaagtgaagatactttattacagaaaccacagagtgttgctcctgatgctagattggaaatgaccgacaatgttgctgattgctatctggagtctgctgctagcttggatggccattcttgtccactaggagcttccgcatgtcatgatgaagcaatggcagccaaagatttgcagacagcacaacatggcgtagtcacagattgcacctttggaatacatacttcaaaccacgctggacattcagacatgctgctacccattacacagactacttctgttcaagagcctggcttgagtttgtccaaggatctgaactcatcatgtattcgaggaacagaggttaagaaagtagatttaacagcaacatacaattctgaacgccatggcatcctccgcctcaagtcttttgaacaaaaaactcctgagagtatgggtatgaaaacatacatatatcattgtggtgatcatagccagattgttgatcctcagcagagtatcatactcgctgcaagcaaaccttcacactcaagtgttttgccagttgacaaatctgatggcaaggtcgtttcacagcaaaaaaagcggaaaagggctgcagaaaaccttttagcgtggcatgatcacatcatgcccgggcatgggagcatgcatcgtagaagaacacctgaattggattgggctcgtgctaccaaaagattggttgagaagctagacttcttgccgcaaatgttactaattccattgaggccattgtataccacatttctaaatccgcactcagtgacgcatgtgacactgctctatctgttgtgaatgacacgctaccgaaccagagcagcacttctggtaaggaaggctcaagaatcctatcagaagttctggaaacatatgagtcgaggcttggcaagctggaaatttccttgttaagctctgaaaaggcgacgacattgcatgatctggcatcagagctacaggacttggggcggtggtatattctctatcatcttgcaaagtggcatgggtacactaacaattctgagctcgaccctggcgcagctactgtcaagaaacatgaaggagctgctgcagcaccagtaaactcgctgagtgatatcaagtgtcgcttactgaactagggcagctcagcgactactaacaagtcaacccaacccgtgttatgctgaactgcgtataggaatatagaaccatagaacatactgctgctgtggataggcctggcgcggtggtgagaagccttctactgagccaaagaacctcactcatgtggaagtcgtcatcactgggtccgtctttagaacgtactgccgccccgttgccttgttggctttttttttgtttgtaaatgagaggcaacctctccgtttagacttaggaatatggtgatgtgacttaccatgtgctatgtgatcattagatgtaggagcacgggaagatcattttgcaagtatagctaacgctagctgtctggaacttccagatgttactgttcttttggccagtttgctagatggttatgatccggtggttgcagtttttgattgtcttttatctggtgattgcagcttttggcctgtttgcatgttttgaaggttgccacatctgttatacatttttaatttatttattcaaaagttgatattca

SEQ ID NO: 47679 - DNA, 3468 bp, Zea Mays
gagaagtcaaagcgcacgggtcggcaggcagcttccgcgttcccactgcgcagtccgcgctcctcttccctcactggtgctcgccttggctgctccactcccagctccaaaaccctaaccccgcgagacatccagcagctaggagcgggtccaggagctcaccgtcgagcgaccgctacactcgacctcaccggtttctaatgctgatcaaagcatgagcttcactcctgttccaaggttcaggggggcagcctattcgcagttgtgtcctcagtctagcagttgtgctgaacatttggtaaatgtggatggggcgagtgcaaaagacttgtcagttgacccaagcacattttgtattccgcaagatgctaatcagggattttgtagccgagctttacagtacactagttctgtttcaaagcagggatttgcagctcaaggtcttcctgtaaatgctgcagagtttggtctgaataatgattcttctttggtgggaggatatcaacaatttgactaccttctggggcctcctcaaactgaagtgtgtgaaggaatgtggatgaaaaatatcaacacaagtatcatccaccggcgtagaccttctaatgcatcctgccttgatcatacagaagaactaacttcctatgaaaatgatgagggagctatctcatttggaagtagttgtagcacaggaattgcgagttatccatatagtactcctttgcaaagaaatagccacatttcggatacgcgggatggaacttgggatgctctcgtgcaaatgcaagaggctttggaagcatccaacagtgacaatggactcaatgaagagtgcagtgatttgactttcaatcatgcagaactttcaggtgggaatgccgtaaagcataaagttgtttgggacaatggctctttaaacagtccatctttcacctcaaatttattgtctttccctggtgatactgagaccaccctcacaagtgcctccactgtttattgtacctttcagaactttgctgatctccaacataagatgaacaacaatgagcaaaacaaattatctagtgaggttgaactgcctcgtcagaaagtgcccatgacaaaccatgttaatggaagtggaggtgaaatgcattctgctgaatggggaacgaaccctggtctcatagaatcttctggctttatgccaagcaatgaagacagacaaaacgatatatcacatcaaccgtcaagttcatttgtatacagtgcagatggaactgtggatcattgctcaaaaaagtcacccctcatgtatgaatgtgaagagcagatggaaattgattcacttttaaattcattcggtgtatcaactgattcattttcacaaacatatggaatgtttgagcgaagcaacaatttggttgagtttgatatgaagaccgaattagatgaaagtggttctgctgcatgctttaataataatgccccatatatgcaaactggaccacctgagtcagctatatctgatggatcttcttatcctgaacagtatcagtctacttctcaaacatgtggcttagtttatgcttcagcatctcagtggcaaaatatgtcaagttctggattgcctttactggattgtcgcaaaagtattggtgagcccacttcaataattagcctggggggaaatggtaaaggacacttgctgcccacaagtgaagatactttattacagaaaccacagagtgttgctcctgatgctagattggaaatgaccgacaatgttgctgattgctatctggagtctgctgctagcttggatggccattcttgtccactaggagcttccgcatgtcatgatgaagcaatggcagccaaagatttgcagacagcacaacatggcgtagtcacagattgcacctttggaatacatacttcaaaccacgctggacattcagacatgctgctacccattacacagactacttctgttcaagagcctggcttgagtttgtccaaggatctgaactcatcatgtattcgaggaacagaggttaagaaagtagatttaacagcaacatacaattctgaacgccatggcatcctccgcctcaagtcttttgaacaaaaaactcctgagagtatgggtatgaaaacatacatatatcattgtggtgatcatagccagattgttgatcctcagcagagtatcatactcgctgcaagcaaaccttcacactcaagtgttttgccagttgacaaatctgatggcaaggtcgtttcacagcaaaaaaagcggaaaagggctgcagaaaaccttttagcgtggcatgatcacatcatgcccgggcatgggagcatgcatcgtagaagaacacctgaattggattgggctcgtgctaccaaaagattggttgagaaggtagatggtgagaatgcaacaatgggaagtagcacctttaatactccagctcggaagagacttattttgactactagcctgattcagtatattcttcctgttgtaccagctagacttcttgccgcaaatgttactaattccattgaggccattgtataccacatttctaaatccgcactcagtgacgcatgtgacactgctctatctgttgtgaatgacacgctaccgaaccagagcagcacttctggtaaggaaggctcaagaatcctatcagaagttctggaaacatatgagtcgaggcttggcaagctggaaatttccttgttaagctctgaaaaggcgacgacattgcatgatctggcatcagagctacaggacttggggcggtggtatattctctatcatcttgcaaagtggcatgggtacactaacaattctgagctcgaccctggcgcagctactgtcaagaaacatgaaggagctgctgcagcaccagtaaactcgctgagtgatatcaagtgtcgcttactgaactagggcagctcagcgactactaacaagtcaacccaacccgtgttatgctgaactgcgtataggaatatagaaccatagaacatactgctgctgtggataggcctggcgcggtggtgagaagccttctactgagccaaagaacctcactcatgtggaagtcgtcatcactgggtccgtctttagaacgtactgccgccccgttgccttgttggctttttttttgtttgtaaatgagaggcaacctctccgtttagacttaggaatatggtgatgtgacttaccatgtgctatgtgatcattagatgtaggagcacgggaagatcattttgcaagtatagctaacgctagctgtctggaacttccagatgttactgttcttttggccagtttgctagatggttatgatccggtggttgcagtttttgattgtcttttatctggtgattgcagcttttggcctgtttgcatgttttgaaggttgccacatctgttatacatttttaatttatttattcaaaagttgatattca

SEQ ID NO: 47680 - DNA, 3255 bp, Zea Mays
cgcgttcccactgcgcagtccgcgctcctcttccctcactggtgctcgccttggctgctccactcccagctccaaaaccctaaccccgcgagacatccagcagctaggagcgggtccaggagctcaccgtcgagcgaccgctacactcgacctcaccggtttctaatgctgatcaaagcatgagcttcactcctgttccaaggttcaggggggcagcctattcgcagttgtgtcctcagtctagcagttgtgctgaacatttggtaaatgtggatggggcgagtgcaaaagacttgtcagttgacccaagcacattttgtattccgcaagatgctaatcagggattttgtagccgagctttacagtacactagttctgtttcaaagcagggatttgcagctcaaggtcttcctgtaaatgctgcagagtttggtctgaataatgattcttctttggtgggaggatatcaacaatttgactaccttctggggcctcctcaaactgaagtgtgtgaaggaatgtggatgaaaaatatcaacacaagtatcatccaccggcgtagaccttctaatgcatcctgccttgatcatacagaagaactaacttcctatgaaaatgatgagggagctatctcatttggaagtagttgtagcacaggaattgcgagttatccatatagtactcctttgcaaagaaatagccacatttcggatacgcgggatggaacttgggatgctctcgtgcaaatgcaagaggctttggaagcatccaacagtgacaatggactcaatgaagagtgcagtgatttgactttcaatcatgcagaactttcaggtgggaatgccgtaaagcataaagttgtttgggacaatggctctttaaacagtccatctttcacctcaaatttattgtctttccctggtgatactgagaccaccctcacaagtgcctccactgtttattgtacctttcagaactttgctgatctccaacataagatgaacaacaatgagcaaaacaaattatctagtgaggttgaactgcctcgtcagaaagtgcccatgacaaaccatgttaatggaagtggaggtgaaatgcattctgctgaatggggaacgaaccctggtctcatagaatcttctggctttatgccaagcaatgaagacagacaaaacgatatatcacatcaaccgtcaagttcatttgtatacagtgcagatggaactgtggatcattgctcaaaaaagtcacccctcatgtatgaatgtgaagagcagatggaaattgattcacttttaaattcattcggtgtatcaactgattcattttcacaaacatatggaatgtttgagcgaagtatcagtctacttctcaaacatgtggcttagtttatgcttcagcatctcagtggcaaaatatgtcaagttctggattgcctttactggattgtcgcaaaagtattggtgagcccacttcaataattagcctggggggaaatggtaaaggacacttgctgcccacaagtgaagatactttattacagaaaccacagagtgttgctcctgatgctagattggaaatgaccgacaatgttgctgattgctatctggagtctgctgctagcttggatggccattcttgtccactaggagcttccgcatgtcatgatgaagcaatggcagccaaagatttgcagacagcacaacatggcgtagtcacagattgcacctttggaatacatacttcaaaccacgctggacattcagacatgctgctacccattacacagactacttctgttcaagagcctggcttgagtttgtccaaggatctgaactcatcatgtattcgaggaacagaggttaagaaagtagatttaacagcaacatacaattctgaacgccatggcatcctccgcctcaagtcttttgaacaaaaaactcctgagagtatgggtatgaaaacatacatatatcattgtggtgatcatagccagattgttgatcctcagcagagtatcatactcgctgcaagcaaaccttcacactcaagtgttttgccagttgacaaatctgatggcaaggtcgtttcacagcaaaaaaagcggaaaagggctgcagaaaaccttttagcgtggcatgatcacatcatgcccgggcatgggagcatgcatcgtagaagaacacctgaattggattgggctcgtgctaccaaaagattggttgagaagctagacttcttgccgcaaatgttactaattccattgaggccattgtataccacatttctaaatccgcactcagtgacgcatgtgacactgctctatctgttgtgaatgacacgctaccgaaccagagcagcacttctggtaaggaaggctcaagaatcctatcagaagttctggaaacatatgagtcgaggcttggcaagctggaaatttccttgttaagctctgaaaaggcgacgacattgcatgatctggcatcagagctacaggacttggggcggtggtatattctctatcatcttgcaaagtggcatgggtacactaacaattctgagctcgaccctggcgcagctactgtcaagaaacatgaaggagctgctgcagcaccagtaaactcgctgagtgatatcaagtgtcgcttactgaactagggcagctcagcgactactaacaagtcaacccaacccgtgttatgctgaactgcgtataggaatatagaaccatagaacatactgctgctgtggataggcctggcgcggtggtgagaagccttctactgagccaaaggtcttgggtttaacacaacctttctgcaaaaatgtagagataaaggctgactctgttatttcttctctagaacctcactcatgtggaagtcgtcatcactgggtccgtctttagaacgtactgccgccccgttgccttgttggctttttttttgtttgtaaatgagaggcaacctctccgtttagacttaggaatatggtgatgtgacttaccatgtgctatgtgatcattagatgtaggagcacgggaagatcattttgcaagtatagctaacgctagctgtctggaacttccagatgttactgttcttttggccagtttgctagatggttatgatccggtggttgcagtttttgattgtcttttatctggtgattgcagcttttggcctgtttgcatgttttgaaggttgccacatctgttatacatttttaatttatttattcaaaagttgatattca

SEQ ID NO: 47681 - DNA, 3593 bp, Zea Mays
cgcagtccgcgctcctcttccctcactggtgctcgccttggctgctccactcccagctccaaaaccctaaccccgcgagacatccagcagctaggagcgggtccaggagctcaccgtcgagcgaccgctacactcgacctcaccggtttctaatgctgatcaaagcatgagcttcactcctgttccaaggttcaggggggcagcctattcgcagttgtgtcctcagtctagcagttgtgctgaacatttggtaaatgtggatggggcgagtgcaaaagacttgtcagttgacccaagcacattttgtattccgcaagatgctaatcagggattttgtagccgagctttacagtacactagttctgtttcaaagcagggatttgcagctcaaggtcttcctgtaaatgctgcagagtttggtctgaataatgattcttctttggtgggaggatatcaacaatttgactaccttctggggcctcctcaaactgaagtgtgtgaaggaatgtggatgaaaaatatcaacacaagtatcatccaccggcgtagaccttctaatgcatcctgccttgatcatacagaagaactaacttcctatgaaaatgatgagggagctatctcatttggaagtagttgtagcacaggaattgcgagttatccatatagtactcctttgcaaagaaatagccacatttcggatacgcgggatggaacttgggatgctctcgtgcaaatgcaagaggctttggaagcatccaacagtgacaatggactcaatgaagagtgcagtgatttgactttcaatcatgcagaactttcaggtgggaatgccgtaaagcataaagttgtttgggacaatggctctttaaacagtccatctttcacctcaaatttattgtctttccctggtgatactgagaccaccctcacaagtgcctccactgtttattgtacctttcagaactttgctgatctccaacataagatgaacaacaatgagcaaaacaaattatctagtgaggttgaactgcctcgtcagaaagtgcccatgacaaaccatgttaatggaagtggaggtgaaatgcattctgctgaatggggaacgaaccctggtctcatagaatcttctggctttatgccaagcaatgaagacagacaaaacgatatatcacatcaaccgtcaagttcatttgtatacagtgcagatggaactgtggatcattgctcaaaaaagtcacccctcatgtatgaatgtgaagagcagatggaaattgattcacttttaaattcattcggtgtatcaactgattcattttcacaaacatatggaatgtttgagcgaagcaacaatttggttgagtttgatatgaagaccgaattagatgaaagtggttctgctgcatgctttaataataatgccccatatatgcaaactggaccacctgagtcagctatatctgatggatcttcttatcctgaacagtatcagtctacttctcaaacatgtggcttagtttatgcttcagcatctcagtggcaaaatatgtcaagttctggattgcctttactggattgtcgcaaaagtattggtgagcccacttcaataattagcctggggggaaatggtaaaggacacttgctgcccacaagtgaagatactttattacagaaaccacagagtgttgctcctgatgctagattggaaatgaccgacaatgttgctgattgctatctggagtctgctgctagcttggatggccattcttgtccactaggagcttccgcatgtcatgatgaagcaatggcagccaaagatttgcagacagcacaacatggcgtagtcacagattgcacctttggaatacatacttcaaaccacgctggacattcagacatgctgctacccattacacagactacttctgttcaagagcctggcttgagtttgtccaaggatctgaactcatcatgtattcgaggaacagaggttaagaaagtagatttaacagcaacatacaattctgaacgccatggcatcctccgcctcaagtcttttgaacaaaaaactcctgagagtatgggtatgaaaacatacatatatcattgtggtgatcatagccagattgttgatcctcagcagagtatcatactcgctgcaagcaaaccttcacactcaagtgttttgccagttgacaaatctgatggcaaggtcgtttcacagcaaaaaaagcggaaaagggctgcagaaaaccttttagcgtggcatgatcacatcatgcccgggcatgggagcatgcatcgtagaagaacacctgaattggattgggctcgtgctaccaaaagattggttgagaagctagacttcttgccgcaaatgttactaattccattgaggccattgtataccacatttctaaatccgcactcagtgacgcatgtgacactgctctatctgttgtgaatgacacgtaagcatcattttatttcttttgaatgtgtttccttttgtatcgttctccaaggttttaacatctcgagagttagtatagttacatgaaaactatgggactgtaaccatgtcataatcagcaggctgatttattcataatatctatgtagttttgtgactacttagatttcacattgatcttgagaatcttcatttgtggtatttgcccaggctaccgaaccagagcagcacttctggtaaggaaggctcaagaatcctatcagaagttctggaaacatatgagtcgaggcttggcaagctggaaatttccttgttaagctctgaaaaggcgacgacattgcatgatctggcatcagagctacaggacttggggcggtggtatattctctatcatcttgcaaagtggcatgggtacactaacaattctgagctcgaccctggcgcagctactgtcaagaaacatgaaggagctgctgcagcaccagtaaactcgctgagtgatatcaagtgtcgcttactgaactagggcagctcagcgactactaacaagtcaacccaacccgtgttatgctgaactgcgtataggaatatagaaccatagaacatactgctgctgtggataggcctggcgcggtggtgagaagccttctactgagccaaaggtcttgggtttaacacaacctttctgcaaaaatgtagagataaaggctgactctgttatttcttctctagaacctcactcatgtggaagtcgtcatcactgggtccgtctttagaacgtactgccgccccgttgccttgttggctttttttttgtttgtaaatgagaggcaacctctccgtttagacttaggaatatggtgatgtgacttaccatgtgctatgtgatcattagatgtaggagcacgggaagatcattttgcaagtatagctaacgctagctgtctggaacttccagatgttactgttcttttggccagtttgctagatggttatgatccggtggttgcagtttttgattgtcttttatctggtgattgcagcttttggcctgtttgcatgttttgaaggttgccacatctgttatacatttttaatttatttattcaaaagttgatattca

SEQ ID NO: 47682 - DNA, 3366 bp, Zea Mays
ctcctcttccctcactggtgctcgccttggctgctccactcccagctccaaaaccctaaccccgcgagacatccagcagctaggagcgggtccaggagctcaccgtcgagcgaccgctacactcgacctcaccggtttctaatgctgatcaaagcatgagcttcactcctgttccaaggttcaggggggcagcctattcgcagttgtgtcctcagtctagcagttgtgctgaacatttggtaaatgtggatggggcgagtgcaaaagacttgtcagttgacccaagcacattttgtattccgcaagatgctaatcagggattttgtagccgagctttacagtacactagttctgtttcaaagcagggatttgcagctcaaggtcttcctgtaaatgctgcagagtttggtctgaataatgattcttctttggtgggaggatatcaacaatttgactaccttctggggcctcctcaaactgaagtgtgtgaaggaatgtggatgaaaaatatcaacacaagtatcatccaccggcgtagaccttctaatgcatcctgccttgatcatacagaagaactaacttcctatgaaaatgatgagggagctatctcatttggaagtagttgtagcacaggaattgcgagttatccatatagtactcctttgcaaagaaatagccacatttcggatacgcgggatggaacttgggatgctctcgtgcaaatgcaagaggctttggaagcatccaacagtgacaatggactcaatgaagagtgcagtgatttgactttcaatcatgcagaactttcaggtgggaatgccgtaaagcataaagttgtttgggacaatggctctttaaacagtccatctttcacctcaaatttattgtctttccctggtgatactgagaccaccctcacaagtgcctccactgtttattgtacctttcagaactttgctgatctccaacataagatgaacaacaatgagcaaaacaaattatctagtgaggttgaactgcctcgtcagaaagtgcccatgacaaaccatgttaatggaagtggaggtgaaatgcattctgctgaatggggaacgaaccctggtctcatagaatcttctggctttatgccaagcaatgaagacagacaaaacgatatatcacatcaaccgtcaagttcatttgtatacagtgcagatggaactgtggatcattgctcaaaaaagtcacccctcatgtatgaatgtgaagagcagatggaaattgattcacttttaaattcattcggtgtatcaactgattcattttcacaaacatatggaatgtttgagcgaagcaacaatttggttgagtttgatatgaagaccgaattagatgaaagtggttctgctgcatgctttaataataatgccccatatatgcaaactggaccacctgagtcagctatatctgatggatcttcttatcctgaacagtatcagtctacttctcaaacatgtggcttagtttatgcttcagcatctcagtggcaaaatatgtcaagttctggattgcctttactggattgtcgcaaaagtattggtgagcccacttcaataattagcctggggggaaatggtaaaggacacttgctgcccacaagtgaagatactttattacagaaaccacagagtgttgctcctgatgctagattggaaatgaccgacaatgttgctgattgctatctggagtctgctgctagcttggatggccattcttgtccactaggagcttccgcatgtcatgatgaagcaatggcagccaaagatttgcagacagcacaacatggcgtagtcacagattgcacctttggaatacatacttcaaaccacgctggacattcagacatgctgctacccattacacagactacttctgttcaagagcctggcttgagtttgtccaaggatctgaactcatcatgtattcgaggaacagaggttaagaaagtagatttaacagcaacatacaattctgaacgccatggcatcctccgcctcaagtcttttgaacaaaaaactcctgagagtatgggtatgaaaacatacatatatcattgtggtgatcatagccagattgttgatcctcagcagagtatcatactcgctgcaagcaaaccttcacactcaagtgttttgccagttgacaaatctgatggcaaggtcgtttcacagcaaaaaaagcggaaaagggctgcagaaaaccttttagcgtggcatgatcacatcatgcccgggcatgggagcatgcatcgtagaagaacacctgaattggattgggctcgtgctaccaaaagattggttgagaagacttcttgccgcaaatgttactaattccattgaggccattgtataccacatttctaaatccgcactcagtgacgcatgtgacactgctctatctgttgtgaatgacacgctaccgaaccagagcagcacttctggtaaggaaggctcaagaatcctatcagaagttctggaaacatatgagtcgaggcttggcaagctggaaatttccttgttaagctctgaaaaggcgacgacattgcatgatctggcatcagagctacaggacttggggcggtggtatattctctatcatcttgcaaagtggcatgggtacactaacaattctgagctcgaccctggcgcagctactgtcaagaaacatgaaggagctgctgcagcaccagtaaactcgctgagtgatatcaagtgtcgcttactgaactagggcagctcagcgactactaacaagtcaacccaacccgtgttatgctgaactgcgtataggaatatagaaccatagaacatactgctgctgtggataggcctggcgcggtggtgagaagccttctactgagccaaaggtcttgggtttaacacaacctttctgcaaaaatgtagagataaaggctgactctgttatttcttctctagaacctcactcatgtggaagtcgtcatcactgggtccgtctttagaacgtactgccgccccgttgccttgttggctttttttttgtttgtaaatgagaggcaacctctccgtttagacttaggaatatggtgatgtgacttaccatgtgctatgtgatcattagatgtaggagcacgggaagatcattttgcaagtatagctaacgctagctgtctggaacttccagatgttactgttcttttggccagtttgctagatggttatgatccggtggttgcagtttttgattgtcttttatctggtgattgcagcttttggcctgtttgcatgttttgaaggttgccacatctgttatacatttttaatttatttattcaaaagttgatattca

SEQ ID NO: 47683 - DNA, 2505 bp, Zea Mays
gttttgaccgttctcgaaaagcaacactgccttctggcgctagcgctcggctggaccgggcgggcggtggctgcggctggagccttggaggcttctaccggagtggagtgcttcacaaaactgggcgctgcccaactccctgcccaagctgctggattaaaccccccttgtcgtcgcttcggttcaagcgaggaagagagagagagcgagagttgtacaaggggcgccggcggccgcattgtagagtacgtcgagcttgttcactgccgtcgcggcctcaaagcaagccacatcatcgatggcggacgcagctcacgtcttcctgctggtagcggtggccgccgcgctcgccggccgctcagacggcgcgtggtgcgtgtgccgcccggagctggcggacagcgcgctgcagaaggcgctggactacgcgtgcggcgccggcgccgactgcaagcccatcctgcagagcggcgcctgcttcgccccggacaccgtcaaggcccactgctcctacgccgtcaacagcttctaccagcgcaacagccagaacccgcaggcctgcgtcttctccggcaccgccacgctcagcaacagcgacccgagcggcaatggctgcacgtaccctgcgaccccaagagaagcgagagggcaggtgcctccgaagccggtgccgttcgagaccttgcacgggggatcggcaattaggtttttggtgagcgtctacgcgactgcccaaaacatctacgacatgacaaaggaagttggacaaggatctggatcagagcgcatgggagggtatgatcagtttatttccttactgttttgcattctacagattatatatattttatatatgcatttgtactgtttcatatatagcaaagagtttatctcatctgttctgttaccttataatgtgttatatctgtttgttttaattttacaatcatgttgtttatgtttctatttgcttattttcaattgttcagtcagtctacatgtttatcgtatttatatgatttatataattcatatgctatatgttctcatgatccatattgttatggatatatttgatgtcatgattaattatattttatatgtcatcatcataatgttaatttatggaattaaaatgacatggaaaatgcctataattctaacatttcaaaaacctaatgttaggcatttttctgtcagaggttttgctgctgtgctaaagcctgatccttttgatggtaaaaacttcttgatatggaaagctaagatggaattgtggctaactgcaatgtcttgttttcatgttgctgagagcaagcctgccaacttacctcctgaggatgaggctaagtttaaggctgaagacaacctctttcgaggagcagtaattagcgcactggatacaaaattccagaaaagctatatcatccttcccacagggaaagagctgtgggatgctcttgttggaaagtttggagttactgacgctggtagcgagctgtacctcatggagcagctgtatgactacaagatggttgagaaccgatctgtagtggaacaggctcatgaatttcaggcactagctaaggaactcgaactttttccttgtcctttgcctgacaagtttgtggctggcggtataatcgccaagttgccaccttcttggaaggactttgctacctctctcaaacataagagacaagagttcaatgtggaggagctcattggtactcttgatgttgaggaaagagctagatcaaaggacaatggaaaaggtgtggagacctctactgctaatgtggtgcagaagagaaacttccgcaagtttaacaagaagaaaaaccagaacaaaccagagaacgcgaataaacctgttcaaacagcacagtttaaaaagaagaacaacaataacaagggaaagggaggttgctttgtctgtggcagtgatcaacattgggctagagagtgccctgatcgcaagttcactcaggacaagaaatcagctaatgttgtaaccactgaaactgaagatggaacatctgggtatggtaattctttaccatttgttctctcagtttgtaattcacctgagtggtggatggacagtggtgcaaatattcatgtgtgtgctgatgcctctatgttctcctcctaccaggtcgggaggtctggcgccttgttaatgggaaatgggtcgcgtgctcatgttcttggtgttggtacggtcattctgaagtttacttcgggaaagacggtgccattgaagagcgtgcagcatgtgccctctatcaagaagaatctcgttagcgcgtctatgctatgtcgagatggatacaaagttgttcttgagtctaataaatgtgttgtgtctaaacatggtatttttgttggtaaaggatatgactgcggaggcttgttccgcttatcactgcatgatgtgtgtaataaactcgtgaattctgttcatttttctgatgagtcggatttatggcattcacgtttttg

SEQ ID NO: 47684 - DNA, 1432 bp, Zea Mays
atggtttcgcgtgattcgcagtggcatacgtcaacatcagggttacatacacttgtgtggattcaaatcaactgtggtcttcctaataatcggggccgctattgcccattactgctgggttccgcttcaatttcggaggcctcgctgatgctgctggtggcctcaaacttcggcccctgcagctgcctcttcaccaaggccgtgtatatgccgtcgcggtccaggagttcgtcgtgcgtgccgctctccacgattaggccgtcggagatgacggcgacggtgtcggcgctcttgacggtcgagagccggtgggctatcacaaggacagtcctccctttcatcaaggagtccattgcatcctgtacaagatattcgctttcagcatccagggcactggtggcttcgtccaggagaagcactcgtgggttcataagcaaagctctcgcaatggcgatcctctgcttctgcccgccggataacctgatcccccgctcgccgacgacagtcttatattggtcgggaaagccgcatatgaagttgtgtgcattcgccattttagctgcactctcaacgtcagcaaagttcgttgtgccctctagtccataagcaatattctcttcgatggtgcagttgaagagcgtaggctcctggctgacaatgcttacctgaaatcatcagtcgataaacatatggaaaaataagcatcttctgtgaagtgactatccgtaataatcaagcgctgtattggaacttgccagaaaaaaaaaatctcatggtaattgcattatagcagcgaccatatagcacaactttatcaaggacttccatttaactctaccccctgcagcccaaattataaattgttctaattttcttgaagagtcaaaacatctaacgtttgagcaaagttataaattctggatttgcttgtcggtttgtgaactgaatgttgagcattactatttggattttttccaactaataatttgaaaaaccacgagagattttttgtttcaaaaaaggacacacacaaggtatggaactttggctgttcaaaaataggcatgccataattagacaaaattgtctgaaaatagaaacctataggttctcgttcaagttacagatttagatgggtaggttgcttcttttcattttttttcaacactcaggactcagcattgcatagtacagactatagaatagcaagtgccattacaagttgaattttgaaaagatgatgataatgctggtttgagttacgaaccaaatactttaacattcctcaatgcatcaatttccataccagtgctacttcaaattactgttcaaactggccaaaattactggaattgccagagcctagactattagatgaagcaacaaaatggaattttggcacaaataaaaggatcgaactagacagttcaga

SEQ ID NO: 47685 - DNA, 1021 bp, Zea Mays
tgaaacaattatagtatacgagctttggataggaaacattttgatgcatcttatgagcactcaattttaaagcaacttgcaaatattataaagaaggttaaacaaaaaaccaacacacatgtaccgatgtacatcctgcatctctgatgtcggtgcagggtgctcacagagctctccctcgacgacaactatttcaccgggatcccgacgacctgtacacgttgcccaacctgaggagagtgagcttacatgaaaatctgttcactggcaacctcggcagtgaccttggtaacctctctcagatcatgcaacttgacttgtcctataacaagttcacaggctccatccctgatgtctttggagagatgaggaggctagagtccgtaaacctggccaccaataggctggacggtgagttgcccgcttccctgtaaagttgtccactgctgagggtaatcagcttgaggaactactcgctctctggtgagattgctatcgactccagcttgctgccgaagcttaatacttttgatgttggaaccaactatctgagtggcgctatagctcctggcatcagtgtgtgcaccaagttgaggacactgaatcttacaaggaacaagctcgtggggggggataccggagagcttcaaggagttgagatccctgtcgtacctctcgctgaccaggaatagtttcacaacctggcatagacattgcaggtcttgcaacacctgcccaacctgacaagcttggtgctgaccaagaatttccgcggcggtgagacaatgcaggtgctcatcctgacaaactgtctactcatcggcgtaattcccccgtggctgcagagcttgggaagcctcaatgtgctgtcagcttcacacagatgaggagcttgaattcaaataatggctcgagcaagcagtcacccacagagggttcccattgttcagcaataaaagcaaatccgccatcgtcgcccttggactaggaactgtggtcagggttctcctcttgttgtgct

SEQ ID NO: 47686 - DNA, 1076 bp, Zea Mays
gaagttttgttagcatgacgtattatagctgcaaaatgcccaaactgtttttcaattcatattccaatcatgtgccctacttcagccaaacacacacaataaaattatggaatattccatattgaaacctcatatcagaattgggtgcccactatctacttcaaaatttgaattcacacctacaacaatacctaaacttttgtgcgctgtcatgaacaaaagctagcccatcaacaaaatgtgaaagagcaaagcaataggagaggaggcaacaattatcaactggatcaacagcaaactttccctcggcaatgaaagccttggccggtgatgcacctctttgaagcaaccaaatgatactaaatatgcaattcagggctatcatacaaataaatgtacatgctaatctttggaaaatgaaaaataggaacaaaatgagaaaaaagagttaagagaacctgctgtttagtattaccagaaccatgcttgacaccctggctcctgattttcaaaatattgagcatcaattactaccattagcttgcagtgggacataacaataaaaatgtaagaaaacaaaagaataatctaagcaaaatgaaaattagtctttgaagcaaccaaatggtaccaaatatgcatttgagggcctatcaaacaaataaatgaacatgctaatctttgcaaaatgaaaattaggaataagatgagaaaaaagagataagagaacatgcagtttagcattaccatgattgacaccctgactccatgcatagacctgattttcaaaaatgcatcgattactaccattagcttgcagtgggacataactgtaaaaatgtaaggaaacaaaagaataatgatgtggtcttcaaggttaaaaatgacccaccgaagttactaccattagcttgcaaaggcacataaatagtaatagttgagaacataaaactaaatcaagaaaacagaatataagcactatcaacaaaacaaaaacaaattgcatcaatacttacaatactaagaccattgtgtatacttacatatcttgcaacagactgaatctgcaattttag

SEQ ID NO: 47687 - DNA, 1844 bp, Zea Mays
ctcctcgtccgtctctctacgcctctcccgctcgcgcgcggattactgagctgaggcctacgattcgctggatccaaacggcaacatcactataaaatgggatatcatgcagtggactcctgacggatatgtcgctgttgtcacaatgttcaattatcaacaatttcggcacatcggggcacctggatggcagcttgggtggacatgggcaaaaaaggaggttatatggtcaatggttggggctcagaccactgaacagggtgactgctcaaagttcaagggcaacaccccccattgctgcaagaaagatccaacaattgttgatttacttccaggcactccatacaacatgcaaattgccaattgctgcaaggcaggagttataaatacctttaaccaggacccagcaaatgctgcttcctccttccagatcagtgttggtcttgctggaactaccaataaaactgttaaggtgccgaagaatttcactcttaagactccaggccctgggtacacatgtgggcgtgctattgttggcaggccaacgaagtttttctctgcagatgggcgcagggtaacccaagctctaatgacatggaatgtgacctgcacatattcccaatttcttgctcagaagactccatcctgctgtgtatctctctcatcattttataatgacacaattgtgaactgcccgacatgctcatgtggctgccagaacccaagtgggtcaaactgtgtgaacgaggattcacctaatctacaagccgcaattgatggtcctggtaaatggactggccagcctcttgtacaatgcacttctcacatgtgcccaataagaatccactggcatgtgaagctcaactacaaggaatactggagagtgaaaatcactatcacgaacttcaacttccgcatgaattacacacagtggaacttagttgctcagcatccaaactttgataatatcactcagttgttcagcttcaactacaaaccacttactccatatgggggtggcataaatgatacggcaatgttctggggtgtaaagttctacaatgatttgctgatgcaagccggcaaacttgggaatgtgcaatcagaactgcttctccgcaaggactcacggactttcacattcgaaaagggatgggccttcccacgccgagtgtacttcaatggtgataattgtgtcatgccatctcctgaaaattatccatggctgccgaatgcaagccctctaacaaaacaagcattgacactcccactcttgatattctgggttgccttggctgttctgttggcttatgcatgatgagtgggatcaagatgtttagcaagcttcaagttgatgtcggattccatgaggtgcactgcaacgggatatttattcattcaattccatagcggcacaggagagatgaggcgaagccaagaaaaagtggatgtgtgtgtgtgtgtgtttgtaagttaaagggccaaaatgtatttcttgtctggtagtatatagcagctctacaacactttggtgaacttagttactgcaaattaggcaattacagttgcaccttttgtattttatagcaaacccagacttctattggattctatgactgcccctcttgtagtaaacgcaaggcttcactggtactcctgtttaaagattggtcaaatagaagagacgacggtgattgtctgattgagataactaagttctggtgtcttgatccatttgaccattctgctgcaaagattattgagctaaattgctaataacaagtgttaactgttgactgaaccaaaattacgtgtgcaaaagaaacaacgaaccacaataagac

SEQ ID NO: 47688 - DNA, 1495 bp, Zea Mays
ggctactgctactgggctcgccgcgctcatcagggcaaacgcatactacgctacaagtgaagtgagtgatcgatgacgacggtagctagctagtttggtgcggttctcgtcggactatgggctgtttggttcagctctgtcgtctgtcgagctaacctatcatatcagcgccatgcgccccggccggtcgtaacctagctaggagtagctagctaggactagctagctaggagcctaagcgcccagcccagtgggtggtagcctaccaagggtgaggaagaggagctgagctaggaccgcgaggcgagcgagatccaatctgcaccccacgaacgaaaagattcttccccgccggcgtcgctctctcatccgtcgacgtctcgctccttccttcctctctctctctctctctctctctctctctctctctctctttctctctctcagccagcagcaagcatatagcccagcaccaccacatgcccaagggccctccctctccctcgtcgtcgggccaattgagtgtgagagctcgaaaaaacccaggggatcggccggaccagcagcgagcgagcgcgagctctgcgtgcgtgtgtgtgtctgcgcgctagattagatcacctccatcgtcaataattgcaggcagatccatatagtctgctggtggcgagacaaagcaacggatcgtcgtcgatccggagagcggaaagcgcgcagatcgcggcggccatggggcgcgggaaggtggtgctgcagcggatcgagaacaagatcagccgccaggtcaccttcgccaagcgccggaacggcctgctcaagaaggcgtacgagctctccatcctctgcgacgccgagtctgcttaagactctagagcggtaccagaggcacatctatgcttcagctgatgctgcagtgccatctagcgatgagatgcagatggccaatgccgtgatgctatcaacaagccagtgacatgcaattgtcggagttacagtacttgctttatgatctactagaccttactgcatgtatttaaccaataagaacaatatatggtactagattaataaaatctacatattttaatgacaatattacagactgtgcatttttatatacaagtaaacatcatcattacatgcatgcaatccatttgttaaaacactaaccactatgttttataaaaatgatttttatcatcaatattgcataacaaaaactattaggacatcttggcaatgcagaaattcacatgaatcagtttattttcatagaaaaaatacaggtaacaaaggggaaaaatcctacaatccaaatgagaccttatatgttctcatgcataagtttgctatcatacactataaccataaaaggatcatggtagaatatgttctcatgcatatgttcacatgaaaggattgttataaattaaagagagtagatgtggagacttttgggacctctccatccaatacctgatatctgaaaatgcag

SEQ ID NO: 47689 - DNA, 2364 bp, Zea Mays
ggctactgctactgggctcgccgcgctcatcagggcaaacgcatactacgctacaagtgaagtgagtgatcgatgacgacggtagctagctagtttggtgcggttctcgtcggactatgggctgtttggttcagctctgtcgtctgtcgagctaacctatcatatcagcgccatgcgccccggccggtcgtaacctagctaggagtagctagctaggactagctagctaggagcctaagcgcccagcccagtgggtggtagcctaccaagggtgaggaagaggagctgagctaggaccgcgaggcgagcgagatccaatctgcaccccacgaacgaaaagattcttccccgccggcgtcgctctctcatccgtcgacgtctcgctccttccttcctctctctctctctctctctctctctctctctctctctctttctctctctcagccagcagcaagcatatagcccagcaccaccacatgcccaagggccctccctctccctcgtcgtcgggccaattgagtgtgagagctcgaaaaaacccaggggatcggccggaccagcagcgagcgagcgcgagctctgcgtgcgtgtgtgtgtctgcgcgctagattagatcacctccatcgtcaataattgcaggcagatccatatagtctgctggtggcgagacaaagcaacggatcgtcgtcgatccggagagcggaaagcgcgcagatcgcggcggccatggggcgcgggaaggtggtgctgcagcggatcgagaacaagatcagccgccaggtcaccttcgccaagcgccggaacggcctgctcaagaaggcgtacgagctctccatcctctgcgacgccgaggtcgcgctcgtcctcttctcccacgccggccgcctctaccagttctcatcctcctccgatctgcttaagactctagagcggtaccagaggcacatctatgcttcagctgatgctgcagtgccatctagcgatgagatgcagatggccaatgccgtgatgctatcaacaagccagtgacatgcaattgtcggagttacagtacttgctttatgatctactagaccttactgcatgtatttaaccaataagaacaatatatggtactagattaataaaatctacatattttaatgacaatattacagactgtgcatttttatatacaagtaaacatcatcattacatgcatgcaatccatttgttaaaacactaaccactatgttttataaaaatgatttttatcatcaatattgcataacaaaaactattaggacatcttggcaatgcagaaattcacatgaatcagtttattttcatagaaaaaatacaggtaacaaaggggaaaaatcctacaatccaaatgagaccttatatgttctcatgcataagtttgctatcatacactataaccataaaaggatcatggtagaatatgttctcatgcatatgttcacatgaaaggattgttataaattaaagagagtagatgtggagacttttgggacctctccatccaatacctgatatctgaaaatgcagaataactatcaagaatatgtgaagctgaaagcacgagttgaggttttacaacactcgcaaaggaatcttcttggtgaagaactggctccacttagcccaagtgaacttgaccagcttgagagtcaagtagacaagaccttgaagcaaataagatcaagaaagactcaggtgttacttgatgaactttgcgacttaaagagaaaggaacaaatgctgcaagacgctaacagggttctgaaaaggaagctgcacgagtttgaggcagaggctgcttctcccccacaattggcgtggcaaggcggaggcggcatgttgtcccatgaccctccacagccagaacacttcttcgtggctctggagagcaacgcgcctctgcaacctacataccatactatggacatgaaccagcagccagagccagcgccgggcggctgctaccctcctgcgtggatggcttagccagcgctttggttccattgccttgacaagtgccgtgtccttcagagatcgctacgagtcctgctgctgcttttgcgaaccccccctttgctgcctgccatgcttaccgaactgttcaaataagaaataaccacatggtcctatataggttgctgttgtctttatcttctgttgatcacgtcctgctcagatgctttaaacgctatgcaaaatggcttagcgatgcatgctggaatgggctgaactgcttgtgttttgggagtataaatcgcttgggcgcttggcaataagtattattggcatgcctccctctgtttttataaatacaagtacagcagactattactagct

SEQ ID NO: 47690 - DNA, 1868 bp, Zea Mays
ggctactgctactgggctcgccgcgctcatcagggcaaacgcatactacgctacaagtgaagtgagtgatcgatgacgacggtagctagctagtttggtgcggttctcgtcggactatgggctgtttggttcagctctgtcgtctgtcgagctaacctatcatatcagcgccatgcgccccggccggtcgtaacctagctaggagtagctagctaggactagctagctaggagcctaagcgcccagcccagtgggtggtagcctaccaagggtgaggaagaggagctgagctaggaccgcgaggcgagcgagatccaatctgcaccccacgaacgaaaagattcttccccgccggcgtcgctctctcatccgtcgacgtctcgctccttccttcctctctctctctctctctctctctctctctctctctctctttctctctctcagccagcagcaagcatatagcccagcaccaccacatgcccaagggccctccctctccctcgtcgtcgggccaattgagtgtgagagctcgaaaaaacccaggggatcggccggaccagcagcgagcgagcgcgagctctgcgtgcgtgtgtgtgtctgcgcgctagattagatcacctccatcgtcaataattgcaggcagatccatatagtctgctggtggcgagacaaagcaacggatcgtcgtcgatccggagagcggaaagcgcgcagatcgcggcggccatggggcgcgggaaggtggtgctgcagcggatcgagaacaagatcagccgccaggtcaccttcgccaagcgccggaacggcctgctcaagaaggcgtacgagctctccatcctctgcgacgccgaggtcgcgctcgtcctcttctcccacgccggccgcctctaccagttctcatcctcctccgatctgcttaagactctagagcggtaccagaggcacatctatgcttcagctgatgctgcagtgccatctagcgatgagatgcagcatagatggccaatgccgtgatgctatcaacaagccagtgacatgcaattgtcggagttacaaataactatcaagaatatgtgaagctgaaagcacgagttgaggttttacaacactcgcaaaggaatcttcttggtgaagaactggctccacttagcccaagtgaacttgaccagcttgagagtcaagtagacaagaccttgaagcaaataagatcaagaaagactcaggtgttacttgatgaactttgcgacttaaagagaaaggaacaaatgctgcaagacgctaacagggttctgaaaaggaagctgcacgagtttgaggcagaggctgcttctcccccacaattggcgtggcaaggcggaggcggcatgttgtcccatgaccctccacagccagaacacttcttcgtggctctggagagcaacgcgcctctgcaacctacataccatactatggacatgaaccagcagccagagccagcgccgggcggctgctaccctcctgcgtggatggcttagccagcgctttggttccattgccttgacaagtgccgtgtccttcagagatcgctacgagtcctgctgctgcttttgcgaaccccccctttgctgcctgccatgcttaccgaactgttcaaataagaaataaccacatggtcctatataggttgctgttgtctttatcttctgttgatcacgtcctgctcagatgctttaaacgctatgcaaaatggcttagcgatgcatgctggaatgggctgaactgcttgtgttttgggagtataaatcgcttgggcgcttggcaataagtattattggcatgcctccctctgtttttataaatacaagtacagcagactattactagct

SEQ ID NO: 47691 - DNA, 850 bp, Zea Mays
caatgccgtgatgctatcaacaagccagtgacatgcaattaataactatcaagaatatgtgaagctgaaagcacgagttgaggttttacaacactcgcaaaggaatcttcttggtgaagaactggctccacttagcccaagtgaacttgaccagcttgagagtcaagtagacaagaccttgaagcaaataagatcaagaaagactcaggtgttacttgatgaactttgcgacttaaagagaaaggaacaaatgctgcaagacgctaacagggttctgaaaaggaagctgcacgagtttgaggcagaggctgcttctcccccacaattggcgtggcaaggcggaggcggcatgttgtcccatgaccctccacagccagaacacttcttcgtggctctggagagcaacgcgcctctgcaacctacataccatactatggacatgaaccagcagccagagccagcgccgggcggctgctaccctcctgcgtggatggcttagccagcgctttggttccattgccttgacaagtgccgtgtccttcagagatcgctacgagtcctgctgctgcttttgcgaaccccccctttgctgcctgccatgcttaccgaactgttcaaataagaaataaccacatggtcctatataggttgctgttgtctttatcttctgttgatcacgtcctgctcagatgctttaaacgctatgcaaaatggcttagcgatgcatgctggaatgggctgaactgcttgtgttttgggagtataaatcgcttgggcgcttggcaataagtattattggcatgcctccctctgtttttataaatacaagtacagcagactattactagct

SEQ ID NO: 47692 - DNA, 658 bp, Zea Mays
gtgattcaagactcaggtgttacttgatgaactttgcgacttaaagagaaaggaacaaatgctgcaagacgctaacagggttctgaaaaggaagctgcacgagtttgaggcagaggctgcttctcccccacaattggcgtggcaaggcggaggcggcatgttgtcccatgaccctccacagccagaacacttcttcgtggctctggagagcaacgcgcctctgcaacctacataccatactatggacatgaaccagcagccagagccagcgccgggcggctgctaccctcctgcgtggatggcttagccagcgctttggttccattgccttgacaagtgccgtgtccttcagagatcgctacgagtcctgctgctgcttttgcgaaccccccctttgctgcctgccatgcttaccgaactgttcaaataagaaataaccacatggtcctatataggttgctgttgtctttatcttctgttgatcacgtcctgctcagatgctttaaacgctatgcaaaatggcttagcgatgcatgctggaatgggctgaactgcttgtgttttgggagtataaatcgcttgggcgcttggcaataagtattattggcatgcctccctctgtttttataaatacaagtacagcagactattactagct

SEQ ID NO: 47693 - DNA, 1690 bp, Zea Mays
cgcgataccccctcactgctccagtgctccctcctcccctcccctccgatcaagtcggggcaacgcgcatcactcgctttaaatccgcacctcccggccggtccccttatcacctcaccttctcctttgagtcctctctctccgccgccgcagctagctgtgacgttatgctctcgccggcgccatagcgccagcgcctaccgtctacaactatccagccttaggcttacctatcccgtcaatcaagcctctcgtaaggaacaaggaaggtagctagctagttctatagctgctgtcgtcgtcgtcatcggcggcggcggcgcctgttcttagaggataaggttgtcctagcggagagggagctagccaggatttcggttgagatcaagagggggagcaggcggcggcggcggcgatggggcgcgggaaggtgcagctgaagcggatcgagaacaagatcaaccgccaggtgaccttctccaagcgccgctcggggctgctcaagaaggcgcacgagatctccgtgctctgcgacgccgaggtcgcgctcatcatcttctccaccaaagggaagctctacgagtattccaccgattcatgtatggacaaaattcttgaccggtacgagcgctactcctatgcagaaaaggttcttatttcagcagaatctgaaactcagggcaattggtgccacgagtatagaaaactaaaggcgaaggtcgagacaatacaaaaatgtcaaaagcacctcatgggagaggatcttgaaacgttgaatctcaaagagcttcagcaactagagcagcagctggagagttcactgaaacatatcagaaccaggaagaaccaacttatgctcgagtcaatttcggagctccaacggaaggagaagtcgctgcaggaggagaacaaggttctgcagaaggagaaagcgttgctcctgcctgcagctcgcggagaagcagaaagcccagcggaagcaagtgcaatggggccaaacccaacagcagaccagttcgtcttcctcgtgcttcgtgataagggaagctgccccaacaacaaatatcagcatttttcctgtggcagcaggcgggaggttggtggaaggtgcagcagcgcagccacaggctcgcgttggactaccaccatggatgcttagccacctgagcagctgaaggtttcagcaactcttcccgtttatccgcctggtgcagtatagtatcatcgtgatcgcgagagcagcagcagtgggtttgccgtatctttttttaccaatgtatttttctcatcaatcatttcaagagtactgacagaaatctgaggacttccatcattcctgtccgctgacaagatcccaggaaaaatgtttttgcaaaagcaaagctataggcagagttctcatccgggcaaggcgattgaaccctttgtgaagctttttcagaaccaaccattgagcgttccttgacatttagcactgaagactggtcatggtcatggtcatcctttgacctgcccgtatttattttgcacaccttcggcatttggcacagaaggaccattgacacccgtagagcactacttttgagcttgcccagggccttcctttgtactaccagtactattttgaaatacatgcttgcttgcagccctgtaaaaccaagacactctgatccggatggcattctgtacc

SEQ ID NO: 47694 - DNA, 2767 bp, Zea Mays
gaggggaactgggaagggaagggagcggaagagaggtgggtgaccgccgctcctccgtccagccttccagttccaggcgtggcgaactaggcaagcggcaagctcaccgctcctcgagtgaggcccaggttccgtcgccgccgtactcagcagcggataccggcgagtcaacaggtagtagagggggaaggaggggagcagttcctgttcgcccggtcaccgcgcggccggagcaatcccgctggtgcgtccgcctcagtttgccgtcaccctgttgcacgtacggctagggtttggagatagatccgcccgccagctcgtgtggaggcgcgccgtggtgcggggaggaatagaggaagcgcggttttggttccttgctcctgaagcttcagggcgtgcgaaccggttcggtcgcaatgtcgggctcgtcggcggcaggggaggacatagtgcagcacctatcgtccaattctaacccgtcttcgtcgaagctcgcgaagctcgaggcacgcatggccggcaaggctgtctccgcgccatcgtcaccgccacaccatcccatggctgcccccgcctccgcacctgccatatccttcatggaccaggaggagctgcctgagacttcctcttccgatgacgataactgtgaggagtttttgatacaaaagaataccctgaagcgtccgagatctccagatggtgacaacatctctgctcttggaaattttgagggttcatcaaacgaggcagcaaagattttagatgtcacggatacaagaccatccctggacaattcaaataggaaaaaacaaggccgtggaaggggtcgtgctggtacaggccgaggccgtggctcaaagactgttgatcaaccacgactgactttgatttcctcagcagttgtaacaaatggtcaactagataaattaaccaacaaggaaccccaatcgagtgttcaactgggccatgacgacagggctgctttacaggaagaattgtcaatgttacatggcaaagttgcatttttggaggaggaactttctaaatcgcgtcaagacgcaacaaattaccatcaactgagtgatagggtagcaaaggaattgaaggatctcaaagatcatgaccaacaaatgagatctaagcaaatgaaggtgctgtctgatctgctgatagctgtgtcgaaagcagagaggcaagaagcgcggatgaggataaggcaggaatctttcagacttgggaatgttggtgttatgagagctggaactatcatatctgaaatttgggaagacggacaggcaataaaagatcttaattctcacctgaaatctttactggaaactaaggagactattgaaaggcatcgtaaatcacttaagaaaagacaatctggacgaaatatgtaaatctcgtctaaccagtatcaaacgggaggaagaacagtatatgagagagagagatcggtatgagttggaaaaggggaggcttatacgagagatgaagcgtctcagagatgaagatggctcacgctttaacaacttccaaattcttcaccatcgttatgctctgttaaatcttcttggaaagggagggtttagtgaggtttacaaggcttttgatttggtggagtacaagtatgtggcatgcaagcttcatggattgaacgctcaatggagtgaggagaaaaaacagagctacatacgtcatgcgattcgtgaatataacattcacaaaactttggtgcatccaaacattgtcaggctatgggatatatttgagattgatcacaatacattctgcaccgtcctagaatattgcagtggcaaggatcttgatgcagtccttaaagccacaccaattcttccagaaaaagaagcaagaatcataattgttcaaatatttcagggcctggtttatctaaacaagaggggccaaaagatcattcactacgatctaaaacctggcaatgttctctttgatgaggttggtgttgcaaaagttacagactttggcctcagcaagattgtggaggatgatgttgggtctcagggaatggaactcacttctcagggagctggaacctattggtatcttcctccagaatgctttgaccttagcaaaacaccatttatttcatctaaggtggatgtttggtcagctggtgtaatgttttaccaaatgctttatggaaggcgtccttttggtcatgatcagactcaggagagaatacttcgggaagatacaattatcaatgcacgaagagtggagttcccctcaaagccagctgtatcgaatgaggcgaaggatctgatacgccggtgcttgacatacaaccaatcagagaggccagatgtactaaccataactcaagatcattatctctcgtatgcaaagaagtagccactaccccggagaacattttggcgatggtatctgttcaggcattgagattatggatggggatggataatctcgtggaagagctaagtattaaacaagctcaagaagaccacaaagggtgtataattgtaaattttagtctgccctattacggcaatgacctgaaatccagaaggcatcagttcaaaggccagcttcttttgtaacatagagaaaacatgcattaacgggcccatttaccctttgactgagatctccttgactcgcttgtggcatgcccccgtgcgtaacgcgacggttacttggctggtgggcaatggtcctcttgattttctgtttgctgatactgtcgataaggactgccgaatca

SEQ ID NO: 47695 - DNA, 1428 bp, Zea Mays
gtttatagttcttggatgaatttgtttcattttgccaataaaaaaactgtggtggttcttagataagtaatagctgctgacccatataaaaatgaagtgaatgcataaactgatgctaaatagatttggtgatggtttatacaattatttctcccacatttaccaattggtcagaataggataggttgtcaatgggggaaaaaaggcaggggcaacatgctgttgaccggatttgtatcccatcctctgtctcgacaataacaagcaagttgacaaataaataaataagactcatctgccgcaaactctaatgtatttacttctagcaattctatgtttgatactttctattttgagccacaactgttacagcaagccactacgaatactaataactacaaggatatgttttctcacagaaaacaaaaggtttcttccaatgctcactatcttcttaatcaacatgcattccattttacatgtatttgtatcagttatgtgaagcttttattttacaatgttgtagtctttaatgatggttttccttcctaaatctatagctcttagatcaggaaatcatcaatcatgagatgtgataatgttctcttcattgttattgtttcaaccagggcctggtttatctaaacaagaggggccaaaagatcattcactacgatctaaaacctggcaatgttctctttgatgagggaatggaactcacttctcagggagctggaacctattggtatcttcctccagaatgctttgaccttagcaaaacaccatttatttcatctaaggtggatgtttggtcagctggtgtaatgttttaccaaatgctttatggaaggcgtccttttggtcatgatcagactcaggagagaatacttcgggaagatacaattatcaatgcacgaagagtggagttcccctcaaagccagctgtatcgaatgaggcgaaggatctgatacgccggtgcttgacatacaaccaatcagagaggccagatgtactaaccataactcaagatcattatctctcgtatgcaaagaagtagccactaccccggagaacattttggcgatggtatctgttcaggcattgagattatggatggggatggataatctcgtggaagagctaagtattaaacaagctcaagaagaccacaaagggtgtataattgtaaattttagtctgccctattacggcaatgacctgaaatccagaaggcatcagttcaaaggccagcttcttttgtaacatagagaaaacatgcattaacgggcccatttaccctttgactgagatctccttgactcgcttgtggcatgcccccgtgcgtaacgcgacggttacttggctggtgggcaatggtcctcttgattttctgtttgctgatactgtcgataaggactgccgaatca

SEQ ID NO: 47696 - DNA, 1209 bp, Zea Mays
atttgtttcattttgccaataaaaaaactgtggtggttcttagataagtaatagctgctgacccatataaaaatgaagtgaatgcataaactgatgctaaatagatttggtgatggtttatacaattatttctcccacatttaccaattggtcagaataggataggttgtcaatgggggaaaaaaggcaggggcaacatgctgttgaccggatttgtatcccatcctctgtctcgacaataacaagcaagttgacaaataaataaataagactcatctgccgcaaactctaatgtatttacttctagcaattctatgtttgatactttctattttgagccacaactgttacagcaagccactacgaatactaataactacaaggatatgttttctcacagaaaacaaaagggcctggtttatctaaacaagaggggccaaaagatcattcactacgatctaaaacctggcaatgttctctttgatgagggaatggaactcacttctcagggagctggaacctattggtatcttcctccagaatgctttgaccttagcaaaacaccatttatttcatctaaggtggatgtttggtcagctggtgtaatgttttaccaaatgctttatggaaggcgtccttttggtcatgatcagactcaggagagaatacttcgggaagatacaattatcaatgcacgaagagtggagttcccctcaaagccagctgtatcgaatgaggcgaaggatctgatacgccggtgcttgacatacaaccaatcagagaggccagatgtactaaccataactcaagatcattatctctcgtatgcaaagaagtagccactaccccggagaacattttggcgatggtatctgttcaggcattgagattatggatggggatggataatctcgtggaagagctaagtattaaacaagctcaagaagaccacaaagggtgtataattgtaaattttagtctgccctattacggcaatgacctgaaatccagaaggcatcagttcaaaggccagcttcttttgtaacatagagaaaacatgcattaacgggcccatttaccctttgactgagatctccttgactcgcttgtggcatgcccccgtgcgtaacgcgacggttacttggctggtgggcaatggtcctcttgattttctgtttgctgatactgtcgataaggactgccgaatca

SEQ ID NO: 47697 - DNA, 2275 bp, Zea Mays
cctggtcgaaccagattaccagaagcccgacgcatttcgaagcctgagtgcccaacttcccccctccgcctgcccccgcgccgccccgtgaaatcaatcaatccaccgcagctcctcgccgccacgccggagcggagctacctgtgtggccgcgccgaactgcccgcttcccgctctctcctcattcgtcacctccgtctcgcgtccccgcgcttatcagagaggcaacagccgccgctgcgtgccccgttcgcggagctatactatacggggagaccggggtccccggcggccgccgcccgttcccaagctacccagggcggattggtttctgtgaatctctgaggcggagaaggccaccccagggccgaacacagtccgggaaccgattggggcgccgctcggccgacgatgtcgtcgagcaggttctcgccggcgctgcaggcgtccgacctcaacgacttcatcgccccatcgcaggactgcatcatctccctcaacaagaacacctcctcctcctcccgccgcccccagaacaaacagaaagaaactacagtgagctcaaaacctccagaagaagcagtcaagatttcactaaaagactgtctggcatgcagtggttgtataacatcggcagagacggttatgctggagaagcaaagcttgggtgacttcattgatcgtataaactctgataaagctgttattgtatctgtatctccccagtcaagagcatcactagctgcattctttggtctttctcagtcacaggttctcagaaaactgacttctttgttcaagtcgattggtgtaaaggctgtttttgacacaagctcgagtcgagatctatctcttattgaagcatgcaatgaatttgtttcacggtatcagagaagtcaaccatctagtggccaagaagctggagccaatcttccactgatttcatctgcatgtccgggttggatatgctatgctgaaaagactcttggttcatacatactaccttacatatcatctgtaaagagcccacaacaggcaattggtgcagccattaagcaccatgtggctgagagacttggtctaaagttaacaaatgttgatgaggaaggccatctatatggggtttctggaggttctgggggctatgcagaaacaatctttcgctatgtagcacatgtaatttacaagagagaaatagagggtcctcttgacttcagaatcctccgaaattcagattttcgtgaaattacactggaggtggagggcaaacctgttttgaagtttgcactttgttatggattcaggaacctgcagaatgttgttaggaagattaagatgggaaaatgtgaataccacttcattgaagttatggcgtgcccttcaggttgtttgaacgggggaggtcaattaaagcctgttgaaggccaatctgccaaggaacttatccagcaattggagagtgtgtacacacaagatatattaatatctgatcctttccgtaaccctatcgcgaaaaaactatatgacgaatggctggggcaacctggttcagagaatgcaaagaagtatttgcacacagaatatcacccagtggtgaagagtgtggcctcacagttacagaactggtgagaggtttcttgttgcactgggagttcctatgttcttcaagagccaggagggacttgcacacagaacaaacatggcgacctgtccatgctaagcaaatattggtcatacaggaattgaaacttgtcccttttttgcattatagcgaagaagtttttgttagccctataggttttcagctgctttctagttaatgttgtacgctgccaacgggaaacaacctttaaactgcaatgtgtaaaatgaacggagtaggtcttgacgaccttttcattgtttgatactcgtcctttggcgtttttttttttgtctggaagatatgcgagctttgttggttatccatatctgtttttaaatgctcaaagaataaaggaactaaatttctaccctaaaaataatattatgttcttaccagcaaattttttatactataatcctctgcagtcatatttacctcatatcttaaccttatatcaactactttatacttactctgcttttttatttatcgtaatttagtatatttactctgtttttttatttatcgtgatttagtttaaaaagtaactagccgactataaatattcaataattattatattatttttaattctcattcatgcacatgtgcccgctagcttccatataa

SEQ ID NO: 47698 - DNA, 2819 bp, Zea Mays
cctggtcgaaccagattaccagaagcccgacgcatttcgaagcctgagtgcccaacttcccccctccgcctgcccccgcgccgccccgtgaaatcaatcaatccaccgcagctcctcgccgccacgccggagcggagctacctgtgtggccgcgccgaactgcccgcttcccgctctctcctcattcgtcacctccgtctcgcgtccccgcgcttatcagagaggcaacagccgccgctgcgtgccccgttcgcggagctatactatacggggagaccggggtccccggcggccgccgcccgttcccaagctacccagggcggattggtttctgtgaatctctgaggcggagaaggccaccccagggccgaacacagtccgggaaccgattggggcgccgctcggccgacgatgtcgtcgagcaggttctcgccggcgctgcaggcgtccgacctcaacgacttcatcgccccatcgcaggactgcatcatctccctcaacaagaacacctcctcctcctcccgccgcccccagaaagaaactacagtgagctcaaaacctccagaagaagcagtcaagatttcactaaaagactgtctggcatgcagtggttgtataacatcggcagagacggttatgctggagaagcaaagcttgggtgacttcattgatcgtataaactctgataaagctgttattgtatctgtatctccccagtcaagagcatcactagctgcattctttggtctttctcagtcacaggttctcagaaaactgacttctttgttcaagtcgattggtgtaaaggctgtttttgacacaagctcgagtcgagatctatctcttattgaagcatgcaatgaatttgtttcacggtatcagagaagtcaaccatctagtggccaagaagctggagccaatcttccactgatttcatctgcatgtccgggttggatatgctatgctgaaaagactcttggttcatacatactaccttacatatcatctgtaaagagcccacaacaggcaattggtgcagccattaagcaccatgtggctgagagacttggtctaaagccgtatcatgtatatcatgtcactgtgatgccctgctacgacaagaagctagaggccgtccgggatgatttcactttctcagtagatggtaaagaagttacagaggtggattcagtactaacaactggtgaagtgttagacttgatacaggttgctacttggttctttttcttgcttgtggtttgtggatttgaaaaacaagggagacacttattatgatttgcatatttctgtagtccaaatcgatcgatttcaagacagtagaggaatcttcattggacagattgtaaggccatgtgcttggtgtttcattctgcgcctgtactcattcatcttctcaagtacaggactattagatagttataatctgtttgactgctacttctgtctacaaactttagctaattttattccaaccacatgttgtgaaaagaaatccatgtaatgatcatttactgtctgtatactatctgaatgtaccatagttcgttttatctgttctggtcgatttatctcagggctgacatgtattttttctttattataacccaggttaacaaatgttgatgaggaaggccatctatatggggtttctggaggttctgggggctatgcagaaacaatctttcgctatgtagcacatgtaatttacaagagagaaatagagggtcctcttgacttcagaatcctccgaaattcagattttcgtgaaattacactggaggtggagggcaaacctgttttgaagtttgcactttgttatggattcaggaacctgcagaatgttgttaggaagattaagatgggaaaatgtgaataccacttcattgaagttatggcgtgcccttcaggttgtttgaacgggggaggtcaattaaagcctgttgaaggccaatctgccaaggaacttatccagcaattggagagtgtgtacacacaagatatattaatatctgatcctttccgtaaccctatcgcgaaaaaactatatgacgaatggctggggcaacctggttcagagaatgcaaagaagtatttgcacacagaatatcacccagtggtgaagagtgtggcctcacagttacagaactggtgagaggtttcttgttgcactgggagttcctatgttcttcaagagccaggagggacttgcacacagaacaaacatggcgacctgtccatgctaagcaaatattggtcatacaggaattgaaacttgtcccttttttgcattatagcgaagaagtttttgttagccctataggttttcagctgctttctagttaatgttgtacgctgccaacgggaaacaacctttaaactgcaatgtgtaaaatgaacggagtaggtcttgacgaccttttcattgtttgatactcgtcctttggcgtttttttttttgtctggaagatatgcgagctttgttggttatccatatctgtttttaaatgctcaaagaataaaggaactaaatttctaccctaaaaataatattatgttcttaccagcaaattttttatactataatcctctgcagtcatatttacctcatatcttaaccttatatcaactactttatacttactctgcttttttatttatcgtaatttagtatatttactctgtttttttatttatcgtgatttagtttaaaaagtaactagccgactataaatattcaataattattatattatttttaattctcattcatgcacatgtgcccgctagcttccatataa

SEQ ID NO: 47699 - DNA, 2742 bp, Zea Mays
cctggtcgaaccagattaccagaagcccgacgcatttcgaagcctgagtgcccaacttcccccctccgcctgcccccgcgccgccccgtgaaatcaatcaatccaccgcagctcctcgccgccacgccggagcggagctacctgtgtggccgcgccgaactgcccgcttcccgctctctcctcattcgtcacctccgtctcgcgtccccgcgcttatcagagaggcaacagccgccgctgcgtgccccgttcgcggagctatactatacggggagaccggggtccccggcggccgccgcccgttcccaagctacccagggcggattggtttctgtgaatctctgaggcggagaaggccaccccagggccgaacacagtccgggaaccgattggggcgccgctcggccgacgatgtcgtcgagcaggttctcgccggcgctgcaggcgtccgacctcaacgacttcatcgccccatcgcaggactgcatcatctccctcaacaagaacacctcctcctcctcccgccgcccccagaacaaacagaaagaaactacagtgagctcaaaacctccagaagaagcagtcaagatttcactaaaagactgtctggcatgcagtggttgtataacatcggcagagacggttatgctggagaagcaaagcttgggtgacttcattgatcgtataaactctgataaagctgttattgtatctgtatctccccagtcaagagcatcactagctgcattctttggtctttctcagtcacaggttctcagaaaactgacttctttgttcaagtcgattggtgtaaaggctgtttttgacacaagctcgagtcgagatctatctcttattgaagcatgcaatgaatttgtttcacggtatcagagaagtcaaccatctagtggccaagaagctggagccaatcttccactgatttcatctgcatgtccgggttggatatgctatgctgaaaagactcttggttcatacatactaccttacatatcatctgtaaagagcccacaacaggcaattggtgcagccattaagcaccatgtggctgagagacttggtctaaagccgtatcatgtatatcatgtcactgtgatgccctgctacgacaagaagctagaggccgtccgggatgatttcactttctcagtagatggtaaagaagttacagaggtggattcagtactaacaactggtgaagtgttagacttgatacagtccaaatcgatcgatttcaagacagtagaggaatcttcattggacagattgtaaggccatgtgcttggtgtttcattctgcgcctgtactcattcatcttctcaagtacaggactattagatagttataatctgtttgactgctacttctgtctacaaactttagctaattttattccaaccacatgttgtgaaaagaaatccatgtaatgatcatttactgtctgtatactatctgaatgtaccatagttcgttttatctgttctggtcgatttatctcagggctgacatgtattttttctttattataacccaggttaacaaatgttgatgaggaaggccatctatatggggtttctggaggttctgggggctatgcagaaacaatctttcgctatgtagcacatgtaatttacaagagagaaatagagggtcctcttgacttcagaatcctccgaaattcagattttcgtgaaattacactggaggtggagggcaaacctgttttgaagtttgcactttgttatggattcaggaacctgcagaatgttgttaggaagattaagatgggaaaatgtgaataccacttcattgaagttatggcgtgcccttcaggttgtttgaacgggggaggtcaattaaagcctgttgaaggccaatctgccaaggaacttatccagcaattggagagtgtgtacacacaagatatattaatatctgatcctttccgtaaccctatcgcgaaaaaactatatgacgaatggctggggcaacctggttcagagaatgcaaagaagtatttgcacacagaatatcacccagtggtgaagagtgtggcctcacagttacagaactggtgagaggtttcttgttgcactgggagttcctatgttcttcaagagccaggagggacttgcacacagaacaaacatggcgacctgtccatgctaagcaaatattggtcatacaggaattgaaacttgtcccttttttgcattatagcgaagaagtttttgttagccctataggttttcagctgctttctagttaatgttgtacgctgccaacgggaaacaacctttaaactgcaatgtgtaaaatgaacggagtaggtcttgacgaccttttcattgtttgatactcgtcctttggcgtttttttttttgtctggaagatatgcgagctttgttggttatccatatctgtttttaaatgctcaaagaataaaggaactaaatttctaccctaaaaataatattatgttcttaccagcaaattttttatactataatcctctgcagtcatatttacctcatatcttaaccttatatcaactactttatacttactctgcttttttatttatcgtaatttagtatatttactctgtttttttatttatcgtgatttagtttaaaaagtaactagccgactataaatattcaataattattatattatttttaattctcattcatgcacatgtgcccgctagcttccatataa

SEQ ID NO: 47700 - DNA, 2548 bp, Zea Mays
cctggtcgaaccagattaccagaagcccgacgcatttcgaagcctgagtgcccaacttcccccctccgcctgcccccgcgccgccccgtgaaatcaatcaatccaccgcagctcctcgccgccacgccggagcggagctacctgtgtggccgcgccgaactgcccgcttcccgctctctcctcattcgtcacctccgtctcgcgtccccgcgcttatcagagaggcaacagccgccgctgcgtgccccgttcgcggagctatactatacggggagaccggggtccccggcggccgccgcccgttcccaagctacccagggcggattggtttctgtgaatctctgaggcggagaaggccaccccagggccgaacacagtccgggaaccgattggggcgccgctcggccgacgatgtcgtcgagcaggttctcgccggcgctgcaggcgtccgacctcaacgacttcatcgccccatcgcaggactgcatcatctccctcaacaagaacacctcctcctcctcccgccgcccccagaacaaacagaaagaaactacagtgagctcaaaacctccagaagaagcagtcaagatttcactaaaagactgtctggcatgcagtggttgtataacatcggcagagacggttatgctggagaagcaaagcttgggtgacttcattgatcgtataaactctgataaagctgttattgtatctgtatctccccagtcaagagcatcactagctgcattctttggtctttctcagtcacaggtaacaacatgggcttgccatatccattcccctgtcagaatcatggtagatacgctcttacaagtgtttaccgttctcagaaaactgacttctttgttcaagtcgattggtgtaaaggctgtttttgacacaagctcgagtcgagatctatctcttattgaagcatgcaatgaatttgtttcacggtatcagagaagtcaaccatctagtggccaagaagctggagccaatcttccactgatttcatctgcatgtccgggttggatatgctatgctgaaaagactcttggttcatacatactaccttacatatcatctgtaaagagcccacaacaggcaattggtgcagccattaagcaccatgtggctgagagacttggtctaaagccgtatcatgtatatcatgtcactgtgatgccctgctacgacaagaagctagaggccgtccgggatgatttcactttctcagtagatggtaaagaagttacagaggtggattcagtactaacaactggtgaagtgttagacttgatacagtccaaatcgatcgatttcaagacagtagaggaatcttcattggacagattgttaacaaatgttgatgaggaaggccatctatatggggtttctggaggttctgggggctatgcagaaacaatctttcgctatgtagcacatgtaatttacaagagagaaatagagggtcctcttgacttcagaatcctccgaaattcagattttcgtgaaattacactggaggtggagggcaaacctgttttgaagtttgcactttgttatggattcaggaacctgcagaatgttgttaggaagattaagatgggaaaatgtgaataccacttcattgaagttatggcgtgcccttcaggttgtttgaacgggggaggtcaattaaagcctgttgaaggccaatctgccaaggaacttatccagcaattggagagtgtgtacacacaagatatattaatatctgatcctttccgtaaccctatcgcgaaaaaactatatgacgaatggctggggcaacctggttcagagaatgcaaagaagtatttgcacacagaatatcacccagtggtgaagagtgtggcctcacagttacagaactggtgagaggtttcttgttgcactgggagttcctatgttcttcaagagccaggagggacttgcacacagaacaaacatggcgacctgtccatgctaagcaaatattggtcatacaggaattgaaacttgtcccttttttgcattatagcgaagaagtttttgttagccctataggttttcagctgctttctagttaatgttgtacgctgccaacgggaaacaacctttaaactgcaatgtgtaaaatgaacggagtaggtcttgacgaccttttcattgtttgatactcgtcctttggcgtttttttttttgtctggaagatatgcgagctttgttggttatccatatctgtttttaaatgctcaaagaataaaggaactaaatttctaccctaaaaataatattatgttcttaccagcaaattttttatactataatcctctgcagtcatatttacctcatatcttaaccttatatcaactactttatacttactctgcttttttatttatcgtaatttagtatatttactctgtttttttatttatcgtgatttagtttaaaaagtaactagccgactataaatattcaataattattatattatttttaattctcattcatgcacatgtgcccgctagcttccatataa

SEQ ID NO: 47701 - DNA, 2438 bp, Zea Mays
cctggtcgaaccagattaccagaagcccgacgcatttcgaagcctgagtgcccaacttcccccctccgcctgcccccgcgccgccccgtgaaatcaatcaatccaccgcagctcctcgccgccacgccggagcggagctacctgtgtggccgcgccgaactgcccgcttcccgctctctcctcattcgtcacctccgtctcgcgtccccgcgcttatcagagaggcaacagccgccgctgcgtgccccgttcgcggagctatactatacggggagaccggggtccccggcggccgccgcccgttcccaagctacccagggcggattggtttctgtgaatctctgaggcggagaaggccaccccagggccgaacacagtccgggaaccgattggggcgccgctcggccgacgatgtcgtcgagcaggttctcgccggcgctgcaggcgtccgacctcaacgacttcatcgccccatcgcaggactgcatcatctccctcaacaagaacacctcctcctcctcccgccgcccccagaacaaacagaaagaaactacagtgagctcaaaacctccagaagaagcagtcaagatttcactaaaagactgtctggcatgcagtggttgtataacatcggcagagacggttatgctggagaagcaaagcttgggtgacttcattgatctcacaggtaacaacatgggcttgccatatccattcccctgtcagaatcatggttctcagaaaactgacttctttgttcaagtcgattggtgtaaaggctgtttttgacacaagctcgagtcgagatctatctcttattgaagcatgcaatgaatttgtttcacggtatcagagaagtcaaccatctagtggccaagaagctggagccaatcttccactgatttcatctgcatgtccgggttggatatgctatgctgaaaagactcttggttcatacatactaccttacatatcatctgtaaagagcccacaacaggcaattggtgcagccattaagcaccatgtggctgagagacttggtctaaagccgtatcatgtatatcatgtcactgtgatgccctgctacgacaagaagctagaggccgtccgggatgatttcactttctcagtagatggtaaagaagttacagaggtggattcagtactaacaactggtgaagtgttagacttgatacagtccaaatcgatcgatttcaagacagtagaggaatcttcattggacagattgttaacaaatgttgatgaggaaggccatctatatggggtttctggaggttctgggggctatgcagaaacaatctttcgctatgtagcacatgtaatttacaagagagaaatagagggtcctcttgacttcagaatcctccgaaattcagattttcgtgaaattacactggaggtggagggcaaacctgttttgaagtttgcactttgttatggattcaggaacctgcagaatgttgttaggaagattaagatgggaaaatgtgaataccacttcattgaagttatggcgtgcccttcaggttgtttgaacgggggaggtcaattaaagcctgttgaaggccaatctgccaaggaacttatccagcaattggagagtgtgtacacacaagatatattaatatctgatcctttccgtaaccctatcgcgaaaaaactatatgacgaatggctggggcaacctggttcagagaatgcaaagaagtatttgcacacagaatatcacccagtggtgaagagtgtggcctcacagttacagaactggtgagaggtttcttgttgcactgggagttcctatgttcttcaagagccaggagggacttgcacacagaacaaacatggcgacctgtccatgctaagcaaatattggtcatacaggaattgaaacttgtcccttttttgcattatagcgaagaagtttttgttagccctataggttttcagctgctttctagttaatgttgtacgctgccaacgggaaacaacctttaaactgcaatgtgtaaaatgaacggagtaggtcttgacgaccttttcattgtttgatactcgtcctttggcgtttttttttttgtctggaagatatgcgagctttgttggttatccatatctgtttttaaatgctcaaagaataaaggaactaaatttctaccctaaaaataatattatgttcttaccagcaaattttttatactataatcctctgcagtcatatttacctcatatcttaaccttatatcaactactttatacttactctgcttttttatttatcgtaatttagtatatttactctgtttttttatttatcgtgatttagtttaaaaagtaactagccgactataaatattcaataattattatattatttttaattctcattcatgcacatgtgcccgctagcttccatataa

SEQ ID NO: 47702 - DNA, 2426 bp, Zea Mays
cctggtcgaaccagattaccagaagcccgacgcatttcgaagcctgagtgcccaacttcccccctccgcctgcccccgcgccgccccgtgaaatcaatcaatccaccgcagctcctcgccgccacgccggagcggagctacctgtgtggccgcgccgaactgcccgcttcccgctctctcctcattcgtcacctccgtctcgcgtccccgcgcttatcagagaggcaacagccgccgctgcgtgccccgttcgcggagctatactatacggggagaccggggtccccggcggccgccgcccgttcccaagctacccagggcggattggtttctgtgaatctctgaggcggagaaggccaccccagggccgaacacagtccgggaaccgattggggcgccgctcggccgacgatgtcgtcgagcaggttctcgccggcgctgcaggcgtccgacctcaacgacttcatcgccccatcgcaggactgcatcatctccctcaacaagaacacctcctcctcctcccgccgcccccagaacaaacagaaagaaactacagtgagctcaaaacctccagaagaagcagtcaagatttcactaaaagactgtctggcatgcagtggttgtataacatcggcagagacggttatgctggagaagcaaagcttgggtgacttcattgatcgtataaactctgataaagctgttattgtatctgtatctccccagtcaagagcatcactagctgcattctttggtctttctcagtcacaggttctcagaaaactgacttctttgttcaagtcgattggtgtaaaggctgtttttgacacaagctcgagtcgagatctatctcttattgaagcatgcaatgaatttgtttcacggtatcagagaagtcaaccatctagtggccaagaagctggagccaatcttccactgatttcatctgcatgtccgggttggatatgctatgctgaaaagactcttggttcatacatactaccttacatatcatctgtaaagagcccacaacaggcaattggtgcagccattaagcaccatgtggctgagagacttggtctaaagccgtatcatgtatatcatgtcactgtgatgccctgctacgacaagaagctagaggccgtccgggatgatttcactttctcagtagatggtaaagaagttacagaggtggattcagtactaacaactggtgaagtgttagacttgatacaggttaacaaatgttgatgaggaaggccatctatatggggtttctggaggttctgggggctatgcagaaacaatctttcgctatgtagcacatgtaatttacaagagagaaatagagggtcctcttgacttcagaatcctccgaaattcagattttcgtgaaattacactggaggtggagggcaaacctgttttgaagtttgcactttgttatggattcaggaacctgcagaatgttgttaggaagattaagatgggaaaatgtgaataccacttcattgaagttatggcgtgcccttcaggttgtttgaacgggggaggtcaattaaagcctgttgaaggccaatctgccaaggaacttatccagcaattggagagtgtgtacacacaagatatattaatatctgatcctttccgtaaccctatcgcgaaaaaactatatgacgaatggctggggcaacctggttcagagaatgcaaagaagtatttgcacacagaatatcacccagtggtgaagagtgtggcctcacagttacagaactggtgagaggtttcttgttgcactgggagttcctatgttcttcaagagccaggagggacttgcacacagaacaaacatggcgacctgtccatgctaagcaaatattggtcatacaggaattgaaacttgtcccttttttgcattatagcgaagaagtttttgttagccctataggttttcagctgctttctagttaatgttgtacgctgccaacgggaaacaacctttaaactgcaatgtgtaaaatgaacggagtaggtcttgacgaccttttcattgtttgatactcgtcctttggcgtttttttttttgtctggaagatatgcgagctttgttggttatccatatctgtttttaaatgctcaaagaataaaggaactaaatttctaccctaaaaataatattatgttcttaccagcaaattttttatactataatcctctgcagtcatatttacctcatatcttaaccttatatcaactactttatacttactctgcttttttatttatcgtaatttagtatatttactctgtttttttatttatcgtgatttagtttaaaaagtaactagccgactataaatattcaataattattatattatttttaattctcattcatgcacatgtgcccgctagcttccatataa

SEQ ID NO: 47703 - DNA, 887 bp, Zea Mays
atctccttcgaagtcagagatttccgtgtttgggagatgaatatgtgtttgtaagatacaacccacacaattttccgcatgtaactgtaaaacgctgcttggatcaacgctgttgcctgttttccctagctggtatccacatgcttacgttcttcactgcctcaactcaatccgtgaagacaaatactggagctggtgaacctccaggctccagccccatcaatttaactgtgaaccgtggaaaacagacataagcgacatatttgtcacctctgcagtttcacaaaaaataattttggtggtgcactctacgatagtcagcttctccccataattagataagagaaaagaatcatcgcttccattttttttcaaccctcagcaatcactacgtctacccaagaaaaccgactcctcttgtataccagtagtctacgtaaatgctctacctaggccacccaagcctttgaatcttacaatcaatcatcgccgcctccatcgtcagcatccatatcagcatcatcgtcgtcccctgcgtctgcatggtcggcagcatcatcgacattcatgagctcctgccttacaacttcttggttgatctcttccagtactcgagcattcagctctggcggaggacgcctttccaccttcatagtcttcaggttatcctctgcaaagaatgcggtcaatggcttggggacctgcaaaacgtgcgtagtttggactcatccagatgctttactctttcatgctaaggaaacaataatagcagcagtcacaaacacaccttgaataagcagtttcgctccttggcactctcaacaaggttgttccagtgtttatcttgcttcaatgttgaagcagaacctacaacctgcggcatgcag

SEQ ID NO: 47704 - DNA, 1177 bp, Zea Mays
cttttatgtgtttccccgtttcgttgttttcggttctcctttgcctttgtttcccttttctgttctttaggggttgagctctgaggttttcatacggggtttcatctctagcctaccccaacgtgcttgggacaaaaaggctttgttgttgttgttgttgttgttgtatatgaacggctatatcaagccaagcgcccaagccaatgtagcgctgcagataaggttttggattggaccaagcataggctcgacttgaaccaagaacaaggtacgtaggagcaatccaaagcacccattgcacgcttctgcattgcagaggtagtagcaaggaggatcagcaatgtcttcccctccgccgcctccgatgtccactctgcacaagtgctgctcgtcgccgtcgcagccatcacctaagctaccgcctaagctgcagcgagctccggacagcaggcacaggcctatctagcaggcggcggagccaggctgtcggtcaccaggagagctcacgccgcctccctcctcctcctcggcctggcgggcggtgcggtgccggcgccggtcagggcggcggaggacgacgggagcagcggaggggagggcgtcctcggcgccatcaagtccatcttcgaccccaacgagacgaccaaggccgggaaggtgctgcccaaggcgtacctcaaggcggccagggaggtggtgcgcacgctccgcgagtcgctggaggaggacgacggtggcgacatggccaggttccgccgcaacgccgacgccgccaaggagtccatcagggcgttcctgggcgggtggaggggccagcaggccgtcgccgacgaggagtcgtacgtcgcgctggagaaggcgatcaggtcgctggccgagttctactccaaggcagggccgtccgcctcgcttccacaggacgtcaagaacaagatcctcgatgacctcagcgccgcagacgcctacctgtagattttgcttctcctcagggacattgtattgcattgcatgcaacgcacatctcaaacgatgatatggtttcgctctagtataatgacccgcaaaagctttccttcacaggaagaacacacacattccaacacgatgcaaaacgaaacattaacagggtttaggtaaccaattccgcgtgacggatcaggcggactatttctagctt

SEQ ID NO: 47705 - DNA, 1740 bp, Zea Mays
gccttcgccctttggggtttgggctttccaagctttcaaccttccggactctcctacatgacactggtatctgggccccatgtgctaactgcctgtaaaccctaatcccgaatccctcccggcctcctccgtctcgcgctcgattcgaatccgagctccctatcctgctgctcctgctgttcccgctgcaatggaggacaacgcggtcgaagagcccgagttgagcggtgcggcggagttcgcgccggcgctcgtcgccgcccacccacacggcaactccgtcgccgtcgccatcgggcccgagctccgcgtgtttgatctcagggctggtcatccagtttcattgtcagatgattgtggtggccattctcattcagacgcaataagagctatctgcttcagtgtgagtggagctttgtttgcttcagctggtgatgacaaacttgtgaaggtttggaagactgattcgtggcgttgcatccagactataacttcggagaagagggtcagtgcagttgttattagcaacgatgacctgtatgtatcttttgcagataaatttggtgttgtttggttagtcactttgcgggaagatagtgcagagcaggtttcagttgataacaaacctgtgtcaattcttggtcactattgcagtatcatcactagcatgaagttttcgccagatggacggttcattgctactgctgatagggacttcaaaatacgagtcacattattcccaaagaatcctctaaaaggggcccatgaaatacagagcttttgccttgggcatacagactttgtatcatgcatcaccttcactagcatatctgaaaaccagagttttcttatatcaggaggaggtgattcaactgttcgcctgtgggactatgtaaatggatgtctccttgatacatttcaagccaaagataagagctacttgcagatggcagaactcttaggaccaaatgaaacagatgatagcagcctagccattacagatatatgtccgagtaatgatggctcattggttgctgtagctattcaaagtttcagtggcataatgcttttagcatgtgatttggtaggaaagaagctatctttcctaaaggtgattacaatggaaaagagttatattcctactagcctagcatccagcccgtcctcggaactcctgtggactgtcatgggcgcatcaaacatgcccagccaggcttcctcccatctattgacccgtttaaggatcatcacgtgtttccaaaaggacagattatcttcttccgatgccggtcctgcaacccttgaagacggcgatgtaccccacggtgagaagctccttctggcactgcaaggaagcctcgacgtcgcgaagcaagaggaggtgctagcttcagtgctggctgcgctgaaggtttccatgcataagatgctggtgaagaagcactactcggaagagaggagggagcagaggaaaagaggtaggaacgacaagaagatgaagaactagctgaaaagaggatgaagaactagctcagcatgcggtatcgagttgctataacggttctcttttttgtttgtttgtttttttagagaaacaaaaacagatattactgtagtatcagaaaccgtaagagtaataaatttgccaggatttttcttttcttagtacgagcgtattgtaacagtaattcatgcttatcgctcccagtaaaactgcagcagcttttgcgtctccttgtc

SEQ ID NO: 47706 - DNA, 1552 bp, Zea Mays
gattttgctgctgcgcctgccaagcacctgtcgacagcaaatctaccctgccttggcgccaacagaccgccggaatctaccgctgccgtgcgtgggccgtgggctccaacgccagaccagcggatggccggcggtaacacacagcacaaggagctcgcggccgatcgagctgcgttgcgagggcagagaaagagatgggcagtgcagtgacgaagataaggacccgccctttggaagtgcacacacacaaaccaacactgacatcacagcgggttcaggggaggaggagagggagagacttctttaagatcaccacaccctcccctcacccctcctcctcattgtcatctctccctctctctctctctctctccattgcactcgctctatactaggtccaaggtaactagcaattgagctattaaattgttgcttgaggtgcagcagaaaggcacactgctacaaacaagctgatcagctgatgcccggtggcttcaggactttgccaagagcgtatagttagttggtcttggattcttggtccggtgctgccgccgccatgttcctgagatcgaagatccaggagatgatcctgcggaggagatcgaggtcgatgaacagcgccggcgcgcagaggggccacgtccccgatcaggccccgagctcgtcgaccgttccggcgccggcgtcgtcgccttcgccaggagccccgcggcggagcccgagcccgagacggcctcctccctgagcccgacctccgtgctggacgcggcggcggcctacgtgccacgcacgggcaagcggcgccgcccgtggcgcgcgcgggacaacaacggcggcctcgcggacgtgctggactgcaccgatgaccagcagcaggagcggatcgtcctcgcggctacgtcgtcctcgcgctctctgctcaggtcgtgctccctggaccgccgcgtcgagttcggcgtcaagaacaagagctcgtggctgcccctccgcggccgcggcgagcccgcggcgccggcgccggccgacccgcgcgagatcgggccgtcgtcggaggactacacgtgcgtcatctcccgcgggcccaacccgaggacggtgcacatcttcggcgaccgcgtcgtggaggcggaggcggagacggagacggagagctcgccgcggccgatcagtctgccgacgcgaacggatccccgtccacgcacgcgtagcctgatgagtgatgacgccgcctagctaggtaaagaaaccgaatttaattagctgagtgctattattgagttcaggcagccttgatgttgctgtattgtattggttgctccgatccgttccatcgtctgatcagaaagatagatagagttgatcattcataggtgttttcttgatcagatgatgaactagacgttttgtccaggttgagctgaagctgtgatataaatttgatcatgttgttactaggggggaaaaaaagaagaagaagtgcaaattcagctcccagtggctgaactgcgcctcgatctgtgatgaattttgtctccaagctcgtttctgc

SEQ ID NO: 47707 - DNA, 1562 bp, Zea Mays
gattttgctgctgcgcctgccaagcacctgtcgacagcaaatctaccctgccttggcgccaacagaccgccggaatctaccgctgccgtgcgtgggccgtgggctccaacgccagaccagcggatggccggcggtaacacacagcacaaggagctcgcggccgatcgagctgcgttgcgagggcagagaaagagatgggcagtgcagtgacgaagataaggacccgccctttggaagtgcacacacacaaaccaacactgacatcacagcgggttcaggggaggaggagagggagagacttctttaagatcaccacaccctcccctcacccctcctcctcattgtcatctctccctctctctctctctctctccattgcactcgctctatactaggtccaaggactttgccaagctctccgcctcgtccatggcgtcgcagccctcaagacttgctgtctcttggtagctgccgcttctagctactccacctaactgaaagagcgtatagttagttggtcttggattcttggtccggtgctgccgccgccatgttcctgagatcgaagatccaggagatgatcctgcggaggagatcgaggtcgatgaacagcgccggcgcgcagaggggccacgtccccgatcaggccccgagctcgtcgaccgttccgtgcgacgatgacagtgccggcgccggcgtcgtcgccttcgccaggagccccgcggcggagcccgagcccgagacggcctcctccctgagcccgacctccgtgctggacgcggcggcggcctacgtgccacgcacgggcaagcggcgccgcccgtggcgcgcgcgggacaacaacggcggcctcgcggacgtgctggactgcaccgatgaccagcagcaggagcggatcgtcctcgcggctacgtcgtcctcgcgctctctgctcaggtcgtgctccctggaccgccgcgtcgagttcggcgtcaagaacaagagctcgtggctgcccctccgcggccgcggcgagcccgcggcgccggcgccggccgacccgcgcgagatcgggccgtcgtcggaggactacacgtgcgtcatctcccgcgggcccaacccgaggacggtgcacatcttcggcgaccgcgtcgtggaggcggaggcggagacggagacggagagctcgccgcggccgatcagtctgccgacgcgaacggatccccgtccacgcacgcgtagcctgatgagtgatgacgccgcctagctaggtaaagaaaccgaatttaattagctgagtgctattattgagttcaggcagccttgatgttgctgtattgtattggttgctccgatccgttccatcgtctgatcagaaagatagatagagttgatcattcataggtgttttcttgatcagatgatgaactagacgttttgtccaggttgagctgaagctgtgatataaatttgatcatgttgttactaggggggaaaaaaagaagaagaagtgcaaattcagctcccagtggctgaactgcgcctcgatctgtgatgaattttgtctccaagctcgtttctgc

SEQ ID NO: 47708 - DNA, 698 bp, Zea Mays
atttgaccatgcagaccgcttattcaacagtgtgagggataacatgggaaaaagaaaaaaagatgggcgacgccatgcttcttttcgcgcagtccccggttctccgtcggcctgttgaggcggttgcgtggcttctgggccgtcttcttcgcgtcctgttcacgttgctgcgcctgagagcggcccacagctacaggaggtcggcgcggcgtacgctggaagacttcattcaggttggtgatattgttttgccacctccaccttgggctaaaggcagttgccagagaattcattaggaagcatcggcgggaagcactggaatcggattacgtatctgagaatctgcaccattggactgatcttatttttggatataagcagagaggaaaggtaataagcatctctacacttgcatttgatccccagcagtgctgttgtagtacaaatatgttttggtttgaaataaggatagtgtcttctttttactcttgaacatatatacaggatctgtgaacacaaactgagctgttatttttgccttcttattgaagtgtcttctatctagccaccagttcattatttgactgccgagcaatttgacagctggttcttcgtcttgtgtgcgcggtaatacagtaacgtgtcgtgataacattgtcgctgttggtctcgtggcatcttccgaaggtagatgcgag

SEQ ID NO: 47709 - DNA, 503 bp, Zea Mays
tgcagaccgcttattcaacagtgtgagggataacatgggttggtgatattgttttgccacctccaccttgggctaaaggcagttgccagagaattcattaggaagcatcggcgggaagcactggaatcggattacgtatctgagaatctgcaccattggactgatcttatttttggatataagcagagaggaaaggtaataagcatctctacacttgcatttgatccccagcagtgctgttgtagtacaaatatgttttggtttgaaataaggatagtgtcttctttttactcttgaacatatatacaggatctgtgaacacaaactgagctgttatttttgccttcttattgaagtgtcttctatctagccaccagttcattatttgactgccgagcaatttgacagctggttcttcgtcttgtgtgcgcggtaatacagtaacgtgtcgtgataacattgtcgctgttggtctcgtggcatcttccgaaggtagatgcgag

SEQ ID NO: 47710 - DNA, 634 bp, Zea Mays
aaaaatcgtaaccctaactgggatcgatggggtccgaaggaggctccgcagggatctcagtcgtggggtaagaatcggaatctcagctggcggttgaagcctggatccggaaaacctgatggcaaagatgacatccctgtctccgctcccggcgatgtcggtcagccaggttggtgatattgttttgccacctccaccttgggctaaaggcagttgccagagaattcattaggaagcatcggcgggaagcactggaatcggattacgtatctgagaatctgcaccattggactgatcttatttttggatataagcagagaggaaaggtaataagcatctctacacttgcatttgatccccagcagtgctgttgtagtacaaatatgttttggtttgaaataaggatagtgtcttctttttactcttgaacatatatacaggatctgtgaacacaaactgagctgttatttttgccttcttattgaagtgtcttctatctagccaccagttcattatttgactgccgagcaatttgacagctggttcttcgtcttgtgtgcgcggtaatacagtaacgtgtcgtgataacattgtcgctgttggtctcgtggcatcttccgaaggtagatgcgag

SEQ ID NO: 47711 - DNA, 1481 bp, Zea Mays
atcaccatgtgcatggtgtgttgagctagctgcctgtcgcgccgtgggagccgatcgagagcgtgtgagcccggcctcttctgcgcggcggcggatggaccggatcggaggaatggtgtggtgtgagttgagtgaagtgcccaagataaagggtgaagctgccagcatgatctaacgacggcattgctctgctgctgcagtgaggcttgcgagtgatggttagatcatgctgtgacagtttcactctttccctttgggcacatcgatctcttcccctcctctctctctttcaattctctccccttttgcaatcagactcgtcactcgcgcacaaattccaccactcgccaccctccgtatgggaggcaatcgtcggggatttccggcccaaccacaggttgcacagcctccgtgtcaggaatgccacaccggcctttggaaggcccacggagcggctttgacgggcagaaatagaaaggaaaaaaaaaaacacgacacctcccccctctgcgccgccctcacccaccgccgtcgccacctctctcaccgcggaacaagacgctgaggaagaagagccggtacggagacggcaagaagacgcggagcagtacgtacgtctccgatctggatgttggtaaggttcttcctgatttgaacgacaagctcactgataatgagttcctgggaggcgaaagctagacagtttctgttagaggaggaaaaagaggatgatgaactcttcttagtaattgtccctgctgttctcttggccatgcaagaagagaaaaggtcagtccgtaccagaagtacgtcagcacatggaagcgcgaaaaagcggaagaaaaatcatgttgcaagtgttctggaagactatttggagcacaggaagaagcaaacggagaagactgtagaggcgttacttgagatgaagagtcgtgaagaggagtactctattgagaggtgtcttgacatagttgatgcattggaggagttgacggatgaggagaaggccgctgcagcagaggtgttcaagaatgaagtgaatcgggagatgtttgtgattgcgaagcaaaaaattccaaatgtggggttgatttggcttcggaggaagataagtaggattgcatctacctgagatggataaggtgcgactgatggagtgatggctcattgagttgcttgctgtgtgcgtgcgcatttgttttctatgcccgacgatgagtagcttgttgtggtgcctgatccaagagctcacaccagtttattcagttcagttcagagcttgcatgctccatataagcagaccgctgcatgctatgtgttgttaagcagactgctacattctatacggagtttgcatgctccatgtactgttgcatgccacttgttgctgatcgaaaattttagtttgcgaactacatgttgaggacagatattttgtaaactgctactagcactgatgcatgcttgcactgcagttt

SEQ ID NO: 47712 - DNA, 1123 bp, Zea Mays
caattctctccccttttgcaatcagactcgtcactcgcgcacaaattccaccactcgccaccctccgtatgggaggcaatcgtcggggatttccggcccaaccacaggttgcacagcctccgtgtcaggaatgccacaccggcctttggaaggcccacggagcggctttgacgggcagaaatagaaaggaaaaaaaaaaacacgacacctcccccctctgcgccgccctcacccaccgccgtcgccacctctctcaccgcggaacaagacgctgaggaagaagagccggtacggagacggcaagaagacgcggagcagtacgtacgtctccgatctggtgagcttccacccttttttgcagcacttgagcgtcagccgagattagcgaggtagtgcgcacgtcttcaggtactcgatcaacacatccagcgatcatgaagggtagagcgcgtggcgcggctagaacgttggctatgggggatggcatggcgggagtggcgttcggtgccgcgcggcatgtggggctgttgtttgttcccagtcctgtttgtcgtcttcctctaaatatgcaatacagacaacagaaaacgctgccgttagcagcaccaaaacctttcctgcgtgtttcgcgtgagcgtgttctgcgttcccaggttcatcgccggcggtcatctccggtgagctccaacaaagttgtagaaatgtttggtttgtatccacactagccctgtcaactcgaatcctctttagatcacctggatcccacctcccaggtggatcctgtcctgacaatgacaatttgctaaaactgaagcacgcacgtatattgaaggagagcgattgtatgtccaggggactcttgctgtgcatggcgattgatttgtctttgtgtccttttttcatgaagtgtactggttttagctgcaactctgcttgaattgcagtaaattactctacagaggagctgctataatatttgtttccaaaaatctgagatgtaatatgtgtactgagaaataagttggatgcataaattaggtgtttcgtttgtaaagcaaaaggcttggttggtgtgaaagtagcacaataaagcatctgactgccttatcttactgtttttttt

SEQ ID NO: 47713 - DNA, 1422 bp, Zea Mays
gcgcaccccgcgcctcgccggagctccgccgccgccgctgtccgattccgcagcagagaagccaccaacaccgccgcacgtccgtggattgtcctcagatacgcctccccgcgccgcgtcttcctgaggccgaggctccgacgcagccgaacccgtgcatcccacgggtccggaggaggaagaggaggagggaggagctgctgctcggcggccgcccaggacgagcctaagggatgagggccgcgaggcggttggcccgcgtgcggcgggaggcgcttgccgcgtgcatgacgtgcccgctctgccggggacttctcagggaggccaccgccgtagccctgtgcctccacacattttgccgggactgcattgtggagaaaataaatgatgacgacgctgactgttgcccagtctgcaacattgatcttggctgcgatcctgaagagaaactcaggcctgaccacaaccttcaagatatcaggaataaggtatttccaattaaaaagataaatgctgattctccaaagtctctaacaacattgccagcaaagagaaaacaaaggtccctttcttccttggtggttgacactccaaggagcgtagtaaagcggactggtttgactggaaagagaaccaaagctaaaagaaagacagtagcttctagtgcagcttctcccatcaataatggaaccatgcaattaccaactaaatttgaaaatcgagatcagaagactgataaaagttgtgcatcacaatctaccaatgtagcatcagctgcaaacaaaactgaaaatcaagatctaaagaagaccaggaaaacttcggcaaaacagtcgaccagggcagcaacatcagcaaacagaaaacagcaaaatacagatgtagatgtttcaagtaaaccatcttctgaaaatagaaagaatggcacgacagctgacaaggatgagctccgtaagtattcaaaaatacctaggtcaactcccaaaatccatgctgtcaatgaagagcaaataaaaaagaaagaggacgaactccctacaaggaaagcagaggcagacaacaaagtggttattcctgggacaactgtgagagaacattcaaataactcaaatcttaaagagaaagataacggcagttctccagaatcttcaccattgaaagacaaaacaacagcagacgatgattcgtaccaatgtttgcttggttctgcaagcgatgtgcgtgatccaataactactccggtgtggttcttgttaatttctttgcctaaccagaaagaagatccacaactgcctcagttatcaaagagttacatgagaatcaaagaccgcagtttgcagatttcttctgtacagaggtacatcatgaagaagctggatctagctaatgaaaacgagagagattgcttaagggtgtggagcg

SEQ ID NO: 47714 - DNA, 1832 bp, Zea Mays
gcgcaccccgcgcctcgccggagctccgccgccgccgctgtccgattccgcagcagagaagccaccaacaccgccgcacgtccgtggattgtcctcagatacgcctccccgcgccgcgtcttcctgaggccgaggctccgacgcagccgaacccgtgcatcccacgggtccggaggaggaagaggaggagggaggagctgctgctcggcggccgcccaggacgagcctaagggatgagggccgcgaggcggttggcccgcgtgcggcgggaggcgcttgccgcgtgcatgacgtgcccgctctgccggggacttctcagggaggccaccgccgtagccctgtgcctccacacattttgccgggactgcattgtggagaaaataaatgatgacgacgctgactgttgcccagtctgcaacattgatcttggctgcgatcctgaagagaaactcaggcctgaccacaaccttcaagatatcaggaataaggtatttccaattaaaaagataaatgctgattctccaaagtctctaacaacattgccagcaaagagaaaacaaaggtccctttcttccttggtggttgacactccaaggagcgtagtaaagcggactggtttgactggaaagagaaccaaagctaaaagaaagacagtagcttctagtgcagcttctcccatcaataatggaaccatgcaattaccaactaaatttgaaaatcgagatcagaagactgataaaagttgtgcatcacaatctaccaatgtagcatcagctgcaaacaaaactgaaaatcaagatctaaagaagaccaggaaaacttcggcaaaacagtcgaccagggcagcaacatcagcaaacagaaaacagcaaaatacagatgtagatgtttcaagtaaaccatcttctgaaaatagaaagaatggcacgacagctgacaaggatgagctccgtaagtattcaaaaatacctaggtcaactcccaaaatccatgctgtcaatgaagagcaaataaaaaagaaagaggacgaactccctacaaggaaagcagaggcagacaacaaagtggttattcctgggacaactgtgagagaacattcaaataactcaaatcttaaagagaaagataacggcagttctccagaatcttcaccattgaaagacaaaacaacagcagacgatgattcgtaccaatgtttgcttggttctgcaagcgatgtgcgtgatccaataactactccggaaagaagatccacaactgcctcagttatcaaagagttacatgagaatcaaagaccgcagtttgcagatttcttctgtacagaggtacatcatgaagaagctggatctagctaatgaaaacgaggtggagatcatctgccacggcgagccaatctgcccctcgagcacgctgcatgggctgatggaactgtggcatcgtagacagccggcagagcccgtggaggcattggtgggtgcgccagccaaggagttcgtcatagagctgggcttccgtcgccgccgccacccttatttggcgcccggcaccgtcgcggtgcctccggagccctcctgatcagcttgcaagggtggctccgctccgctgtggagcctgagctgcactcttccgtccgtcgtccgctcttgtcctcggtcctccatccccaaccagtttagccgtgtatgataaaacagttttcttttactcatttcagacttttcttttactcattttatgtatacaagcgaggcggcttttgttctgacttttccttgtgccaagcaaagccgacgcagcggtgttgactttgaccatctgttgttgaagcccgg

SEQ ID NO: 47715 - DNA, 1884 bp, Zea Mays
gcgcaccccgcgcctcgccggagctccgccgccgccgctgtccgattccgcagcagagaagccaccaacaccgccgcacgtccgtggattgtcctcagatacgcctccccgcgccgcgtcttcctgaggccgaggctccgacgcagccgaacccgtgcatcccacgggtccggaggaggaagaggaggagggaggagctgctgctcggcggccgcccaggacgagcctaagggatgagggccgcgaggcggttggcccgcgtgcggcgggaggcgcttgccgcgtgcatgacgtgcccgctctgccggggacttctcagggaggccaccgccgtagccctgtgcctccacacattttgccgggactgcattgtggagaaaataaatgatgacgacgctgactgttgcccagtctgcaacattgatcttggctgcgatcctgaagagaaactcaggtgaactagttttctaacttgcctgaccacaaccttcaagatatcaggaataaggtatttccaattaaaaagataaatgctgattctccaaagtctctaacaacattgccagcaaagagaaaacaaaggtccctttcttccttggtggttgacactccaaggagcgtagtaaagcggactggtttgactggaaagagaaccaaagctaaaagaaagacagtagcttctagtgcagcttctcccatcaataatggaaccatgcaattaccaactaaatttgaaaatcgagatcagaagactgataaaagttgtgcatcacaatctaccaatgtagcatcagctgcaaacaaaactgaaaatcaagatctaaagaagaccaggaaaacttcggcaaaacagtcgaccagggcagcaacatcagcaaacagaaaacagcaaaatacagatgtagatgtttcaagtaaaccatcttctgaaaatagaaagaatggcacgacagctgacaaggatgagctccgtaagtattcaaaaatacctaggtcaactcccaaaatccatgctgtcaatgaagagcaaataaaaaagaaagaggacgaactccctacaaggaaagcagaggcagacaacaaagtggttattcctgggacaactgtgagagaacattcaaataactcaaatcttaaagagaaagataacggcagttctccagaatcttcaccattgaaagacaaaacaacagcagacgatgattcgtaccaatgtttgcttggttctgcaagcgatgtgcgtgatccaataactactccggtgtggttcttgttaatttctttgcctaaccagaaagaagatccacaactgcctcagttatcaaagagttacatgagaatcaaagaccgcagtttgcagatttcttctgtacagaggtacatcatgaagaagctggatctagctaatgaaaacgaggtggagatcatctgccacggcgagccaatctgcccctcgagcacgctgcatgggctgatggaactgtggcatcgtagacagccggcagagcccgtggaggcattggtgggtgcgccagccaaggagttcgtcatagagctgggcttccgtcgccgccgccacccttatttggcgcccggcaccgtcgcggtgcctccggagccctcctgatcagcttgcaagggtggctccgctccgctgtggagcctgagctgcactcttccgtccgtcgtccgctcttgtcctcggtcctccatccccaaccagtttagccgtgtatgataaaacagttttcttttactcatttcagacttttcttttactcattttatgtatacaagcgaggcggcttttgttctgacttttccttgtgccaagcaaagccgacgcagcggtgttgactttgaccatctgttgttgaagcccgg

SEQ ID NO: 47716 - DNA, 1487 bp, Zea Mays
gcgcaccccgcgcctcgccggagctccgccgccgccgctgtccgattccgcagcagagaagccaccaacaccgccgcacgtccgtggattgtcctcagatacgcctccccgcgccgcgtcttcctgaggccgaggctccgacgcagccgaacccgtgcatcccacgggtccggaggaggaagaggaggagggaggagctgctgctcggcggccgcccaggacgagcctaagggatgagggccgcgaggcggttggcccgcgtgcggcgggaggcgcttgccgcgtgcatgacgtgcccgctctgccggggacttctcagggaggccaccgccgtagccctgtgcctccacacattttgccgggactgcattgtggagaaaataaatgatgacgacgctgactgttgcccagtctgcaacattgatcttggctgcgatcctgaagagaaactcaggcctgaccacaaccttcaagatatcaggaataaggtatttccaattaaaaagataaatgctgattctccaaagtctctaacaacattgccagcaaagagaaaacaaaggtccctttcttccttggtggttgacactccaaggagcgtagtaaagcggactggtttgactggaaagagaaccaaagctaaaagaaagacagtagcttctagtgcagcttctcccatcaataatggaaccatgcaattaccaactaaatttgaaaatcgagatcagaagactgataaaagttgtgcatcacaatctaccaatgtagcatcagctgcaaacaaaactgaaaatcaagatctaaagaagaccaggaaaacttcggcaaaacagtcgaccagggcagcaacatcagcaaacagaaaacagcaaaatacagatgtagatgtttcaagtaaaccatcttctgaaaatagaaagaatggcacgacagctgacaaggatgagctccgtaagtattcaaaaatacctaggtcaactcccaaaatccatgctgtcaatgaagagcaaataaaaaagaaagaggacgaactccctacaaggaaagcagaggcagacaacaaagtggttattcctgggacaactgtgagagaacattcaaataactcaaatcttaaagagaaagataacggcagttctccagaatcttcaccattgaaagacaaaacaacagcagacgatgattcgtaccaatgtttgcttggttctgcaagcgatgtgcgtgatccaataactactccggtgtggttcttgttaatttctttgcctaaccagaaagaagatccacaactgcctcagttatcaaagagttacatgagaatcaaagaccgcagtttgcagatttcttctgtacagaggtacatcatgaagaagctggatctagctaatgaaaacgagcttatatttggttgaactattgatttggtgtatgccagatatctccagtttagctctcaaatgtgattaattatcaatgatcaacctggg

SEQ ID NO: 47717 - DNA, 1565 bp, Zea Mays
cgcgccgcctttcgcgtggattgtggtcgtgcctttcgtcgcgcgcgtccatctctttgccgggactgcattgtggagaaaataaatgatgacgacgctgactgttgcccagtctgcaacattgatcttggctgcgatcctgaagagaaactcaggcctgaccacaaccttcaagatatcaggaataaggtatttccaattaaaaagataaatgctgattctccaaagtctctaacaacattgccagcaaagagaaaacaaaggtccctttcttccttggtggttgacactccaaggagcgtagtaaagcggactggtttgactggaaagagaaccaaagctaaaagaaagacagtagcttctagtgcagcttctcccatcaataatggaaccatgcaattaccaactaaatttgaaaatcgagatcagaagactgataaaagttgtgcatcacaatctaccaatgtagcatcagctgcaaacaaaactgaaaatcaagatctaaagaagaccaggaaaacttcggcaaaacagtcgaccagggcagcaacatcagcaaacagaaaacagcaaaatacagatgtagatgtttcaagtaaaccatcttctgaaaatagaaagaatggcacgacagctgacaaggatgagctccgtaagtattcaaaaatacctaggtcaactcccaaaatccatgctgtcaatgaagagcaaataaaaaagaaagaggacgaactccctacaaggaaagcagaggcagacaacaaagtggttattcctgggacaactgtgagagaacattcaaataactcaaatcttaaagagaaagataacggcagttctccagaatcttcaccattgaaagacaaaacaacagcagacgatgattcgtaccaatgtttgcttggttctgcaagcgatgtgcgtgatccaataactactccggtgtggttcttgttaatttctttgcctaaccagaaagaagatccacaactgcctcagttatcaaagagttacatgagaatcaaagaccgcagtttgcagatttcttctgtacagaggtacatcatgaagaagctggatctagctaatgaaaacgaggtggagatcatctgccacggcgagccaatctgcccctcgagcacgctgcatgggctgatggaactgtggcatcgtagacagccggcagagcccgtggaggcattggtgggtgcgccagccaaggagttcgtcatagagctgggcttccgtcgccgccgccacccttatttggcgcccggcaccgtcgcggtgcctccggagccctcctgatcagcttgcaagggtggctccgctccgctgtggagcctgagctgcactcttccgtccgtcgtccgctcttgtcctcggtcctccatccccaaccagtttagccgtgtatgataaaacagttttcttttactcatttcagacttttcttttactcattttatgtatacaagcgaggcggcttttgttctgacttttccttgtgccaagcaaagccgacgcagcggtgttgactttgaccatctgttgttgaagcccgg

SEQ ID NO: 47718 - DNA, 1936 bp, Zea Mays
acgcgtttcggccgatcttgtccgcggtctgcctccctgacttttgttggcgctagccgtgtcgaaccgaaagtcccaagtcccacccaccaaacccaacacatcgtgtctgcgttctccccctttacgccggcgagtgttcgtcgctggctcgctgcagcggggagaatagaggcagagagcagggatgagcgacgagcgggtgaaggcggaggcgctgcagatcctgggcctattccaggtgctcccccgcctcgtcgtcttcgacctcgactataccctctggcccttctactgcgagtgccggtccaagagggattcgccgagccttttcaggcacgccaggggcatcatgtacgccctcaaggagaaggggatcgacatggcgattgcttctcgctcccccaccccggacatagccaaggtgttcctcgacaagttggagttccagtccatgttcgtcgcccaagtaagaatccttcctcagccggccgtaattttcgtgtgggtcgttgtttccctttctgcatataagaattcattgatgcaacatagttcaggcaaattattcttataaaacaggaccatcgtccatcgataacatatgaaactgaaaatggccctttatgtggctatatgactatatcgctatatgtaagcaaataacgatgcgaacggatggtgtgttacttgtgcaagttttttagggttactgggttagtttcatcgagcacattgataatggacacattgtagcgaaagaggctctagtcgagttggttaggtggttttggtagcactcttcgagttctcggttccactctatgtgagtgcgaatttcagaatatgcttaaaaaatcccttcgtctatctcatgccaaagtacaggtataaggcttagctccggtcgcggttattttcacataggcttcaataccgttgtgtatgggtggagcaggggttcaaggttttttttacctgtgtggctgtgtgtgtgacaaggtcttcttcttaataaaatactcgagggctatcttacctccgcagaacgagttttttttttagtggacacattgtatcaaaatatattttttaattggccacaaagaaaataataaaatctcagcccaaatccaagaatttgcaaatctgagtccatcttagcttagtactactataccacggtaccattttcctcaaagagtgcacatattgccttaatatactataagatagtggcatacagtacagtaaattcgattgtgaccataaaaatattccatgcccaacaatatgttcctttaatgatcctgcacactcacacgcttgtgtcccttcctcaagtttttttctcctgaatcaggtgccttttctggtgtaagaacagaatgctgaatactatattattttcttttggttgttgtatgaaggaaatattctccagctggactcacaagactgagcatttccaaaagatccagaggaaaactgggattccctacaaatccatgctgttctttgatgacgagaacaggaatattgaagcagtatcaaaaatgggagtgacgagtgttttagtagagaacggggtgaaccttgacatgtttaagctgggtctcagtaactttgcaactaactgtgctgcctccagcagaaaggatgacgaataacctcgagaagtgatacatagaagaaaataccttcaaaacactgtactcgaattcattgtaatcaatttgcccgattcatgaacaatttattggtgaaagatgacctcacagactagcttttgaactgatgcaacgcctgtctaatatatttatttgaaggcaaatcactccatgtcattatttcacgtgcaaagcaatatattggtgcatatctgttttgttttcttttgtgtcagaattttcttgagccctgtaaggctgtaacg

SEQ ID NO: 47719 - DNA, 3141 bp, Zea Mays
ctcccagtctccctccctccctttctctaagcgcgacgaccggcgccgccaccgccaccgccttacgccagatacccaggtccgtcttagtcggcaccttctccagcaacaagcacccaacaaatgaatgctttggagcagttggcatccattgatctcattgagctatgcaaggaggccagaattgagcgctgccgtgcaactagagacttgagtagctgtggccgctatgtgcatcatgtgcttaactcatgtggccatgcctcattatgtgctgaatgcagccaaagatgcgacgtctgcccaatttgcaggagtccaataccggacaatggaaacagggttcagctacgtctttactacaagtgcctggaagagggccttatttctaagcagcacgatgaaaggtttcaggaaaaggaagaccatggcaatccagttagcatggatgtccagcagctgcattcattgttcgatgttgcagtacagaacaatcttacttcccttatttgccactataggtctggattagaaacgatgagatctaggttatcccaactgcaaaagtttgccacacagttggcaggaatttacagtatacttgaagttatggtttcatctttcaatgaagcagtttcagcgcatgttaatgacctgcaccaactcattgagaacacattgaaggcaaagcagcatttggaggccatgatctggtgtatcaggcatagatttattcaggacatctgttcaaggtacactgatcatacatcatggagctctgatgtgattcaaaggaaggcatatgcagaagaaagaaaatggcctggattttctgataaagggtcagatataaatgaagccaatcagactacactattcatcgagcaggccctacaaaaccttggcattgaacaaaattatagggataaggaggaagacataacaataacatgtttacagaatgaacaatcatcatctatgttctgttccacaattacaaccgatcattgtagtattgacagatacccttttaagaatttgcgtgaggcagttgatgtactctttctacacggagcatcagacatggtgattgcaaagcaagctattttattgtattatctatttgatcgacattggagtagaccagattcagaatggaggtatctggtggatgattttgctactacctttgggattactaatagaacattgcttgagtgcctggtattttgtcttctagacgatcattcttcagaagccttgaaggaggcctgctctcttctccccaagatctttagcaaggaaacacatccaaagatagcacaagttcttctggaacgccagagacctgatatggcacttcttgtgctaaagtgcacagggcgtgatagcttctctgctacagagaacttcgaaaaggatggcatttcatctcttagcgaggcagtgactgcggtccgtgttagaattgaatgtggcctcctaacagaggcatttatgtatcataggagctactgctctaaggtgaaagagcaacactcagcaaatatgacacacacggaggatgcattcgaaggctcttggatttatcatgttgagatgatgatggtcgaattttgtactatctgcattgaaagaaatttagttgataaaatgattgatctgccctgggattctgaggaagagaaacatcttcacaagtccctcttcgagtctgctcatgaagcgcccatggatccaattggtagtctgcttgttgtctactaccttcggcgttatcgatatttggaggcatacggggttgatcgtagtcttcagaaatttgagcaaaaggaattggaaaatgccactgaagagattgcttcaaaaattagagcaattgctcaatggagagaaagtttggttgctaaatgccttgacatgcttccagaggttcagagagagaatgtgaaagccatcaacagtggagaacaaattcagtttgctcgaactgctcaaatatcttctccagctcatgtgggcaaatcacaaaatcctgtaatggacttgagcacaacttttaccagtgttcttcaaaataagtcaagcctcttctcaaaaaacaatgcattgactgattctagtggtctgatccgaagcagccactcagagagaaaggtcccatctgctctgcagaccagggcaccaccccatgggtcacctatatccaatatgagatcaactgtagggggtaagttccccacagtgggccagaatgttgacagtccatttttgaggggggctaaaggtatcagttctagaaaaggagagacgggattcaaagaagggattaaatatgctgatcacgatccactgcctatgtatttgaacttgagttctggtgatacacccaccaaagactaccgaacaagtttgttgaaggccgaggctaacaaaaccacttattttcaaggacaagattctgttggaaaaggagagttccactttggttcacgtgctgtgaagcctttcaacttaaatggaactggcgcaggtcaaaatggcctcgctaagatctcgggatatgctggttttcgtgaggattataaagtaccaactaaggagaacatcttgagctttagcaagaaatcttcagttggtggagcagaagccagcaaaggtgtgtcaaggtggagatccgatgagtctagtgaagaagagagaacaaaccgggagagcggagctcctcttgttactagaaggcgacctagattttcgagaagatgatatatccacatcctcagggatttttttaattgtttgcagctatgccctaatgtgacaacaattgttttaagggaatgtgtatgcgggatgcggctatcatgcataatctacattgccatggccgagatgtagttcaagtgtcactaaggatgctagaaaacaaaatcgagaaggcgtatgcatgtagcattcagagttcagtggctaaattatattttcccaacttttgtgccaaatgccttgtaaatatagtcgtactaatctcgtttcttgggctgatggtagtgttgtccgcgtcaaaaagttcaagggccaatacgtccgtaccttatggtatttatatatgaaccactgtggcagaaaaaaaaaaataca

SEQ ID NO: 47720 - DNA, 3229 bp, Zea Mays
ctcccagtctccctccctccctttctctaagcgcgacgaccggcgccgccaccgccaccgccttacgccagatacccagaatgctttggagcagttggcatccattgatctcattgagctatgcaaggaggccagaattgagcgctgccgtgcaactagagacttgagtagctgtggccgctatgtgcatcatgtgcttaactcatgtggccatgcctcattatgtgctgaatgcagccaaagatgcgacgtctgcccaatttgcaggagtccaataccggacaatggaaacagggttcagctacgtctttactacaagtgcctggaagagggccttatttctaagcagcacgatgaaaggtttcaggaaaaggaagaccatggcaatccagttagcatggatgtccagcagctgcattcattgttcgatgttgcagtacagaacaatcttacttcccttatttgccactatatcacagatgtttgtttggatgagaatgctgtgtcaagtgatccacttctggcttttcttttggatgaggtggtcatcaaggactggtgcaagagggctgttaatgtgctcattactgagattggtgtgatctataggtctggattagaaacgatgagatctaggttatcccaactgcaaaagtttgccacacagttggcaggaatttacagtatacttgaagttatggtttcatctttcaatgaagcagtttcagcgcatgttaatgacctgcaccaactcattgagaacacattgaaggcaaagcagcatttggaggccatgatctggtgtatcaggcatagatttattcaggacatctgttcaaggtacactgatcatacatcatggagctctgatgtgattcaaaggaaggcatatgcagaagaaagaaaatggcctggattttctgataaagggtcagatataaatgaagccaatcagactacactattcatcgagcaggccctacaaaaccttggcattgaacaaaattatagggataaggaggaagacataacaataacatgtttacagaatgaacaatcatcatctatgttctgttccacaattacaaccgatcattgtagtattgacagatacccttttaagaatttgcgtgaggcagttgatgtactctttctacacggagcatcagacatggtgattgcaaagcaagctattttattgtattatctatttgatcgacattggagtagaccagattcagaatggaggtatctggtggatgattttgctactacctttgggattactaatagaacattgcttgagtgcctggtattttgtcttctagacgatcattcttcagaagccttgaaggaggcctgctctcttctccccaagatctttagcaaggaaacacatccaaagatagcacaagttcttctggaacgccagagacctgatatggcacttcttgtgctaaagtgcacagggcgtgatagcttctctgctacagagaacttcgaaaaggatggcatttcatctcttagcgaggcagtgactgcggtccgtgttagaattgaatgtggcctcctaacagaggcatttatgtatcataggagctactgctctaaggtgaaagagcaacactcagcaaatatgacacacacggaggatgcattcgaaggctcttggatttatcatgttgagatgatgatggtcgaattttgtactatctgcattgaaagaaatttagttgataaaatgattgatctgccctgggattctgaggaagagaaacatcttcacaagtccctcttcgagtctgctcatgaagcgcccatggatccaattggtagtctgcttgttgtctactaccttcggcgttatcgatatttggaggcatacggggttgatcgtagtcttcagaaatttgagcaaaaggaattggaaaatgccactgaagagattgcttcaaaaattagagcaattgctcaatggagagaaagtttggttgctaaatgccttgacatgcttccagaggttcagagagagaatgtgaaagccatcaacagtggagaacaaattcagtttgctcgaactgctcaaatatcttctccagctcatgtgggcaaatcacaaaatcctgtaatggacttgagcacaacttttaccagtgttcttcaaaataagtcaagcctcttctcaaaaaacaatgcattgactgattctagtggtctgatccgaagcagccactcagagagaaaggtcccatctgctctgcagaccagggcaccaccccatgggtcacctatatccaatatgagatcaactgtagggggtaagttccccacagtgggccagaatgttgacagtccatttttgaggggggctaaaggtatcagttctagaaaaggagagacgggattcaaagaagggattaaatatgctgatcacgatccactgcctatgtatttgaacttgagttctggtgatacacccaccaaagactaccgaacaagtttgttgaaggccgaggctaacaaaaccacttattttcaaggacaagattctgttggaaaaggagagttccactttggttcacgtgctgtgaagcctttcaacttaaatggaactggcgcaggtcaaaatggcctcgctaagatctcgggatatgctggttttcgtgaggattataaagtaccaactaaggagaacatcttgagctttagcaagaaatcttcagttggtggagcagaagccagcaaaggtgtgtcaaggtggagatccgatgagtctagtgaagaagagagaacaaaccgggagagcggagctcctcttgttactagaaggcgacctagattttcgagaagatgatatatccacatcctcagggatttttttaattgtttgcagctatgccctaatgtgacaacaattgttttaagggaatgtgtatgcgggatgcggctatcatgcataatctacattgccatggccgagatgtagttcaagtgtcactaaggatgctagaaaacaaaatcgagaaggcgtatgcatgtagcattcagagttcagtggctaaattatattttcccaacttttgtgccaaatgccttgtaaatatagtcgtactaatctcgtttcttgggctgatggtagtgttgtccgcgtcaaaaagttcaagggccaatacgtccgtaccttatggtatttatatatgaaccactgtggcagaaaaaaaaaaataca

SEQ ID NO: 47721 - DNA, 1006 bp, Zea Mays
gttcctatttttcctaaagcaggggccgggcaaaccgtattgttggctccgcctagggttttagcacctgccgccgcaacctcccttctacttctactgccgccgcaacctccccatccttcgaatcccatccgacctaaccccgcaacccgccggacgacgagtggcgaggcccccggccgagatggaccggtaccagagggtggagcggccgcggaacgagtcaaccatcgaggagaacgagatccgcatcaccgcgcagggcctcatccgcaactatgtctcctacgctacctccctcctccaggaaaggagaattaaagagattgttctaaaagccatgggacaggcaatcagtaaatctgtagctgttgcagagattatcaagaaaaggatccctgggttacaccaggataccaacatcagttctgttagcatcactgatgtctgggaacccatagaagaaggccttgtcccattggagatgactcggcatgtttcgatgatttcaattactttgtcccccagagagctggacaagcacactcctgggtaccaagctccagtgtacattgaacaaccaaggcaacagcaggtgccaccaccacagcgccaaccacgcagaccaccagcacaattccagcagctggagtatgaagattcttatgcacggggtcgaggaagagggcgtgggcgtggaaggggctggggtagaggtggctacggtggctatggtggatatggaaacaaccaaggtggctatcatcagggtggtgggtattatgacaatcaaggtggatataatggctatgataatcaaggtggatatagtggctatgataatcaaggtgggtatggtggtggatatggctataaccaaggcagatatgggaactatcaagaaaatggtggatataaccgaggaagaggaagtggtatgcgaggaagaggcaattggggttaccgaggagactccagtgctggaggctccctgggtctggtgaag

SEQ ID NO: 47722 - DNA, 1366 bp, Zea Mays
caggggccgggcaaaccgtattgttggctccgcctagggttttagcacctgccgccgcaacctcccttctacttctactgccgccgcaacctccccatccttcgaatcccatccgacctaaccccgcaacccgccggacgacgagtggcgaggcccccggccgagatggaccggtaccagagggtggagcggccgcggaacgagtcaaccatcgaggagaacgagatccgcatcaccgcgcagggcctcatccgcaactatgtctcctacgctacctccctcctccaggaaaggagaattaaagagattgttctaaaagccatgggacaggcaatcagtaaatctgtagctgttgcagagattatcaagaaaaggatccctgggttacaccaggataccaacatcagttctgttagcatcactgatgtctgggaacccatagaagaaggccttgtcccattggagatgactcggcatgtttcgatgatttcaattactttgtcccccagagagctggacaagcacactcctgggtaccaagctccagtgtacattgaacaaccaaggcaacagcaggtgccaccaccacagcgccaaccacgcagaccaccagcacaattccagcagctggagtatgaagattcttatgcacggggtcgaggaagagggcgtgggcgtggaaggggctggggtagaggtggctacggtggctatggtggatatggaaacaaccaaggtggctatcatcagggtggtgggtattatgacaatcaaggtggatataatggctatgataatcaaggtggatatagcggctatgaaggtggcagggtctatgaaggtggcaggggagggggctatgaaggaggcaggggaggcggctatgaaggtggcaggggagggggctatgaaggaggcaggggtggcagtgctcagggtggaaggggttacggtggccgtggaaggggtagaatgggtggtcgcggacgagggaactagtgcagttctggcgtttccttcaaaatgcatgcctcacctataccaggggaaacgacaagttatctgagcattttatgtttgaagccatgtgactgtgaggtctgttattttttcccctgagcgcgaggtttggttgtgagcataatgcatttgcaaagttttatcttgtacgtcatccttcaacgtttcaaattttatcatgtacgtcatccttcaatgtttctgctgccagaggttttcccagtgatcgttgagtgctgagcatgttgtccaatgttcatgcctgcagtattaacagatggccactcttttcctgtgaaattgttaattgcatttgagcaacaccaaaaataccaaaaaaggaaat

SEQ ID NO: 47723 - DNA, 1595 bp, Zea Mays
caggggccgggcaaaccgtattgttggctccgcctagggttttagcacctgccgccgcaacctcccttctacttctactgccgccgcaacctccccatccttcgaatcccatccgacctaaccccgcaacccgccggacgacgagtggcgaggcccccggccgagatggaccggtaccagagggtggagcggccgcggaacgagtcaaccatcgaggagaacgagatccgcatcaccgcgcagggcctcatccgcaactatgtctcctacgctacctccctcctccaggaaaggagaattaaagagattgttctaaaagccatgggacaggcaatcagtaaatctgtagctgttgcagagattatcaaggatccctgggttacaccaggataccaacatcagttctgttagcatcactgatgtctgggaacccatagaagaaggccttgtcccattggagatgactcggcatgtttcgatgatttcaattactttgtcccccagagagctggacaagcacactcctgggtaccaagctccagtgtacattgaacaaccaaggcaacagcaggtgccaccaccacagcgccaaccacgcagaccaccagcacaattccagcagctggagtatgaagattcttatgcacggggtcgaggaagagggcgtgggcgtggaaggggctggggtagaggtggctacggtggctatggtggatatggaaacaaccaaggtggctatcatcagggtggtgggtattatgacaatcaaggtggatataatggctatgataatcaaggtggatatagtggctatgataatcaaggtgggtatggtggtggatatggctataaccaaggcagatatgggaactatcaagaaaatggtggatataaccgaggaagaggaagtggtatgcgaggaagaggcaattggggttaccgaggaggttatgaaggtggcaggggcggtggctatggaggtggcaggggcggtggatacgaaggaggcaggggaggcggctatgaaggaggcaggggaggcggctatgaaggtggcagggtctatgaaggtggcaggggagggggctatgaaggaggcaggggaggcggctatgaaggtggcaggggagggggctatgaaggaggcaggggtggcagtgctcagggtggaaggggttacggtggccgtggaaggggtagaatgggtggtcgcggacgagggaactagtgcagttctggcgtttccttcaaaatgcatgcctcacctataccaggggaaacgacaagttatctgagcattttatgtttgaagccatgtgactgtgaggtctgttattttttcccctgagcgcgaggtttggttgtgagcataatgcatttgcaaagttttatcttgtacgtcatccttcaacgtttcaaattttatcatgtacgtcatccttcaatgtttctgctgccagaggttttcccagtgatcgttgagtgctgagcatgttgtccaatgttcatgcctgcagtattaacagatggccactcttttcctgtgaaattgttaattgcatttgagcaacaccaaaaataccaaaaaaggaaat

SEQ ID NO: 47724 - DNA, 1798 bp, Zea Mays
gcgacagcgtcgactttctgaacgatctggcggcggccgcggctcccaagttcacgaagcgggaggcgcaagcgaagcggctacctctcgccggagatgccgctggggacctctccagtagtggcggaggccgaggcatggacgtgggagaacgcagcggctggagctgccgccgggttcgccacggtcgcggccctccacccgctcgacgtcgtccgcacccgcttccaagtgagcggcggaagggggtggtctgaagtgcctccgtacaggaacaccgcgcatgctgtgtacactatcacacgatctgagggcctgagaggactttatgcaggattttatcccgcagttcttggatcaactgtttcctggggcctatatttctttttaggaagaatgaccagcttcatccagtccatcatctcatctcagctgcagaagcaggtttccttgtttacaaatcccatatggctggtgaaaacaagactgcaactacaaacagctaaacaccatacttctcagtattctggtttttctgatgctttgaaaactattctaagagaggagggatttcttgcactttataggggaattggacctggtcttttgctggtcacccatggcgcaatacagttcacggcctatgaggaacttcgcaaagctatgatattctttaaaagtgcacaatcaagggcagacgacgcaggaggcggggagtcattggtagtaactgaccaaatgtgtgtttgggtgttgaatatcgactttagcatggttcaataaagacatttcagttcccctgaattcttaattatgttgtttttatattctttccttaaactgttattgccggtatttatatctagcattttcatgatatttcacacatttagacactgtttctctgtattatgcaatttttgaaattatcaaacctaagcaaattgaacatatagttatatgacttatgaaaatagttcatgcaatatcatattgttttttgaaattgtaaaacctaagcgaattgaacatatagttatgtgacttatgaaaatagttcatgcaatatcatattgtttggctccactcataacgtatgtacagttgtagatatacatctatggtatcatattgtttgactccactcataacatatgcagaattgtagatatacatctatccttgggcctttactactttgcctgatattccattctcttcactcttaatgcttagctgaattccatcgattttgcggcacttggggctggttcaaaagtagctgctattctacttacttatccttaccaggtcatcagagcccgcttgcagcaacggcctggcactgatggtactccaaagtactcaaatagctggcatgtagtgaaggaaactgcaaagtatgaaggcgtccgtggattttacaggggcatcacgtccaatctactgaaaaaccttccagctgcgtccctcacgttcgtggtgtatgaaaatgttatcaaactattcaaagcaaccaaggagaagacgtagctactcattaaatccaggagtactatgcatggtctgacatttctgagttcaaacgatgcctataatttccattccacgtcaagcccatattttatccatttaacatcgtatatgacaaatatgtaacagtacaggttgtgaccaacctgggtcgtggaaattttttgtacttgcattttgtagagagaaaatacacattttgtttcttcccaaagaaatatgtctttgttatataatccagccgggacgctggcgttgtagatct

SEQ ID NO: 47725 - DNA, 1824 bp, Zea Mays
agcgtcgactttctgaacgatctggcggcggccgcggctcccaagttcacgaagcgggaggcgcaagcgaagcggctacctctcgccggagatgccgctggggacctctccagtagtggcggaggccgaggcatggacgtgggagaacgcagcggctggagctgccgccgggttcgccacggtcgcggccctccacccgctcgacgtcgtccgcacccgcttccaagtgagcggcggaagggggtggtctgaagtgcctccgtacaggaacaccgcgcatgctgtgtacactatcacacgatctgagggcctgagaggactttatgcaggattttatcccgcagttcttggatcaactgtttcctggggcctatatttctttttctataacagagctaaacaaaggtacttacagaggaagaatgaccagcttcatccagtccatcatctcatctcagctgcagaagcaggtttccttgtttacaaatcccatatggctggtgaaaacaagactgcaactacaaacagctaaacaccatacttctcagtattctggtttttctgatgctttgaaaactattctaagagaggagggatttcttgcactttataggggaattggacctggtcttttgctggtcacccatggcgcaatacagttcacggcctatgaggaacttcgcaaagctatgatattctttaaaagtgcacaatcaagggcagacgacgcaggaggcggggagtcattggtagtaactgaccaaatgtgtgtttgggtgttgaatatcgactttagcatggttcaataaagacatttcagttcccctgaattcttaattatgttgtttttatattctttccttaaactgttattgccggtatttatatctagcattttcatgatatttcacacatttagacactgtttctctgtattatgcaatttttgaaattatcaaacctaagcaaattgaacatatagttatatgacttatgaaaatagttcatgcaatatcatattgttttttgaaattgtaaaacctaagcgaattgaacatatagttatgtgacttatgaaaatagttcatgcaatatcatattgtttggctccactcataacgtatgtacagttgtagatatacatctatggtatcatattgtttgactccactcataacatatgcagaattgtagatatacatctatccttgggcctttactactttgcctgatattccattctcttcactcttaatgcttagctgaattccatcgattttgcggcacttggggctggttcaaaagtagctgctattctacttacttatccttaccaggtcatcagagcccgcttgcagcaacggcctggcactgatggtactccaaagtactcaaatagctggcatgtagtgaaggaaactgcaaagtatgaaggcgtccgtggattttacaggggcatcacgtccaatctactgaaaaaccttccagctgcgtccctcacgttcgtggtgtatgaaaatgttatcaaactattcaaagcaaccaaggagaagacgtagctactcattaaatccaggagtactatgcatggtctgacatttctgagttcaaacgatgcctataatttccattccacgtcaagcccatattttatccatttaacatcgtatatgacaaatatgtaacagtacaggttgtgaccaacctgggtcgtggaaattttttgtacttgcattttgtagagagaaaatacacattttgtttcttcccaaagaaatatgtctttgttatataatccagccgggacgctggcgttgtagatct

SEQ ID NO: 47726 - DNA, 1309 bp, Zea Mays
cgtcgactttctgaacgatctggcggcggccgcggctcccaagttcacgaagcgggaggcgcaagcgaagcggctacctctcgccggagatgccgctggggacctctccagtagtggcggaggccgaggcatggacgtgggagaacgcagcggctggagctgccgccgggttcgccacggtcgcggccctccacccgctcgacgtcgtccgcacccgcttccaagtgagcggcggaagggggtggtctgaagtgcctccgtacaggaacaccgcgcatgctgtgtacactatcacacgatctgagggcctgagaggactttatgcaggattttatcccgcagttcttggatcaactgtttcctggggcctatatttctttttctataacagagctaaacaaaggtacttacagaggaagaatgaccagcttcatccagtccatcatctcatctcagctgcagaagcaggtttccttgtttacaaatcccatatggctggtgaaaacaagactgcaactacaaacagctaaacaccatacttctcagtattctggtttttctgatgctttgaaaactattctaagagaggagggatttcttgcactttataggggaattggacctggtcttttgctggtcacccatggcgcaatacagttcacggcctatgaggaacttcgcaaagctatgatattctttaaaagtgcacaatcaagggcagacgacgcaggaggcggggagtcattgctgaattccatcgattttgcggcacttggggctggttcaaaagtagctgctattctacttacttatccttaccaggtcatcagagcccgcttgcagcaacggcctggcactgatggtactccaaagtactcaaatagctggcatgtagtgaaggaaactgcaaagtatgaaggcgtccgtggattttacaggggcatcacgtccaatctactgaaaaaccttccagctgcgtccctcacgttcgtggtgtatgaaaatgttatcaaactattcaaagcaaccaaggagaagacgtagctactcattaaatccaggagtactatgcatggtctgacatttctgagttcaaacgatgcctataatttccattccacgtcaagcccatattttatccatttaacatcgtatatgacaaatatgtaacagtacaggttgtgaccaacctgggtcgtggaaattttttgtacttgcattttgtagagagaaaatacacattttgtttcttcccaaagaaatatgtctttgttatataatccagccgggacgctggcgttgtagatct

SEQ ID NO: 47727 - DNA, 1338 bp, Zea Mays
cgtcgactttctgaacgatctggcggcggccgcggctcccaagttcacgaagcgggaggcgcaagcgaagcggctacctctcgccggagatgccgctggggacctctccagtagtggcggaggccgaggcatggacgtgggagaacgcagcggctggagctgccgccgggttcgccacggtcgcggccctccacccgctcgacgtcgtccgcacccgcttccaagtgagcggcggaagggggtggtctgaagtgcctccgtacaggaacaccgcgcatgctgtgtacactatcacacgatctgagggcctgagaggactttatgcaggattttatcccgcagttcttggatcaactgtttcctggggcctatatttctttttctataacagagctaaacaaaggtacttacagaggaagaatgaccagcttcatccagtccatcatctcatctcagctgcagaagcaggtgctttggtttccttgtttacaaatcccatatggctggtgaaaacaagactgcaactacaaacagctaaacaccatacttctcagtattctggtttttctgccagatgctttgaaaactattctaagagaggagggatttcttgcactttataggggaattggacctggtcttttgctggtcacccatggcgcaatacagttcacggcctatgaggaacttcgcaaagctatgatattctttaaaagtgcacaatcaagggcagacgacgcaggaggcggggagtcattggtagtaactgaccaaatctgaattccatcgattttgcggcacttggggctggttcaaaagtagctgctattctacttacttatccttaccaggtcatcagagcccgcttgcagcaacggcctggcactgatggtactccaaagtactcaaatagctggcatgtagtgaaggaaactgcaaagtatgaaggcgtccgtggattttacaggggcatcacgtccaatctactgaaaaaccttccagctgcgtccctcacgttcgtggtgtatgaaaatgttatcaaactattcaaagcaaccaaggagaagacgtagctactcattaaatccaggagtactatgcatggtctgacatttctgagttcaaacgatgcctataatttccattccacgtcaagcccatattttatccatttaacatcgtatatgacaaatatgtaacagtacaggttgtgaccaacctgggtcgtggaaattttttgtacttgcattttgtagagagaaaatacacattttgtttcttcccaaagaaatatgtctttgttatataatccagccgggacgctggcgttgtagatct

SEQ ID NO: 47728 - DNA, 1826 bp, Zea Mays
cgtcgactttctgaacgatctggcggcggccgcggctcccaagttcacgaagcgggaggcgcaagcgaagcggctacctctcgccggagatgccgctggggacctctccagtagtggcggaggccgaggcatggacgtgggagaacgcagcggctggagctgccgccgggttcgccacggtcgcggccctccacccgctcgacgtcgtccgcacccgcttccaagtgagcggcggaagggggtggtctgaagtgcctccgtacaggaacaccgcgcatgctgtgtacactatcacacgatctgagggcctgagaggactttatgcaggattttatcccgcagttcttggatcaactgtttcctggggcctatatttctttttctataacagagctaaacaaaggtacttacagaggaagaatgaccagcttcatccagtccatcatctcatctcagctgcagaagcaggtttccttgtttacaaatcccatatggctggtgaaaacaagactgcaactacaaacagctaaacaccatacttctcagtattctggtttttctgccagatgctttgaaaactattctaagagaggagggatttcttgcactttataggggaattggacctggtcttttgctggtcacccatggcgcaatacagttcacggcctatgaggaacttcgcaaagctatgatattctttaaaagtgcacaatcaagggcagacgacgcaggaggcggggagtcattggtagtaactgaccaaatgtgtgtttgggtgttgaatatcgactttagcatggttcaataaagacatttcagttcccctgaattcttaattatgttgtttttatattctttccttaaactgttattgccggtatttatatctagcattttcatgatatttcacacatttagacactgtttctctgtattatgcaatttttgaaattatcaaacctaagcaaattgaacatatagttatatgacttatgaaaatagttcatgcaatatcatattgttttttgaaattgtaaaacctaagcgaattgaacatatagttatgtgacttatgaaaatagttcatgcaatatcatattgtttggctccactcataacgtatgtacagttgtagatatacatctatggtatcatattgtttgactccactcataacatatgcagaattgtagatatacatctatccttgggcctttactactttgcctgatattccattctcttcactcttaatgcttagctgaattccatcgattttgcggcacttggggctggttcaaaagtagctgctattctacttacttatccttaccaggtcatcagagcccgcttgcagcaacggcctggcactgatggtactccaaagtactcaaatagctggcatgtagtgaaggaaactgcaaagtatgaaggcgtccgtggattttacaggggcatcacgtccaatctactgaaaaaccttccagctgcgtccctcacgttcgtggtgtatgaaaatgttatcaaactattcaaagcaaccaaggagaagacgtagctactcattaaatccaggagtactatgcatggtctgacatttctgagttcaaacgatgcctataatttccattccacgtcaagcccatattttatccatttaacatcgtatatgacaaatatgtaacagtacaggttgtgaccaacctgggtcgtggaaattttttgtacttgcattttgtagagagaaaatacacattttgtttcttcccaaagaaatatgtctttgttatataatccagccgggacgctggcgttgtagatct

SEQ ID NO: 47729 - DNA, 1333 bp, Zea Mays
gtcgactttctgaacgatctggcggcggccgcggctcccaagttcacgaagcgggaggcgcaagcgaagcggctacctctcgccggagatgccgctggggacctctccagtagtggcggaggccgaggcatggacgtgggagaacgcagcggctggagctgccgccgggttcgccacggtcgcggccctccacccgctcgacgtcgtccgcacccgcttccaagtgagcggcggaagggggtggtctgaagtgcctccgtacaggaacaccgcgcatgctgtgtacactatcacacgatctgagggcctgagaggactttatgcaggattttatcccgcagttcttggatcaactgtttcctggggcctatatttctttttctataacagagctaaacaaaggtacttacagaggaagaatgaccagcttcatccagtccatcatctcatctcagctgcagaagcaggtgctttggtttccttgtttacaaatcccatatggctggtgaaaacaagactgcaactacaaacagctaaacaccatacttctcagtattctggtttttctgatgctttgaaaactattctaagagaggagggatttcttgcactttataggggaattggacctggtcttttgctggtcacccatggcgcaatacagttcacggcctatgaggaacttcgcaaagctatgatattctttaaaagtgcacaatcaagggcagacgacgcaggaggcggggagtcattggtagtaactgaccaaatctgaattccatcgattttgcggcacttggggctggttcaaaagtagctgctattctacttacttatccttaccaggtcatcagagcccgcttgcagcaacggcctggcactgatggtactccaaagtactcaaatagctggcatgtagtgaaggaaactgcaaagtatgaaggcgtccgtggattttacaggggcatcacgtccaatctactgaaaaaccttccagctgcgtccctcacgttcgtggtgtatgaaaatgttatcaaactattcaaagcaaccaaggagaagacgtagctactcattaaatccaggagtactatgcatggtctgacatttctgagttcaaacgatgcctataatttccattccacgtcaagcccatattttatccatttaacatcgtatatgacaaatatgtaacagtacaggttgtgaccaacctgggtcgtggaaattttttgtacttgcattttgtagagagaaaatacacattttgtttcttcccaaagaaatatgtctttgttatataatccagccgggacgctggcgttgtagatct

SEQ ID NO: 47730 - DNA, 1327 bp, Zea Mays
cgactttctgaacgatctggcggcggccgcggctcccaagttcacgaagcgggaggcgcaagcgaagcggctacctctcgccggagatgccgctggggacctctccagtagtggcggaggccgaggcatggacgtgggagaacgcagcggctggagctgccgccgggttcgccacggtcgcggccctccacccgctcgacgtcgtccgcacccgcttccaagtgagcggcggaagggggtggtctgaagtgcctccgtacaggaacaccgcgcatgctgtgtacactatcacacgatctgagggcctgagaggactttatgcaggattttatcccgcagttcttggatcaactgtttcctggggcctatatttctttttctataacagagctaaacaaaggtacttacagaggaagaatgaccagcttcatccagtccatcatctcatctcagctgcagaagcaggtttccttgtttacaaatcccatatggctggtgaaaacaagactgcaactacaaacagctaaacaccatacttctcagtattctggtttttctgccagatgctttgaaaactattctaagagaggagggatttcttgcactttataggggaattggacctggtcttttgctggtcacccatggcgcaatacagttcacggcctatgaggaacttcgcaaagctatgatattctttaaaagtgcacaatcaagggcagacgacgcaggaggcggggagtcattggtagtaactgaccaaatctgaattccatcgattttgcggcacttggggctggttcaaaagtagctgctattctacttacttatccttaccaggtcatcagagcccgcttgcagcaacggcctggcactgatggtactccaaagtactcaaatagctggcatgtagtgaaggaaactgcaaagtatgaaggcgtccgtggattttacaggggcatcacgtccaatctactgaaaaaccttccagctgcgtccctcacgttcgtggtgtatgaaaatgttatcaaactattcaaagcaaccaaggagaagacgtagctactcattaaatccaggagtactatgcatggtctgacatttctgagttcaaacgatgcctataatttccattccacgtcaagcccatattttatccatttaacatcgtatatgacaaatatgtaacagtacaggttgtgaccaacctgggtcgtggaaattttttgtacttgcattttgtagagagaaaatacacattttgtttcttcccaaagaaatatgtctttgttatataatccagccgggacgctggcgttgtagatct

SEQ ID NO: 47731 - DNA, 1824 bp, Zea Mays
ctttctgaacgatctggcggcggccgcggctcccaagttcacgaagcgggaggcgcaagcgaagcggctacctctcgccggagatgccgctggggacctctccagtagtggcggaggccgaggcatggacgtgggagaacgcagcggctggagctgccgccgggttcgccacggtcgcggccctccacccgctcgacgtcgtccgcacccgcttccaagtgagcggcggaagggggtggtctgaagtgcctccgtacaggaacaccgcgcatgctgtgtacactatcacacgatctgagggcctgagaggactttatgcaggattttatcccgcagttcttggatcaactgtttcctggggcctatatttctttttctataacagagctaaacaaaggtacttacagaggaagaatgaccagcttcatccagtccatcatctcatctcagctgcagaagcaggtgctttggtttccttgtttacaaatcccatatggctggtgaaaacaagactgcaactacaaacagctaaacaccatacttctcagtattctggtttttctgatgctttgaaaactattctaagagaggagggatttcttgcactttataggggaattggacctggtcttttgctggtcacccatggcgcaatacagttcacggcctatgaggaacttcgcaaagctatgatattctttaaaagtgcacaatcaagggcagacgacgcaggaggcggggagtcattggtagtaactgaccaaatgtgtgtttgggtgttgaatatcgactttagcatggttcaataaagacatttcagttcccctgaattcttaattatgttgtttttatattctttccttaaactgttattgccggtatttatatctagcattttcatgatatttcacacatttagacactgtttctctgtattatgcaatttttgaaattatcaaacctaagcaaattgaacatatagttatatgacttatgaaaatagttcatgcaatatcatattgttttttgaaattgtaaaacctaagcgaattgaacatatagttatgtgacttatgaaaatagttcatgcaatatcatattgtttggctccactcataacgtatgtacagttgtagatatacatctatggtatcatattgtttgactccactcataacatatgcagaattgtagatatacatctatccttgggcctttactactttgcctgatattccattctcttcactcttaatgcttagctgaattccatcgattttgcggcacttggggctggttcaaaagtagctgctattctacttacttatccttaccaggtcatcagagcccgcttgcagcaacggcctggcactgatggtactccaaagtactcaaatagctggcatgtagtgaaggaaactgcaaagtatgaaggcgtccgtggattttacaggggcatcacgtccaatctactgaaaaaccttccagctgcgtccctcacgttcgtggtgtatgaaaatgttatcaaactattcaaagcaaccaaggagaagacgtagctactcattaaatccaggagtactatgcatggtctgacatttctgagttcaaacgatgcctataatttccattccacgtcaagcccatattttatccatttaacatcgtatatgacaaatatgtaacagtacaggttgtgaccaacctgggtcgtggaaattttttgtacttgcattttgtagagagaaaatacacattttgtttcttcccaaagaaatatgtctttgttatataatccagccgggacgctggcgttgtagatct

SEQ ID NO: 47732 - DNA, 1315 bp, Zea Mays
ctttctgaacgatctggcggcggccgcggctcccaagttcacgaagcgggaggcgcaagcgaagcggctacctctcgccggagatgccgctggggacctctccagtagtggcggaggccgaggcatggacgtgggagaacgcagcggctggagctgccgccgggttcgccacggtcgcggccctccacccgctcgacgtcgtccgcacccgcttccaagtgagcggcggaagggggtggtctgaagtgcctccgtacaggaacaccgcgcatgctgtgtacactatcacacgatctgagggcctgagaggactttatgcaggattttatcccgcagttcttggatcaactgtttcctggggcctatatttctttttctataacagagctaaacaaaggtacttacagaggaagaatgaccagcttcatccagtccatcatctcatctcagctgcagaagcaggtgctttggtttccttgtttacaaatcccatatggctggtgaaaacaagactgcaactacaaacagctaaacaccatacttctcagtattctggtttttctgccagatgctttgaaaactattctaagagaggagggatttcttgcactttataggggaattggacctggtcttttgctggtcacccatggcgcaatacagttcacggcctatgaggaacttcgcaaagctatgatattctttaaaagtgcacaatcaagggcagacgacgcaggaggcggggagtcattgctgaattccatcgattttgcggcacttggggctggttcaaaagtagctgctattctacttacttatccttaccaggtcatcagagcccgcttgcagcaacggcctggcactgatggtactccaaagtactcaaatagctggcatgtagtgaaggaaactgcaaagtatgaaggcgtccgtggattttacaggggcatcacgtccaatctactgaaaaaccttccagctgcgtccctcacgttcgtggtgtatgaaaatgttatcaaactattcaaagcaaccaaggagaagacgtagctactcattaaatccaggagtactatgcatggtctgacatttctgagttcaaacgatgcctataatttccattccacgtcaagcccatattttatccatttaacatcgtatatgacaaatatgtaacagtacaggttgtgaccaacctgggtcgtggaaattttttgtacttgcattttgtagagagaaaatacacattttgtttcttcccaaagaaatatgtctttgttatataatccagccgggacgctggcgttgtagatct

SEQ ID NO: 47733 - DNA, 1822 bp, Zea Mays
gaacgatctggcggcggccgcggctcccaagttcacgaagcgggaggcgcaagcgaagcggctacctctcgccggagatgccgctggggacctctccagtagtggcggaggccgaggcatggacgtgggagaacgcagcggctggagctgccgccgggttcgccacggtcgcggccctccacccgctcgacgtcgtccgcacccgcttccaagtgagcggcggaagggggtggtctgaagtgcctccgtacaggaacaccgcgcatgctgtgtacactatcacacgatctgagggcctgagaggactttatgcaggattttatcccgcagttcttggatcaactgtttcctggggcctatatttctttttctataacagagctaaacaaaggtacttacagaggaagaatgaccagcttcatccagtccatcatctcatctcagctgcagaagcaggtgctttggtttccttgtttacaaatcccatatggctggtgaaaacaagactgcaactacaaacagctaaacaccatacttctcagtattctggtttttctgccagatgctttgaaaactattctaagagaggagggatttcttgcactttataggggaattggacctggtcttttgctggtcacccatggcgcaatacagttcacggcctatgaggaacttcgcaaagctatgatattctttaaaagtgcacaatcaagggcagacgacgcaggaggcggggagtcattggtagtaactgaccaaatgtgtgtttgggtgttgaatatcgactttagcatggttcaataaagacatttcagttcccctgaattcttaattatgttgtttttatattctttccttaaactgttattgccggtatttatatctagcattttcatgatatttcacacatttagacactgtttctctgtattatgcaatttttgaaattatcaaacctaagcaaattgaacatatagttatatgacttatgaaaatagttcatgcaatatcatattgttttttgaaattgtaaaacctaagcgaattgaacatatagttatgtgacttatgaaaatagttcatgcaatatcatattgtttggctccactcataacgtatgtacagttgtagatatacatctatggtatcatattgtttgactccactcataacatatgcagaattgtagatatacatctatccttgggcctttactactttgcctgatattccattctcttcactcttaatgcttagctgaattccatcgattttgcggcacttggggctggttcaaaagtagctgctattctacttacttatccttaccaggtcatcagagcccgcttgcagcaacggcctggcactgatggtactccaaagtactcaaatagctggcatgtagtgaaggaaactgcaaagtatgaaggcgtccgtggattttacaggggcatcacgtccaatctactgaaaaaccttccagctgcgtccctcacgttcgtggtgtatgaaaatgttatcaaactattcaaagcaaccaaggagaagacgtagctactcattaaatccaggagtactatgcatggtctgacatttctgagttcaaacgatgcctataatttccattccacgtcaagcccatattttatccatttaacatcgtatatgacaaatatgtaacagtacaggttgtgaccaacctgggtcgtggaaattttttgtacttgcattttgtagagagaaaatacacattttgtttcttcccaaagaaatatgtctttgttatataatccagccgggacgctggcgttgtagatct

SEQ ID NO: 47734 - DNA, 1271 bp, Zea Mays
ccgcggctcccaagttcacgaagcgggaggcgcaagcgaagcggctacctctcgccggagatgccgctggggacctctccagtagtggcggaggccgaggcatggacgtgggagaacgcagcggctggagctgccgccgggttcgccacggtcgcggccctccacccgctcgacgtcgtccgcacccgcttccaagtgagcggcggaagggggtggtctgaagtgcctccgtacaggaacaccgcgcatgctgtgtacactatcacacgatctgagggcctgagaggactttatgcaggattttatcccgcagttcttggatcaactgtttcctggggcctatatttctttttagctaaacaaaggtacttacagaggaagaatgaccagcttcatccagtccatcatctcatctcagctgcagaagcaggtttccttgtttacaaatcccatatggctggtgaaaacaagactgcaactacaaacagctaaacaccatacttctcagtattctggtttttctgatgctttgaaaactattctaagagaggagggatttcttgcactttataggggaattggacctggtcttttgctggtcacccatggcgcaatacagttcacggcctatgaggaacttcgcaaagctatgatattctttaaaagtgcacaatcaagggcagacgacgcaggaggcggggagtcattgctgaattccatcgattttgcggcacttggggctggttcaaaagtagctgctattctacttacttatccttaccaggtcatcagagcccgcttgcagcaacggcctggcactgatggtactccaaagtactcaaatagctggcatgtagtgaaggaaactgcaaagtatgaaggcgtccgtggattttacaggggcatcacgtccaatctactgaaaaaccttccagctgcgtccctcacgttcgtggtgtatgaaaatgttatcaaactattcaaagcaaccaaggagaagacgtagctactcattaaatccaggagtactatgcatggtctgacatttctgagttcaaacgatgcctataatttccattccacgtcaagcccatattttatccatttaacatcgtatatgacaaatatgtaacagtacaggttgtgaccaacctgggtcgtggaaattttttgtacttgcattttgtagagagaaaatacacattttgtttcttcccaaagaaatatgtctttgttatataatccagccgggacgctggcgttgtagatct

SEQ ID NO: 47735 - DNA, 2303 bp, Zea Mays
caactacccgtccagtcgtccacgcaccagagtatcagagacgaccgccattgccccccgtgtcgaacacggggcgtaaagtccttcgagatctcgcttctgcaagcttccgcgccggcgcggtgggtgatatgaaccccgctccggtggcgaacggcgccgcggccggcgctggcgtgggcatgaaccggctgggcggtaggttgtggtacgcggccgccggcgccctcatcgtggcgctcctcgccgtggccgtgagctaccgcagcttcccggacatcccttcgtcgtctcctggaagctgcggctgcccggctgcgaggaagtacacggggatggtggaggattgctgctgcgactatgagacggtggacgccatcaacgaggaggtcctgcatccaatcctacaggaactcgttaagttgcccttctttaggtacttcaaggttaaattgtggtgtgactgccctttttggcccgatgatggaatgtgcaagcttagagattgtagtgtttgtgagtgctcagagaatgagttccccgaaccattcaggaaaccttacagtggactttctccagatagtatgatgtgccaagaaggaaaaccacaggctgcagttgataaaacacttgacagcaaggttttcaaaagatgggttgaaactgacaatccgtggacatctgatgacgagactgataataatgagatgacttacgtgaatcttcaactgaatcctgaacgatacactggctataccggtgattcagcaaggaggatatgggatgctatttataaagagaactgtccaaaatatccctctgaagaactgtgccatgagaagaaggtattgtacaagcttatttcagggttgcactcctcaatctcggtgcatattgcttatgattaccttcttgatgaatctactaactcatggggacaaaatctttctttgctgtatgaccgtgtcctgaagtacccagaacgtgtccagaatctatacttcacctacctgtttgttcttcgagccgtgacaaaggcagcagattatcttgagcaggctgagtacaatactggcaatcctgaagatgacttgaaaacagaatctcttgtgaagcaattgctttacaattcccagttaagatctgcatgtccattgccttttgatgaagccaaactctggcaaggtgaaaatggtcctgagctaaagcaagagattcagaagcaatttagaaacattagtgcaattatggactgtgttggatgcgagaagtgccgactgtggggaaagctccaagttcttggccttggaactgctctgaaaattcttttctccgttgatggagacagccatttgaatcagccgttgcagctgcagcgaaatgaggtcattgcattgttcaatcttctgaacaggctctcagagtctgtcaaatttgtacatgaaaaaggatcatcagtcgaagaagtcatcaacgaacagagcccttcaactgttcaaaagggtgcttccaagacgaatcttaagggcttgttcggttattcccaatacacatggattggatgggattgaaaaaaattgtgaagaagtttgacttgtttgggattcaaacccatccaatcccgctcaatccacatggattgagagctaaccgaacaagccctaaactggacttcctctgagatgtaagggtgtaatttgtagttatagaaggacacgctggaagattaacatagatatgcacggatataccgaaagattaacatgcgctggccgtacgtactttgttgcaaagagatacaaaccctttttagctaaatgtgatgccacagttaaccaaatatacagctagagaactaagggtatgtacaatgatgtttaatgtagagtcttttaaggtgtttaaagggggcatttgcaaaaaaaaagtggagttgtctcttcgtgaagagacgtctctgtctcgtaacctaattagcaacagacgccctgggatagagccaggattacgatataagagggaccgatcaatttatcaatattatatgataaaaaatattgtataatattatcaagtttaagcactcgatatgtaataagaattctagatgttcataaactattttagttcatgagttcattttctaactaattgatatattaaactaaagttgtgacgcaagaacaataccaaaataataaagacgacataacgatgaatatccgacggatgagattcaacttctatataatgactctagtattcatgagggcaactaacaaaattgtgagagaattcaaaaa

SEQ ID NO: 47736 - DNA, 2218 bp, Zea Mays
agtatcagagacgaccgccattgccccccgtgtcgaacacggggcgtaaagtccttcgagatctcgcttctgcaagcttccgcgccggcgcggtgggtgatatgaaccccgctccggtggcgaacggcgccgcggccggcgctggcgtgggcatgaaccggctgggcggtaggttgtggtacgcggccgccggcgccctcatcgtggcgctcctcgccgtggccgtgagctaccgcagcttcccggacatcccttcgtcgtctcctggaagctgcggctgcccggctgcgaggaagtacacggggatggtggaggattgctgctgcgactatgagacggtggacgccatcaacgaggaggtcctgcatccaatcctacaggaactcgttaagttgcccttctttaggtacttcaagatagtatgatgtgccaagaaggaaaaccacaggctgcagttgataaaacacttgacagcaaggttttcaaaagatgggttgaaactgacaatccgtggacatctgatgacgagactgataataatgagatgacttacgtgaatcttcaactgaatcctgaacgatacactggctataccggtgattcagcaaggaggatatgggatgctatttataaagagaactgtccaaaatatccctctgaagaactgtgccatgagaagaaggtattgtacaagcttatttcagggttgcactcctcaatctcggtgcatattgcttatgattaccttcttgatgaatctactaactcatggggacaaaatctttctttgctgtatgaccgtgtcctgaagtacccagaacgtgtccagaatctatacttcacctacctgtttgttcttcgagccgtgacaaaggcagcagattatcttgagcaggctgagtacaatactggcaatcctgaagatgacttgaaaacagaatctcttgtgaagcaattgctttacaattcccagttaagatctgcatgtccattgccttttgatgaagccaaactctggcaaggtgaaaatggtcctgagctaaagcaagagattcagaagcaatttagaaacattagtgcaattatggactgtgttggatgcgagaagtgccgactgtggggaaagctccaagttcttggccttggaactgctctgaaaattcttttctccgttgatggagacagccatttgaatcagccgttgcagctgcagcgaaatgaggtcattgcattgttcaatcttctgaacaggctctcagagtctgtcaaatttgtacatgaaaaaggatcatcagtcgaagaagtcatcaacgaacagagcccttcaactgttcaaaagggtgcttccaagacgaatcttaagggcttgttcggttattcccaatacacatggattggatgggattgaaaaaaattgtgaagaagtttgacttgtttgggattcaaacccatccaatcccgctcaatccacatggattgagagctaaccgaacaagccctaaactggtacccccacccctccccggctttgtattgtttcttgcattcatcgctcgtaatctttcgttattgattcttccgcaggacttcctctgagatgtaagggtgtaatttgtagttatagaaggacacgctggaagattaacatagatatgcacggatataccgaaagattaacatgcgctggccgtacgtactttgttgcaaagagatacaaaccctttttagctaaatgtgatgccacagttaaccaaatatacagctagagaactaagggtatgtacaatgatgtttaatgtagagtcttttaaggtgtttaaagggggcatttgcaaaaaaaaagtggagttgtctcttcgtgaagagacgtctctgtctcgtaacctaattagcaacagacgccctgggatagagccaggattacgatataagagggaccgatcaatttatcaatattatatgataaaaaatattgtataatattatcaagtttaagcactcgatatgtaataagaattctagatgttcataaactattttagttcatgagttcattttctaactaattgatatattaaactaaagttgtgacgcaagaacaataccaaaataataaagacgacataacgatgaatatccgacggatgagattcaacttctatataatgactctagtattcatgagggcaactaacaaaattgtgagagaattcaaaaa

SEQ ID NO: 47737 - DNA, 2092 bp, Zea Mays
gaacacggggcgtaaagtccttcgagatctcgcttctgcaagcttccgcgccggcgcggtgggtgatatgaaccccgctccggtggcgaacggcgccgcggccggcgctggcgtgggcatgaaccggctgggcggtaggttgtggtacgcggccgccggcgccctcatcgtggcgctcctcgccgtggccgtgagctaccgcagcttcccggacatcccttcgtcgtctcctggaagctgcggctgcccggctgcgaggaagtacacggggatggtggaggattgctgctgcgactatgagacggtggacgccatcaacgaggaggtcctgcatccaatcctacaggaactcgttaagttgcccttctttagtatgatgtgccaagaaggaaaaccacaggctgcagttgataaaacacttgacagcaaggttttcaaaagatgggttgaaactgacaatccgtggacatctgatgacgagactgataataatgagatgacttacgtgaatcttcaactgaatcctgaacgatacactggctataccggtgattcagcaaggaggatatgggatgctatttataaagagaactgtccaaaatatccctctgaagaactgtgccatgagaagaaggtattgtacaagcttatttcagggttgcactcctcaatctcggtgcatattgcttatgattaccttcttgatgaatctactaactcatggggacaaaatctttctttgctgtatgaccgtgtcctgaagtacccagaacgtgtccagaatctatacttcacctacctgtttgttcttcgagccgtgacaaaggcagcagattatcttgagcaggctgagtacaatactggcaatcctgaagatgacttgaaaacagaatctcttgtgaagcaattgctttacaattcccagttaagatctgcatgtccattgccttttgatgaagccaaactctggcaaggtgaaaatggtcctgagctaaagcaagagattcagaagcaatttagaaacattagtgcaattatggactgtgttggatgcgagaagtgccgactgtggggaaagctccaagttcttggccttggaactgctctgaaaattcttttctccgttgatggagacagccatttgaatcagccgttgcagctgcagcgaaatgaggtcattgcattgttcaatcttctgaacaggctctcagagtctgtcaaatttgtacatgaaaaaggatcatcagtcgaagaagtcatcaacgaacagagcccttcaactgttcaaaagggtgcttccaagacgaatcttaagggcttgttcggttattcccaatacacatggattggatgggattgaaaaaaattgtgaagaagtttgacttgtttgggattcaaacccatccaatcccgctcaatccacatggattgagagctaaccgaacaagccctaaactggacttcctctgagatgtaagggtgtaatttgtagttatagaaggacacgctggaagattaacatagatatgcacggatataccgaaagattaacatgcgctggccgtacgtactttgttgcaaagagatacaaaccctttttagctaaatgtgatgccacagttaaccaaatatacagctagagaactaagggtatgtacaatgatgtttaatgtagagtcttttaaggtgtttaaagggggcatttgcaaaaaaaaagtggagttgtctcttcgtgaagagacgtctctgtctcgtaacctaattagcaacagacgccctgggatagagccaggattacgatataagagggaccgatcaatttatcaatattatatgataaaaaatattgtataatattatcaagtttaagcactcgatatgtaataagaattctagatgttcataaactattttagttcatgagttcattttctaactaattgatatattaaactaaagttgtgacgcaagaacaataccaaaataataaagacgacataacgatgaatatccgacggatgagattcaacttctatataatgactctagtattcatgagggcaactaacaaaattgtgagagaattcaaaaa

SEQ ID NO: 47738 - DNA, 2748 bp, Zea Mays
acgtcacagccccggctctctgtccccgcttcgcatttcctttccacccaaagtctccctcacctgccagtctgccactcgctcgctctcttccacaacccgcttcccccaaaaaccagatctaccacctgctcggccttagggcgcttcttgggccgagccctagcagtccggaattccgatctcggccaccacctcctcttctctcctctcctctcctgaaagcaatctcaaaagttcagcgggtagcctatcaagatggccgaggaaactgccaatgacgctcaggtggcacaagataacgagattgctctcagcaatgaggcaatccaaggtgatgagttggtccatgttgaagagctgtcccaaggtgatgatttggttcaaggaaatgagctagttgtttctgaggtgacaactcctactattggaaccagacgcaggagaaagaagtctttggtatgggagcacttcactattgaagccgtcgcaggtggggccactagggcatgctgcaagctctgcaagcaaacctttgcttacagctctggttcaaagattgctgggactagccatctcaagaggcacatcaccttgggctcttgtcctaagataaagaatcaagagcagaggctggcgctgccttcaactggagggactgacaatgatggcgagggaactatagagcggcgaaccaagagacgctacagatacactggttatgcaaatgctgcttttgatcaggaccgcagttgctcatacttggcaaagttgatcattcagcatgactacccacttcacattgttcaacagccgtcatttgccatttttattgaaagtctgcagccacgtttcaagattgtggatgttgaaacgatggaaggagaggtatatgctgtttatcagaaagaaaaggagaacctgcttcaagcattcaacagtatgcctggaaggatcagcctcactataggattgtggacaactagtcagactcttgggtacgtttcacttgcagggcagtttattgactctgagtggaaagtgcaccgaagaatgcttaacttcatgatggtgtcatctcctcattcagagaatgcacttagtgaggcaattagcatgagcctttctgactggaatatgaaggacaggctattcaccatcacattggataatgaatgctcctcacatgatatctacagtgcaaatctgagggaccatctctccaacaagaacaatctcatgcttaagggacagctctttgttgtgaggtgctatgcccatatccttaatgctgttgccctagatgtcattgcttcaattcatggtgttgtatacagcattcgtgaaagcataaagttcataaaagcttcttctgcccgcgaagagaagtttgctgagattgctctgcagctggagattcccagtaccaagaccctctgtctggatgttacaacccagtggaacaccacctatctgatgctgctggctgctttggattataagcagactttcactacactagaaacatgtgatgataactacaatgaagctccatcagcagaggattggaagaaagttgaggctgcctgtaattacctgaaactgctatacgattctgcacatagtatcatggcggcagcaaacccaactgcaaacatctttttccatgaagcctggaaacttcagctagagctggcaaatggcacaggccacgaagatcccactttcagtagcatcgccaaggatatgcatgagaggttcgacaagtactggaaagattgcagcctcgtgttagccattgctgttgtcatggatccacgtttcaagatgaagctcgttgagttcagttactcgaaaatctatggggctggggctgcaaagtatgttaaggtggtcgatgatgctgtacatgagctgtataaggagtatgtggctcagccactcccactgaccccagcctatgttgaccaaggcgaagggaataatggaccagccaatgcgaatagcagtcaaggggctcctgcttccactggtgatgggcttctagacttcgatatgtacctttctgagatccaaagtagccagccctcgaaatctgagctggagcagtacctagatgaatccctcactccacgtatccaggagtttgatatcctgaactggtggaagctaaacacggtcaagtttccaaccctctctaaaatggcccgtgatatcttggccattccagtgtccatggtaagcagtggcagctctatattctgtgctggaacaggaagtcacatgctcgatgactacagaagctctctgcggcctgagattgtggaagcacttgtttgcgcgaaagactggctccagtattcaccacctgccaccgaggcaccgagttctgcactggtgaaggctcaaggatcgtaggtttgtcgtggtcactgcctgccttgtggaagcaaagcaagaatccatttacccatctgtcgtatctctgagtgtagttaactgtaggtgtattgtaggctgagattgtgaaccgattttgatatattctggtatctatcacgtaaaggtgtaacatgtgttgaactctgctgaactcgtggctgttctgatgtcgtctgactttgcagtttgcacacttccctatgtgcttgtacaagccgtgggatgtatcttgtttttgtattaaatttgttttataccgtggattgatgtctcagtctatatataagcaggaacatcagtcgtcca

SEQ ID NO: 47739 - DNA, 2825 bp, Zea Mays
attgaattcagaagtttgcgggtacataatcatgtggcacattcttgcgagaccaaggatgcttagggtttgagcagctgtggacatggtctgaagctctgtagcttaaccgtgtcatgcagccccctttgaagttctatagcttaaaccatggcatggtgaaagcccaagctcaatggcgctccagtgtctcacgcacgaattgaagatggcactagcaagtagtgtttcgtctaaacaaggaaaagaaagttaggattttggtgatttatgagcttgttcaagaatacgagtggttgaggaaatctcaaaagttcagcgggtagcctatcaagatggccgaggaaactgccaatgacgctcaggtggcacaagataacgagattgctctcagcaatgaggcaatccaaggtgatgagttggtccatgttgaagagctgtcccaaggtgatgatttggttcaaggaaatgagctagttgtttctgaggtgacaactcctactattggaaccagacgcaggagaaagaagtctttggtatgggagcacttcactattgaagccgtcgcaggtggggccactagggcatgctgcaagctctgcaagcaaacctttgcttacagctctggttcaaagattgctgggactagccatctcaagaggcacatcaccttgggctcttgtcctaagataaagaatcaagagcagaggctggcgctgccttcaactggagggactgacaatgatggcgagggaactatagagcggcgaaccaagagacgctacagatacactggttatgcaaatgctgcttttgatcaggaccgcagttgctcatacttggcaaagttgatcattcagcatgactacccacttcacattgttcaacagccgtcatttgccatttttattgaaagtctgcagccacgtttcaagattgtggatgttgaaacgatggaaggagaggtatatgctgtttatcagaaagaaaaggagaacctgcttcaagcattcaacagtatgcctggaaggatcagcctcactataggattgtggacaactagtcagactcttgggtacgtttcacttgcagggcagtttattgactctgagtggaaagtgcaccgaagaatgcttaacttcatgatggtgtcatctcctcattcagagaatgcacttagtgaggcaattagcatgagcctttctgactggaatatgaaggacaggctattcaccatcacattggataatgaatgctcctcacatgatatctacagtgcaaatctgagggaccatctctccaacaagaacaatctcatgcttaagggacagctctttgttgtgaggtgctatgcccatatccttaatgctgttgccctagatgtcattgcttcaattcatggtgttgtatacagcattcgtgaaagcataaagttcataaaagcttcttctgcccgcgaagagaagtttgctgagattgctctgcagctggagattcccagtaccaagaccctctgtctggatgttacaacccagtggaacaccacctatctgatgctgctggctgctttggattataagcagactttcactacactagaaacatgtgatgataactacaatgaagctccatcagcagaggattggaagaaagttgaggctgcctgtaattacctgaaactgctatacgattctgcacatagtatcatggcggcagcaaacccaactgcaaacatctttttccatgaagcctggaaacttcagctagagctggcaaatggcacaggccacgaagatcccactttcagtagcatcgccaaggatatgcatgagaggttcgacaagtactggaaagattgcagcctcgtgttagccattgctgttgtcatggatccacgtttcaagatgaagctcgttgagttcagttactcgaaaatctatggggctggggctgcaaagtatgttaaggtggtcgatgatgctgtacatgagctgtataaggagtatgtggctcagccactcccactgaccccagcctatgttgaccaaggcgaagggaataatggaccagccaatgcgaatagcagtcaaggggctcctgcttccactggtgatgggcttctagacttcgatatgtacctttctgagatccaaagtagccagccctcgaaatctgagctggagcagtacctagatgaatccctcactccacgtatccaggagtttgatatcctgaactggtggaagctaaacacggtcaagtttccaaccctctctaaaatggcccgtgatatcttggccattccagtgtccatggtaagcagtggcagctctatattctgtgctggaacaggaagtcacatgctcgatgactacagaagctctctgcggcctgagattgtggaagcacttgtttgcgcgaaagactggctccagtattcaccacctgccaccgaggcaccgagttctgcactggtgaaggctcaaggatcgtaggtttgtcgtggtcactgcctgccttgtggaagcaaagcaagaatccatttacccatctgtcgtatctctgagtgtagttaactgtaggtgtattgtaggctgagattgtgaaccgattttgatatattctggtatctatcacgtaaaggtgtaacatgtgttgaactctgctgaactcgtggctgttctgatgtcgtctgactttgcagtttgcacacttccctatgtgcttgtacaagccgtgggatgtatcttgtttttgtattaaatttgttttataccgtggattgatgtctcagtctatatataagcaggaacatcagtcgtcca

SEQ ID NO: 47740 - DNA, 2867 bp, Zea Mays
attgaattcagaagtttgcgggtacataatcatgtggcacattcttgcgagaccaaggatgcttagggtttgagcagctgtggacatggtctgaagctctgtagcttaaccgtgtcatgcagccccctttgaagttctatagcttaaaccatggcatggtgaaagcccaagctcaatggcgctccagtgtctcacgcacgaattgaagatggcactagcaagtagtgtttcgtctaaacaaggaaaagaaagttaggattttggtgatttatgagcttgttcaagaatacgagtggttgaggaagtaagggcatacgtttttggcttttatgcattttgtttgacgatctcaaaagttcagcgggtagcctatcaagatggccgaggaaactgccaatgacgctcaggtggcacaagataacgagattgctctcagcaatgaggcaatccaaggtgatgagttggtccatgttgaagagctgtcccaaggtgatgatttggttcaaggaaatgagctagttgtttctgaggtgacaactcctactattggaaccagacgcaggagaaagaagtctttggtatgggagcacttcactattgaagccgtcgcaggtggggccactagggcatgctgcaagctctgcaagcaaacctttgcttacagctctggttcaaagattgctgggactagccatctcaagaggcacatcaccttgggctcttgtcctaagataaagaatcaagagcagaggctggcgctgccttcaactggagggactgacaatgatggcgagggaactatagagcggcgaaccaagagacgctacagatacactggttatgcaaatgctgcttttgatcaggaccgcagttgctcatacttggcaaagttgatcattcagcatgactacccacttcacattgttcaacagccgtcatttgccatttttattgaaagtctgcagccacgtttcaagattgtggatgttgaaacgatggaaggagaggtatatgctgtttatcagaaagaaaaggagaacctgcttcaagcattcaacagtatgcctggaaggatcagcctcactataggattgtggacaactagtcagactcttgggtacgtttcacttgcagggcagtttattgactctgagtggaaagtgcaccgaagaatgcttaacttcatgatggtgtcatctcctcattcagagaatgcacttagtgaggcaattagcatgagcctttctgactggaatatgaaggacaggctattcaccatcacattggataatgaatgctcctcacatgatatctacagtgcaaatctgagggaccatctctccaacaagaacaatctcatgcttaagggacagctctttgttgtgaggtgctatgcccatatccttaatgctgttgccctagatgtcattgcttcaattcatggtgttgtatacagcattcgtgaaagcataaagttcataaaagcttcttctgcccgcgaagagaagtttgctgagattgctctgcagctggagattcccagtaccaagaccctctgtctggatgttacaacccagtggaacaccacctatctgatgctgctggctgctttggattataagcagactttcactacactagaaacatgtgatgataactacaatgaagctccatcagcagaggattggaagaaagttgaggctgcctgtaattacctgaaactgctatacgattctgcacatagtatcatggcggcagcaaacccaactgcaaacatctttttccatgaagcctggaaacttcagctagagctggcaaatggcacaggccacgaagatcccactttcagtagcatcgccaaggatatgcatgagaggttcgacaagtactggaaagattgcagcctcgtgttagccattgctgttgtcatggatccacgtttcaagatgaagctcgttgagttcagttactcgaaaatctatggggctggggctgcaaagtatgttaaggtggtcgatgatgctgtacatgagctgtataaggagtatgtggctcagccactcccactgaccccagcctatgttgaccaaggcgaagggaataatggaccagccaatgcgaatagcagtcaaggggctcctgcttccactggtgatgggcttctagacttcgatatgtacctttctgagatccaaagtagccagccctcgaaatctgagctggagcagtacctagatgaatccctcactccacgtatccaggagtttgatatcctgaactggtggaagctaaacacggtcaagtttccaaccctctctaaaatggcccgtgatatcttggccattccagtgtccatggtaagcagtggcagctctatattctgtgctggaacaggaagtcacatgctcgatgactacagaagctctctgcggcctgagattgtggaagcacttgtttgcgcgaaagactggctccagtattcaccacctgccaccgaggcaccgagttctgcactggtgaaggctcaaggatcgtaggtttgtcgtggtcactgcctgccttgtggaagcaaagcaagaatccatttacccatctgtcgtatctctgagtgtagttaactgtaggtgtattgtaggctgagattgtgaaccgattttgatatattctggtatctatcacgtaaaggtgtaacatgtgttgaactctgctgaactcgtggctgttctgatgtcgtctgactttgcagtttgcacacttccctatgtgcttgtacaagccgtgggatgtatcttgtttttgtattaaatttgttttataccgtggattgatgtctcagtctatatataagcaggaacatcagtcgtcca

SEQ ID NO: 47741 - DNA, 2958 bp, Zea Mays
cttcaactcctcagcacgtttaactacttgcattcagcattgcgttgcatggcttggtgacattggtcacttttctattgtcttgctcgtgctatatccatacacgtttaaaaacatagtctcattccttacatctctctcatacatataatgttcttttttttgtacttttgaataccatcatgattgagacgtcatcattatgtcatctagcttaacaaaatataatcctcacttagcttttggaatgtttctgcaatgttggtggtggtctctgaacctcaacttgaaaataagttcctgtggactgctgccataaacaatcagatcttgttaataatggtattcttggattccattggcttctatcttcagtatggatgagccaaacaacaattttaatgcaacggtgcatgccaatgagatgtttgatagcaatggtgtgatccatgaagatgagatggcccatgacgatgagatgatccatggccatgcgatgttccttggcgatgagatgattcgtgggaccgagatggttgaaggaagtgagatgatccatggtcatgatatggttcaggttaatgatctcatccacggcaatgagatggttccagttcacgacatggtcaacggtgacaagatagcccatggtaatgaattggttaattctcagatgaccccacgaatatcaagacgtcggaagaagaagtcgctagtttgggagcacttcactatagaactcatgccagggggaagttcaagagcatgctgcaagttatgcaagcaaacctttgcgtatagttctggctcaaaaattgcaggcactagccatctcaagcggcacatcacactaggctcctgtcctgttatgaaagaccaagacaggaagctagcattgccacttgcagggggccatgtcactgataatgatggtgagggtactgcagaacgtcctactaagaggcgttacagatacactggttatgcaaatgctacttttgatccacagcggagcacctcttatctgacaaagatgataattttgcatgactacccacttcacattgctcaacagtcatcctttattaattttattgagagtctgcagcctcgtttcagagttgtagatgtggagacaatggaaggagaggtgtatgctgttttccagaaagcaaaagaaaacctgttgcaagcattcagcactatgccaggaaggatcagcctcactataggactctggacaaccagtcagactcttggctatgtttctcttgctgggcagtttattgactccgattggaaagtgcaccgaagaatgctcaacttcatgatggtgtcttctccccattcagagaatgcacttagtgaagctattagctcaagcctttctgagtggaatatgaaggacaagctgttcactatcacattggataatgattgctcttcccatgatatttacagtgcaaatcttagggatcacctctccaataagaacaacgtcatgcttaagggacagctctttgttgtgaggtgctatgcacatatcctgaatgtagttgctcaagatgtaattgcttcgattcatggtgtgatttacagcatccgtgagagtatcaagttcataaaagcttctccaagtcgtgaggagaagtttgctgagattgctctgcagctggagattcccagtaccaagactctttgtttagatgttacaacccagtggaacacaacttatctgatgctactggctgccttggactataagcaggcttttgctacactggagacatgtgatgataattacaatgaatctccttcagcagaggactggaagaaagttgaggctagctgtaattacctgaaactgctatatgactctgcacatagtgtgatggcttcagcgaaccctactgcaaacatctttttccatgaagcttggaaaattcagcttgaactagccaatggcacagaacatggaagtccctttttcagctgtattgccaaggatatgcatgagagatttgacaaatactggaaagattgcagcctggtgttagccattgctgttgttatggatccacgtttcaagatgaagcttgtcgagttcagttactctaaaatttatggtgctgaggctgcaaaatatgttaaggttgtcaatgactctctgcatgagctgtataaggagtatgtggcacagacactccccttggctcctgcctatgttgaagctaataacgtggctgccaacacgaatgttaaccagggaaatcctcctccaactagtgatggtcttcttgactttgatatgtacctttctgagattcaaagtagccagcctgcaaaatgtgaactggagcagtatctggaggaatctctcactccacgcatccaggagtttgatattcttaactggtggaagcttaatacacttaagtttccaaccctgtcgaagatggcccgtgatatcttggcaatcccaatgtcgatggttagcagtggcagctccatattctctgctggaactgggaaccgcatgcttgatgattacagaagctctctccggccggagactgtggaggcacttgtatgcgcaaaagactggctccagtattcaccggccgcaactgaggcgccaggttctgagatgatgaaagcagaagcattgtagattgccgatactgcttccctgttgaagcacaaataaggttgcagtatctttgagcatagttaacagtaggtatattttaggcagcagttgcagacatatatttcttctggcatttatctcatagtggtctaatttgtcatgtcgaacaaagtttaactcattgtagtgtgagctgagtttatctgtggtctgacccggcacacatggtgcgggtgcaaactgcaaactgcgggattttttagggattcaggttgttgagcaccatttatggcactgggcatggtcgg

SEQ ID NO: 47742 - DNA, 1134 bp, Zea Mays
ccggcccaatattacactgaggagtgaggagcacaattccttccaggatcccagaagattcgacgttccacgggctccggcggcggcaggaacgcctcccgatttcgacggcagaactagagagcgatggcgctgactaacttcatcgtgacggtggccgtggttggcgcgggggtgcttctctttaccaccgacatccgcaggtctggcgccctcttccgccgcaacgcgcgccagctccggctgtggctcgaggaggacacggcctccgccgcgtccaagtctgcaaaagaagcagctccaaagaaactcgactcgacggtccccaaggagaagccaaaggaagatagtcactgattggagctgtttatatgaacggagaggaaaccgtcggcattctgaatcagatagaggtgacgcaacctgggacagctgccgggtggacggtccgtcgactggtggaggaggagaggtgagcagcgactgtacgagtcggaaggtggtgttgaatgatggctgctccagtgcagtgcatgggatcactcgaggttgcactagcaactttcgacgtggttgttggttcagttaggtttgcaatcgtcgtcgtccctcgcagatcatcacagggtggcgaggagatactaacagtgtatggacggtgagtctgaggagaccatcatgcctttgtcgttcagagccgggctagcacttgactgattggcctgcagagcggaaatggaaagccagagccaaaccctgctctgctcaccgtcggagataagagctcgcattgcatcagccggtctcttccgcgcacagccggactctcttcaccaaggcacacggccacacgggtcacgaggaaagtttcctttaaatacccactcggtactcatatagtataagacataaccacttttttattttatccccacgatataaagtgttctctctaaatagtgttctctctctaaatatacgtgaattgatgtaatattattagtactaatatagagaattaaatacatttattggttttgaaccagaggtgggtacaccttatatactaggacaaagagattatgatctgttcagttgggttattgctatgaaaaaagctatcatgggttgtag

SEQ ID NO: 47743 - DNA, 1534 bp, Zea Mays
caatattacactgaggagtgaggagcacaattccttccaggatcccagaagattcgacgttccacgggctccggcggcggcaggaacgcctcccgatttcgacggcagaactagagagcgatggcgctgactaacttcatcgtgacggtggccgtggttggcgcgggggtgcttctctttaccaccgacatccgcaggtctggcgccctcttccgccgcaacgcgcgccagctccggctgtggctcgaggaggacacggcctccgccgcgtccaagtctgcaaaagaagcagctccaaagaaactcgactcgacggtccccaaggagaagccaaaggaagatagtcactgattggagctgtttatatgaacggtataacccctatttgaagtattgcaagttccgttttctacagttgctgcgatacaaacttgtagctctcaagtaaggtgcacggcaagattatgtttccgtttcaacatcggcctctgtggaacagctagctaaatgttggtattatgtcgtgtgcttatatggatctgaagcacttcgctaatctacacgtacctcaaatcttgttgatgttgtactgtgcccccccccccccccccccccccccaattttgtaactgttgcgctggctgccgatttttctgcgccctgatcaatctgaagcggttgatttaagcagaccttgaatgaagggaatcatggtgcatttaaatgcaaccgtcgcctaacgtgtgtccgagtggggttttcttgtttttttgagcaggagaggaaaccgtcggcattctgaatcagatagaggtgacgcaacctgggacagctgccgggtggacggtccgtcgactggtggaggaggagaggtgagcagcgactgtacgagtcggaaggtggtgttgaatgatggctgctccagtgcagtgcatgggatcactcgaggttgcactagcaactttcgacgtggttgttggttcagttaggtttgcaatcgtcgtcgtccctcgcagatcatcacagggtggcgaggagatactaacagtgtatggacggtgagtctgaggagaccatcatgcctttgtcgttcagagccgggctagcacttgactgattggcctgcagagcggaaatggaaagccagagccaaaccctgctctgctcaccgtcggagataagagctcgcattgcatcagccggtctcttccgcgcacagccggactctcttcaccaaggcacacggccacacgggtcacgaggaaagtttcctttaaatacccactcggtactcatatagtataagacataaccacttttttattttatccccacgatataaagtgttctctctaaatagtgttctctctctaaatatacgtgaattgatgtaatattattagtactaatatagagaattaaatacatttattggttttgaaccagaggtgggtacaccttatatactaggacaaagagattatgatctgttcagttgggttattgctatgaaaaaagctatcatgggttgtag

SEQ ID NO: 47744 - DNA, 2103 bp, Zea Mays
ctcttccccaactctgcccaaaaatttgaaatccttttcgcttccatcttcaccgacccccgagcaccctatctagatggcggatccaccgcctgtgctcacgctcctggtgaagaagggaccctgcgaggggaagaccgtgcatcgccgcgccggcgccacggcgctccgtgtcggccgcgttgccaagggcaacgacctctccgtgggcgacgctggcgcgtcgcagaggcatctctccgtcaagttcctcccgccgcctgcggcccggtggtccgtcaccgatttatgctcctccaacggcaccctcctcaacggtacgcctctcgtggccactatccccgccccgctctccgacggggacctcatcaagatcggggaggccaccgtgctcgccgtctccatatcgaccgaggcaggcccggtaccgggcgccgccgcgactaggcgttccgcgcgcaacgcagcagccgtggcgacggcggcggaggaacaggtggccgctgtttctcgcagggtcggacggaggaaggccgtttcggctgaagcccccgaagctgggaatgaagtggaggaggaagctgcactcccgactcgccgaggcgggcggaggaaggccgttgagcccgctggggtggagacggaagaggaagacgaagaggaggaagcggcaataccgcgccgtagcaggccgaggaaggctgcagcgacggttgtccttccgccacagccgcaaaatatgaggtctacgagggctgctgcaaggagagttgaggttttggggtgcgaaaacgatgagggagaagtggtgaggaccgggtccgggaggggtcgaggacgggttacaagggcaaatgcaaggaatggtacgggtgttactcccggggaggaggaagacgagagtgaggtggctctggccagagatcgggaagggacagctgccgagcgcaagggtgaagtggtgccggcggctgggagaggacgatcaaagaggagcagaggaggccgaggccgaggaagggctacgagggcaagtacaaggaagcctgagggtgctattgttgggaacgatgaaaatgagcaagaggaaacggatatagttgatggcagagaacgattgagtgtgttgaccgtaaatgatggttctcaagaagataaagtggcaaatgaggttgataagttggatggaaactcaaagacacccttagaggatgagaagatggtggatgtggagcatgcgacattgacagagaggacgatagaggggagggtcaatgctcagcattctcctgctgacagtggtggtctggaagaagaggaggtgaagaatttgaccaagggaggggaaatcgaagtagaaaaggaattgagggaaagagtgtcaccagagtcaaagctggatggtgttggagaagtggaaaagaatgacaagagggaagttattggtgccggtggagagaaaggccatgtgtgggagcgcaaaggaagacacagattagagaatatgacattgggggagtggtttgttcaaatcgagaaataccttctagcaaagaatgaagaggctgctgaaatggcgatatctgaagtgcaagagaaacaccggcggttttgtgaacatgttaaaacgttcgagctcaaaaagggtactgctccttgagattccatggataatctggaaatattttggacagcctagtgttggataatttgacaccatcagatatcacaatgaagacaataacactgaagcgttgcaaactatgtcagaatgattcctggagtccagtcctgaacaaacgaacaaggtcgctgagctgccggggtgaggccactgttcaagccactggggtgaagacactatgatcttatcgctggagatatagcagggtgctacatttcactagcattaccgtttgtaatttgattcaccctcctttgtacataagaattcgtgatgttaaaggtcggaacaataaagttccattcgttgtttggccaaagaattgcacatatatcagataaaagaaagcagagtgatcttcaaatatctaaagaatttcatgtgcaatgcaacatgccaacatgctatactatatatac

SEQ ID NO: 47745 - DNA, 2080 bp, Zea Mays
ctcttccccaactctgcccaaaaatttgaaatccttttcgcttccatcttcaccgacccccgagcaccctatctagatggcggatccaccgcctgtgctcacgctcctggtgaagaagggaccctgcgaggggaagaccgtgcatcgccgcgccggcgccacggcgctccgtgtcggccgcgttgccaagggcaacgacctctccgtgggcgacgctggcgcgtcgcagaggcatctctccgtcaagttcctcccgccgcctgcggcccggtggtccgtcaccgatttatgctcctccaacggcaccctcctcaacggtacgcctctcgtggccactatccccgccccgctctccgacggggacctcatcaagatcggggaggccaccgtgctcgccgtctccatatcgaccgaggcaggcccggtaccgggcgccgccgcgactaggcgttccgcgcgcaacgcagcagccgtggcgacggcggcggaggaacaggtggccgctgtttctcgcagggtcggacggaggaaggccgtttcggctgaagcccccgaagctgggaatgaagtggaggaggaagctgcactcccgactcgccgaggcgggcggaggaaggccgttgagcccgctggggtggagacggaagaggaagacgaagaggaggaagcggcaataccgcgccgtagcaggccgaggaaggctgcagcgacggttgtccttccgccacagccgcaaaatatgaggtctacgagggctgctgcaaggagagttgaggttttggggtgcgaaaacgatgagggagaagtggtgaggaccgggtccgggaggggtcgaggacgggttacaagggcaaatgcaaggaatggtacgggtgttactcccggggaggaggaagacgagagtgaggtggctctggccagagatcgggaagggacagctgccgagcgcaagggtgaagtggtgccggcggctgggagaggacgatcaaagaggagcagaggaggccgaggccgaggaagggctacgagggcaagtacaaggaagcctgagggtgctattgttgggaacgatgaaaatgagcaagaggaaacggatatagttgatggcagagaacgattgagtgtgttgaccgtaaatgatggttctcaagaagataaagtggcaaatgaggttgataagttggatggaaactcaaagacacccttagaggatgagaagatggtggatgtggagcatgcgacattgacagagaggacgatagaggggagggtcaatgctcagcattctcctgctgacagtggtggtctggaagaagaggaggtgaagaatttgaccaagggaggggaaatcgaagtagaaaaggaattgagggaaagagtgtcaccagagtcaaagctggatggtgttggagaagtggaaaagaatgacaagagggaagttattggtgccggtggagagaaaggccatgtgtgggagcgcaaaggaagacacagattagagaatatgacattgggggagtggtttgttcaaatcgagaaataccttctagcaaagaatgaagaggctgctgaaatggcgatatctgaagtgcaagagaaacaccggcggttttgtgaacatgttaaaacgttcgagctcaaaaagggataatctggaaatattttggacagcctagtgttggataatttgacaccatcagatatcacaatgaagacaataacactgaagcgttgcaaactatgtcagaatgattcctggagtccagtcctgaacaaacgaacaaggtcgctgagctgccggggtgaggccactgttcaagccactggggtgaagacactatgatcttatcgctggagatatagcagggtgctacatttcactagcattaccgtttgtaatttgattcaccctcctttgtacataagaattcgtgatgttaaaggtcggaacaataaagttccattcgttgtttggccaaagaattgcacatatatcagataaaagaaagcagagtgatcttcaaatatctaaagaatttcatgtgcaatgcaacatgccaacatgctatactatatatac

SEQ ID NO: 47746 - DNA, 2067 bp, Zea Mays
cccaactctgcccaaaaatttgaaatccttttcgcttccatcttcaccgacccccgagcaccctatctagatggcggatccaccgcctgtgctcacgctcctggtgaagaagggaccctgcgaggggaagaccgtgcatcgccgcgccggcgccacggcgctccgtgtcggccgcgttgccaagggcaacgacctctccgtgggcgacgctggcgcgtcgcagaggcatctctccgtcaagttcctcccgccgcctgcggcccggtggtccgtcaccgatttatgctcctccaacggcaccctcctcaacggtacgcctctcgtggccactatccccgccccgctctccgacggggacctcatcaagatcggggaggccaccgtgctcgccgtctccatatcgaccgaggcaggcccggtaccgggcgccgccgcgactaggcgttccgcgcgcaacgcagcagccgtggcgacggcggcggaggaacaggtggccgctgtttctcgcagggtcggacggaggaaggccgtttcggctgaagcccccgaagctgggaatgaagtggaggaggaagctgcactcccgactcgccgaggcgggcggaggaaggccgttgagcccgctggggtggagacggaagaggaagacgaagaggaggaagcggcaataccgcgccgtagcaggccgaggaaggctgcagcgacggttgtccttccgccacagccgcaaaatatgaggtctacgagggctgctgcaaggagagttgaggttttggggtgcgaaaacgatgagggagaagtggtgaggaccgggtccgggaggggtcgaggacgggttacaagggcaaatgcaaggaatggtacgggtgttactcccggggaggaggaagacgagagtgaggtggctctggccagagatcgggaagggacagctgccgagcgcaagggtgaagtggtgccggcggctgggagaggacgatcaaagaggagcagaggaggccgaggccgaggaagggctacgagggcaagtacaaggaagcctgagggtgctattgttgggaacgatgaaaatgagcaagaggaaacggatatagttgatggcagagaacgattgagtgtgttgaccgtaaatgatggttctcaagaagataaagtggcaaatgaggttgataagttggatggaaactcaaagacacccttagaggatgagaagatggtggatgtggagcatgcgacattgacagagaggacgatagaggggagggtcaatgctcagcattctcctgctgacagtggtggtctggaagaagaggaggtgaagaatttgaccaagggaggggaaatcgaagtagaaaaggaattgagggaaagagtgtcaccagagtcaaagctggatggtgttggagaagtggaaaagaatgacaagagggaagttattggtgccggtggagagaaaggccatgtgtgggagcgcaaaggaagacacagattagagaatatgacattgggggagtggtttgttcaaatcgagaaataccttctagcaaagaatgaagaggctgctgaaatggcgatatctgaagtgcaagagaaacaccggcggttttgtgaacatgttaaaacgttcgagctcaaaaagggataatctggaaatattttggacagcctagtgttggataatttgacaccatcagatatcacaatgaagacaataacactgaagcgttgcaaactaatgattcctggagtccagtcctgaacaaacgaacaaggtcgctgagctgccggggtgaggccactgttcaagccactggggtgaagacactatgatcttatcgctggagatatagcagggtgctacatttcactagcattaccgtttgtaatttgattcaccctcctttgtacataagaattcgtgatgttaaaggtcggaacaataaagttccattcgttgtttggccaaagaattgcacatatatcagataaaagaaagcagagtgatcttcaaatatctaaagaatttcatgtgcaatgcaacatgccaacatgctatactatatatac

SEQ ID NO: 47747 - DNA, 2376 bp, Zea Mays
cccaactctgcccaaaaatttgaaatccttttcgcttccatcttcaccgacccccgagcaccctatctagatggcggatccaccgcctgtgctcacgctcctggtgaagaagggaccctgcgaggggaagaccgtgcatcgccgcgccggcgccacggcgctccgtgtcggccgcgttgccaagggcaacgacctctccgtgggcgacgctggcgcgtcgcagaggcatctctccgtcaagttcctcccgccgcctgcggcccggtggtccgtcaccgatttatgctcctccaacggcaccctcctcaacggtacgcctctcgtggccactatccccgccccgctctccgacggggacctcatcaagatcggggaggccaccgtgctcgccgtctccatatcgaccgaggcaggcccggtaccgggcgccgccgcgactaggcgttccgcgcgcaacgcagcagccgtggcgacggcggcggaggaacaggtggccgctgtttctcgcagggtcggacggaggaaggccgtttcggctgaagcccccgaagctgggaatgaagtggaggaggaagctgcactcccgactcgccgaggcgggcggaggaaggccgttgagcccgctggggtggagacggaagaggaagacgaagaggaggaagcggcaataccgcgccgtagcaggccgaggaaggctgcagcgacggttgtccttccgccacagccgcaaaatatgaggtctacgagggctgctgcaaggagagttgaggttttggggtgcgaaaacgatgagggagaagtggtgaggaccgggtccgggaggggtcgaggacgggttacaagggcaaatgcaaggaatggtacgggtgttactcccggggaggaggaagacgagagtgaggtggctctggccagagatcgggaagggacagctgccgagcgcaagggtgaagtggtgccggcggctgggagaggacgatcaaagaggagcagaggaggccgaggccgaggaagggctacgagggcaagtacaaggaagcctgagggtgctattgttgggaacgatgaaaatgagcaagaggaaacggatatagttgatggcagagaacgattgagtgtgttgaccgtaaatgatggttctcaagaagataaagtggcaaatgaggttgataagttggatggaaactcaaagacacccttagaggatgagaagatggtggatgtggagcatgcgacattgacagagaggacgatagaggggagggtcaatgctcagcattctcctgctgacagtggtggtctggaagaagaggaggtgaagaatttgaccaagggaggggaaatcgaagtagaaaaggaattgagggaaagagtgtcaccagagtcaaagctggatggtgttggagaagtggaaaagaatgacaagagggaagttattggtgccggtggagagaaaggccatgtgtgggagcgcaaaggaagacacagattagagaatatgacattgggggagtggtttgttcaaatcgagaaataccttctagcaaagaatgaagaggctgctgaaatggcgatatctgaagtgcaagagaaacaccggcggttttgtgaacatgttaaaacgttcgagctcaaaaagggataatctggaaatattttggacagcctagtgttggataatttgacaccatcagatatcacaatgaagacaataacactgaagcgttgcaaactgtaggtttgtgatataaccatcattagcagggtggtgacattggaaattgtttattccagacttaggccttgtttgataatcttgctatggacatatgtattggaaactggatacatatgctgtacaagaaaatgtagaggtcaaaactgtttgtgaaaagaatagggcaccatgaaaaccgggcggcttttttttgcattataggcccgttcggctttcacggattcatggcccggaacgatggctagttcttacttcatagacagattgattatctaatttatataagattttttattagatgtcagaatgattcctggagtccagtcctgaacaaacgaacaaggtcgctgagctgccggggtgaggccactgttcaagccactggggtgaagacactatgatcttatcgctggagatatagcagggtgctacatttcactagcattaccgtttgtaatttgattcaccctcctttgtacataagaattcgtgatgttaaaggtcggaacaataaagttccattcgttgtttggccaaagaattgcacatatatcagataaaagaaagcagagtgatcttcaaatatctaaagaatttcatgtgcaatgcaacatgccaacatgctatactatatatac

SEQ ID NO: 47748 - DNA, 2101 bp, Zea Mays
cccaactctgcccaaaaatttgaaatccttttcgcttccatcttcaccgacccccgagcaccctatctagatggcggatccaccgcctgtgctcacgctcctggtgaagaagggaccctgcgaggggaagaccgtgcatcgccgcgccggcgccacggcgctccgtgtcggccgcgttgccaagggcaacgacctctccgtgggcgacgctggcgcgtcgcagaggcatctctccgtcaagttcctcccgccgcctgcggcccggtggtccgtcaccgatttatgctcctccaacggcaccctcctcaacggtacgcctctcgtggccactatccccgccccgctctccgacggggacctcatcaagatcggggaggccaccgtgctcgccgtctccatatcgaccgaggcaggcccggtaccgggcgccgccgcgactaggcgttccgcgcgcaacgcagcagccgtggcgacggcggcggaggaacaggtggccgctgtttctcgcagggtcggacggaggaaggccgtttcggctgaagcccccgaagctgggaatgaagtggaggaggaagctgcactcccgactcgccgaggcgggcggaggaaggccgttgagcccgctggggtggagacggaagaggaagacgaagaggaggaagcggcaataccgcgccgtagcaggccgaggaaggctgcagcgacggttgtccttccgccacagccgcaaaatatgaggtctacgagggctgctgcaaggagagttgaggttttggggtgcgaaaacgatgagggagaagtggtgaggaccgggtccgggaggggtcgaggacgggttacaagggcaaatgcaaggaatggtacgggtgttactcccggggaggaggaagacgagagtgaggtggctctggccagagatcgggaagggacagctgccgagcgcaagggtgaagtggtgccggcggctgggagaggacgatcaaagaggagcagaggaggccgaggccgaggaagggctacgagggcaagtacaaggaagcctgagggtgctattgttgggaacgatgaaaatgagcaagaggaaacggatatagttgatggcagagaacgattgagtgtgttgaccgtaaatgatggttctcaagaagataaagtggcaaatgaggttgataagttggatggaaactcaaagacacccttagaggatgagaagatggtggatgtggagcatgcgacattgacagagaggacgatagaggggagggtcaatgctcagcattctcctgctgacagtggtggtctggaagaagaggaggtgaagaatttgaccaagggaggggaaatcgaagtagaaaaggaattgagggaaagagtgtcaccagagtcaaagctggatggtgttggagaagtggaaaagaatgacaagagggaagttattggtgccggtggagagaaaggccatgtgtgggagcgcaaaggaagacacagattagagaatatgacattgggggagtggtttgttcaaatcgagaaataccttctagcaaagaatgaagaggctgctgaaatggcgatatctgaagtgcaagagaaacaccggcggttttgtgaacatgttaaaacgttcgagctcaaaaagggtactgctccttgagattccatggataatctggaaatattttggacagcctagtgttggataatttgacaccatcagatatcacaatgaagacaataacactgaagcgttgcaaactgtagatgtcagaatgattcctggagtccagtcctgaacaaacgaacaaggtcgctgagctgccggggtgaggccactgttcaagccactggggtgaagacactatgatcttatcgctggagatatagcagggtgctacatttcactagcattaccgtttgtaatttgattcaccctcctttgtacataagaattcgtgatgttaaaggtcggaacaataaagttccattcgttgtttggccaaagaattgcacatatatcagataaaagaaagcagagtgatcttcaaatatctaaagaatttcatgtgcaatgcaacatgccaacatgctatactatatatac

SEQ ID NO: 47749 - DNA, 2073 bp, Zea Mays
ctctgcccaaaaatttgaaatccttttcgcttccatcttcaccgacccccgagcaccctatctagatggcggatccaccgcctgtgctcacgctcctggtgaagaagggaccctgcgaggggaagaccgtgcatcgccgcgccggcgccacggcgctccgtgtcggccgcgttgccaagggcaacgacctctccgtgggcgacgctggcgcgtcgcagaggcatctctccgtcaagttcctcccgccgcctgcggcccggtggtccgtcaccgatttatgctcctccaacggcaccctcctcaacggtacgcctctcgtggccactatccccgccccgctctccgacggggacctcatcaagatcggggaggccaccgtgctcgccgtctccatatcgaccgaggcaggcccggtaccgggcgccgccgcgactaggcgttccgcgcgcaacgcagcagccgtggcgacggcggcggaggaacaggtggccgctgtttctcgcagggtcggacggaggaaggccgtttcggctgaagcccccgaagctgggaatgaagtggaggaggaagctgcactcccgactcgccgaggcgggcggaggaaggccgttgagcccgctggggtggagacggaagaggaagacgaagaggaggaagcggcaataccgcgccgtagcaggccgaggaaggctgcagcgacggttgtccttccgccacagccgcaaaatatgaggtctacgagggctgctgcaaggagagttgaggttttggggtgcgaaaacgatgagggagaagtggtgaggaccgggtccgggaggggtcgaggacgggttacaagggcaaatgcaaggaatggtacgggtgttactcccggggaggaggaagacgagagtgaggtggctctggccagagatcgggaagggacagctgccgagcgcaagggtgaagtggtgccggcggctgggagaggacgatcaaagaggagcagaggaggccgaggccgaggaagggctacgagggcaagtacaaggaagcctgagggtgctattgttgggaacgatgaaaatgagcaagaggaaacggatatagttgatggcagagaacgattgagtgtgttgaccgtaaatgatggttctcaagaagataaagtggcaaatgaggttgataagttggatggaaactcaaagacacccttagaggatgagaagatggtggatgtggagcatgcgacattgacagagaggacgatagaggggagggtcaatgctcagcattctcctgctgacagtggtggtctggaagaagaggaggtgaagaatttgaccaagggaggggaaatcgaagtagaaaaggaattgagggaaagagtgtcaccagagtcaaagctggatggtgttggagaagtggaaaagaatgacaagagggaagttattggtgccggtggagagaaaggccatgtgtgggagcgcaaaggaagacacagattagagaatatgacattgggggagtggtttgttcaaatcgagaaataccttctagcaaagaatgaagaggctgctgaaatggcgatatctgaagtgcaagagaaacaccggcggttttgtgaacatgttaaaacgttcgagctcaaaaagggataatctggaaatattttggacagcctagtgttggataatttgacaccatcagatatcacaatgaagacaataacactgaagcgttgcaaactgtagatgtcagaatgattcctggagtccagtcctgaacaaacgaacaaggtcgctgagctgccggggtgaggccactgttcaagccactggggtgaagacactatgatcttatcgctggagatatagcagggtgctacatttcactagcattaccgtttgtaatttgattcaccctcctttgtacataagaattcgtgatgttaaaggtcggaacaataaagttccattcgttgtttggccaaagaattgcacatatatcagataaaagaaagcagagtgatcttcaaatatctaaagaatttcatgtgcaatgcaacatgccaacatgctatactatatatac

SEQ ID NO: 47750 - DNA, 967 bp, Zea Mays
ctgcaaagtcatgttgtttggcacagtttctgcttaatctgtgaaaaactaagaaacaagtcctgtcaaacagggccatagttcttgagggacctttttctgtttgtccatgcctagtttttctttctcttattataccacatacttgagctatgccattgtgttgctgataaatcttatggtcctgtgtgctgtgatttcatgaaagtcatggtgcacagttcacctgcaatatttgcttatgtctaaccctttgctacattgaatatgtaaccaacaagaatcatttgcctacaagaatttggcgggttcttttaggatattaaccactgttttatcacctttgattctctgaatgaatcaataagggcgcttgatattctttttttagctttgtcaattgcttaaagggaaattaagataaaatctattgcttcaaagttttatttcagtaaccctgcccaactgaattagactttgttacttttaataactaatagattactcatttgactattttccgcaagttgcaggataatctggaaatattttggacagcctagtgttggataatttgacaccatcagatatcacaatgaagacaataacactgaagcgttgcaaactatgtcagaatgattcctggagtccagtcctgaacaaacgaacaaggtcgctgagctgccggggtgaggccactgttcaagccactggggtgaagacactatgatcttatcgctggagatatagcagggtgctacatttcactagcattaccgtttgtaatttgattcaccctcctttgtacataagaattcgtgatgttaaaggtcggaacaataaagttccattcgttgtttggccaaagaattgcacatatatcagataaaagaaagcagagtgatcttcaaatatctaaagaatttcatgtgcaatgcaacatgccaacatgctatactatatatac

SEQ ID NO: 47751 - DNA, 1736 bp, Zea Mays
aaaacaaatttagctgttttttctttcgacgttttcgtccctacctcgcggttggggctcgcggctctcgcggcccgcctgtgctactgctgcacccgcacggccgcgcgcacctccaccgcaacggtcacttctagctctcgtgcagtcgtgcgtcctccatcgtcgcctctcctcccgcggtcagggtaacgccgcgtgtctcccgtcgcatactcgctcacacccatggccgcaccgccggccgcctcgctagtggcacgcgccgccctcccgccgcgccttcgcccaaccaccgcttctccccttggccccgccgtcctcggtcccagcagccgccgccggtacctccgtctccgccgctcgccatcgctggcggggactgccgcggcggcggcgagctccccatccgtgccttcctcgtttccggggcccgggccaggtatcggcgatgccctcggcgacgtcgaaatctactccgcggccaccggcgagcccgtcctgttcagagacctgtgggaccaggacgaggtagagacgccgtatccgagcctcgtctgttttgctccaactagggagatttctgtcgctgtatttgggcaacgattactcttaaagtctttgcaacctagaaggaaggtcgattcaacaaaccagcctttttgcggattggaaaataccaaaagccttttacacaaaacattccagtagccctgggagaacttctcatggatttggtgctgcgtgtacatgactagcccagcgtttgattgtctatgcagggagtgtctgttgttgcgctgctaaggcatttcgggtgcccatgctgctgggagttggcctctgttctgagggacacaaaggagagatttgattctgctggagtaaaactgattgctgttggtgttggcactccagctaaagcccgtattcttgccgagcgcttgccctttccgttggaatacctctatgctgatcctgatcggaaggcgtataatctcttgggtctatattttggtgttggtcgcacgttcttcaatccggccagtgcgaaagtgttttcacggtttgactcccttaaggaggcggtgaagaattatacaatcgaagccaccccagatgacagggcaggtgtcctacaacaggggggaatgtttgtgttcaaaggtaaagaactgttgtacgcaaggaaagacgagggcacaggcgaccatgcacctttggacgatgtgctcaatatctgctgcaaagttcctgtaacctaacccgacggcttgtcccacagctcagtagtaggtacttggaaagcactttcggcgtccttgattcctgaacttccaggatcgcctgctgcaagagtgtcttctccaccaatgtgccgatattttcttttgagatgcttggtttactttgatatctttttggtgatggatcgtgagttgttggcttgttgcattatgaattgcgtactgtaagtatccagtttgctgtttagcacttatacaattcgaaagcaaagttcgaagtcctggctgcctggctcttccttggagatggaagtttttgcacttccagaaatatcgggaacataaagtccatgtgatcttttgtgcctttaaaattttggatcgtttcctaatggaaatctgttccagttttattgacatcagaaatcctatctcctgtagtcctgttattcagcgtctgagtggagctataaaattgatcttatcatt

SEQ ID NO: 47752 - DNA, 1563 bp, Zea Mays
aaaacaaatttagctgttttttctttcgacgttttcgtccctacctcgcggttggggctcgcggctctcgcggcccgcctgtgctactgctgcacccgcacggccgcgcgcacctccaccgcaacggtcacttctagctctcgtgcagtcgtgcgtcctccatcgtcgcctctcctcccgcggtcagggtaacgccgcgtgtctcccgtcgcatactcgctcacacccatggccgcaccgccggccgcctcgctagtggcacgcgccgccctcccgccgcgccttcgcccaaccaccgcttctccccttggccccgccgtcctcggtcccagcagccgccgccggtacctccgtctccgccgctcgccatcgctggcggggactgccgcggcggcggcgagctccccatccgtgccttcctcgtttccggggcccgggccaggtatcggcgatgccctcggcgacgtcgaaatctactccgcggccaccggcgagcccgtcctgttcagagacctgtgggaccaggacgagttgccctttccgttggaatacctctatgctgatcctgatcggaaggcgtataatctcttgggtctatattttggtgttggtcgcacgttcttcaatccggccagtgcgaaagtgttttcacggtttgactcccttaaggaggcggtgaagaattatacaatcgaagccaccccagatgacagggcaggtgtcctacaacaggggggaatgtttgtgttcaaaggtaaagaactgttgtacgcaaggaaagacgagggcacaggcgaccatgcacctttggacgatgtgctcaatatctgctgcaaagttcctgtaacctaacccgacggcttgtcccacagctcagtaggtccgtaacacagatcactttgagctatctttactagtgatttcttatttcatccttgttacaaaaaggagagtaagaatatactcgtaacaggcacattgtctttcatccattctcttttggcaattggcgttagcagatcccttatcttgttcacaagctggacaaggttctatatgctctgccgattccctgcatgccgatttttgcataacgtcactctaagttacttctgtacagtaggtacttggaaagcactttcggcgtccttgattcctgaacttccaggatcgcctgctgcaagagtgtcttctccaccaatgtgccgatattttcttttgagatgcttggtttactttgatatctttttggtgatggatcgtgagttgttggcttgttgcattatgaattgcgtactgtaagtatccagtttgctgtttagcacttatacaattcgaaagcaaagttcgaagtcctggctgcctggctcttccttggagatggaagtttttgcacttccagaaatatcgggaacataaagtccatgtgatcttttgtgcctttaaaattttggatcgtttcctaatggaaatctgttccagttttattgacatcagaaatcctatctcctgtagtcctgttattcagcgtctgagtggagctataaaattgatcttatcatt

SEQ ID NO: 47753 - DNA, 1289 bp, Zea Mays
aaaacaaatttagctgttttttctttcgacgttttcgtccctacctcgcggttggggctcgcggctctcgcggcccgcctgtgctactgctgcacccgcacggccgcgcgcacctccaccgcaacggtcacttctagctctcgtgcagtcgtgcgtcctccatcgtcgcctctcctcccgcggtcaggggagtgtctgttgttgcgctgctaaggcatttcgggtgcccatgctgctgggagttggcctctgttctgagggacacaaaggagagatttgattctgctggagtaaaactgattgctgttggtgttggcactccagctaaagcccgtattcttgccgagcgcttgccctttccgttggaatacctctatgctgatcctgatcggaaggcgtataatctcttgggtctatattttggtgttggtcgcacgttcttcaatccggccagtgcgaaagtgttttcacggtttgactcccttaaggaggcggtgaagaattatacaatcgaagccaccccagatgacagggcaggtgtcctacaacaggggggaatgtttgtgttcaaaggtaaagaactgttgtacgcaaggaaagacgagggcacaggcgaccatgcacctttggacgatgtgctcaatatctgctgcaaagttcctgtaacctaacccgacggcttgtcccacagctcagtaggcacattgtctttcatccattctcttttggcaattggcgttagcagatcccttatcttgttcacaagctggacaaggttctatatgctctgccgattccctgcatgccgatttttgcataacgtcactctaagttacttctgtacagtaggtacttggaaagcactttcggcgtccttgattcctgaacttccaggatcgcctgctgcaagagtgtcttctccaccaatgtgccgatattttcttttgagatgcttggtttactttgatatctttttggtgatggatcgtgagttgttggcttgttgcattatgaattgcgtactgtaagtatccagtttgctgtttagcacttatacaattcgaaagcaaagttcgaagtcctggctgcctggctcttccttggagatggaagtttttgcacttccagaaatatcgggaacataaagtccatgtgatcttttgtgcctttaaaattttggatcgtttcctaatggaaatctgttccagttttattgacatcagaaatcctatctcctgtagtcctgttattcagcgtctgagtggagctataaaattgatcttatcatt

SEQ ID NO: 47754 - DNA, 1101 bp, Zea Mays
aaaacaaatttagctgttttttctttcgacgttttcgtccctacctcgcggttggggctcgcggctctcgcggcccgcctgtgctactgctgcacccgcacggccgcgcgcacctccaccgcaacggtcacttctagctctcgtgcagtcggagtgtctgttgttgcgctgctaaggcatttcgggtgcccatgctgctgggagttggcctctgttctgagggacacaaaggagagatttgattctgctggagtaaaactgattgctgttggtgttggcactccagctaaagcccgtattcttgccgagcgcttgccctttccgttggaatacctctatgctgatcctgatcggaaggcgtataatctcttgggtctatattttggtgttggtcgcacgttcttcaatccggccagtgcgaaagtgttttcacggtttgactcccttaaggaggcggtgaagaattatacaatcgaagccaccccagatgacagggcaggtgtcctacaacaggggggaatgtttgtgttcaaaggtaaagaactgttgtacgcaaggaaagacgagggcacaggcgaccatgcacctttggacgatgtgctcaatatctgctgcaaagttcctgtaacctaacccgacggcttgtcccacagctcagtaggtacttggaaagcactttcggcgtccttgattcctgaacttccaggatcgcctgctgcaagagtgtcttctccaccaatgtgccgatattttcttttgagatgcttggtttactttgatatctttttggtgatggatcgtgagttgttggcttgttgcattatgaattgcgtactgtaagtatccagtttgctgtttagcacttatacaattcgaaagcaaagttcgaagtcctggctgcctggctcttccttggagatggaagtttttgcacttccagaaatatcgggaacataaagtccatgtgatcttttgtgcctttaaaattttggatcgtttcctaatggaaatctgttccagttttattgacatcagaaatcctatctcctgtagtcctgttattcagcgtctgagtggagctataaaattgatcttatcatt

SEQ ID NO: 47755 - DNA, 977 bp, Zea Mays
aaaacaaatttagctgttttttctttcgacgttttcgtccctacctcgcggttggggctcgcggctctcgcggcccgcctgtgctactgctgcacccgcacggccgcgcgcacctccaccgcaacggtcacttctagctctcgtgcagtcgtgcgtcctccatcgtcgcctctcctcccgcggtcaggttgccctttccgttggaatacctctatgctgatcctgatcggaaggcgtataatctcttgggtctatattttggtgttggtcgcacgttcttcaatccggccagtgcgaaagtgttttcacggtttgactcccttaaggaggcggtgaagaattatacaatcgaagccaccccagatgacagggcaggtgtcctacaacaggggggaatgtttgtgttcaaaggtaaagaactgttgtacgcaaggaaagacgagggcacaggcgaccatgcacctttggacgatgtgctcaatatctgctgcaaagttcctgtaacctaacccgacggcttgtcccacagctcagtaggtacttggaaagcactttcggcgtccttgattcctgaacttccaggatcgcctgctgcaagagtgtcttctccaccaatgtgccgatattttcttttgagatgcttggtttactttgatatctttttggtgatggatcgtgagttgttggcttgttgcattatgaattgcgtactgtaagtatccagtttgctgtttagcacttatacaattcgaaagcaaagttcgaagtcctggctgcctggctcttccttggagatggaagtttttgcacttccagaaatatcgggaacataaagtccatgtgatcttttgtgcctttaaaattttggatcgtttcctaatggaaatctgttccagttttattgacatcagaaatcctatctcctgtagtcctgttattcagcgtctgagtggagctataaaattgatcttatcatt

SEQ ID NO: 47756 - DNA, 1056 bp, Zea Mays
aaaacaaatttagctgttttttctttcgacgttttcgtccctacctcgcggttggggctcgcggctctcgcggcccgcctgtgctactgctgcacccgcacggccgcgcgcacctccaccgcaacggtcacttctagctctcgtgcagtcgtgcgtcctccatcgtcgcctctcctcccgcggtcaggttgccctttccgttggaatacctctatgctgatcctgatcggaaggcgtataatctcttgggtctatattttggtgttggtcgcacgttcttcaatccggccagtgcgaaagtgttttcacggtttgactcccttaaggaggcggtgaagaattatacaatcgaagccaccccagatgacagggcaggtgtcctacaacaggggggaatgtttgtgttcaaaggtaaagaactgttgtacgcaaggaaagacgagggcacaggcgaccatgcacctttggacgatgtgctcaatatctgctgcaaagttcctgtaacctaacccgacggcttgtcccacagctcagtaggcacattgtctttcatccattctcttttggcaattggcgttagcagatcccttatcttgttcacaagctggacaagtaggtacttggaaagcactttcggcgtccttgattcctgaacttccaggatcgcctgctgcaagagtgtcttctccaccaatgtgccgatattttcttttgagatgcttggtttactttgatatctttttggtgatggatcgtgagttgttggcttgttgcattatgaattgcgtactgtaagtatccagtttgctgtttagcacttatacaattcgaaagcaaagttcgaagtcctggctgcctggctcttccttggagatggaagtttttgcacttccagaaatatcgggaacataaagtccatgtgatcttttgtgcctttaaaattttggatcgtttcctaatggaaatctgttccagttttattgacatcagaaatcctatctcctgtagtcctgttattcagcgtctgagtggagctataaaattgatcttatcatt

SEQ ID NO: 47757 - DNA, 337 bp, Zea Mays
  misc_feature (336)..(337): n is a, c, g, or t
caagaaggcacatcagtggcaggtaacaaacaccacttagcagcaggctttgcgtccgtcttgcccttttgtttccgcctcctgcccttaaaatctctaccgtcgcggtcaaatttgcgatccatacttggggagggccaagaaaccgagctctctttccaatgcccaccaacgtcaggtgaaatcggtggctggcctctttgaagttgaagggtttatgtgattccgcggtgggggtaattttcaggtgattgaggaacgttggtgtttctggacaactggagatgtactcaggccagcaatctgatcaaggtcctagtgcaaatagtggcagann

SEQ ID NO: 47758 - DNA, 1405 bp, Zea Mays
  misc_feature (1)..(2): n is a, c, g, or t
nngaattctccgatgcaaattggaattcttttgcagtgcatcaaaagatggcttataatggacagtatgggtttggatcttatggcatgggcttagaagataaactggggttgtatccatcttcatctggtacactgagtcaggacatccagatgagtgaagagcatagcggagttgtgaagaagaggaaaggagtggaggactgtgtcacattgttgcacgatgcaggtgatcaacaaacaaaaggttcgcctcagccagaaaggaattcagtggaggaggggaaccgaaagatttcgcccaaaatgcaaagcaaggaagattcttctgatggtgatggtactaaagaggactatgttcatatccgggcaaagcgaggccaagccactaacagccacagccttgcagaaagactgaggagaaagaagataagtgagaggatgaagcttcttcaagatcttgttcctggatgcagtaagatcactggcaaggcagtcatgctcgatgagattatcaactatgtgcagtcattgcaacgacaagtcgagatcatatccaaacaaatgctgctttcacaagacagacatcttgctttctatggagtcgaaccaggatcaagcggccttactggcccatttaaccaaggaatcatgcagccagaattgatgtgcaccattgccaatcccgttgatgttttgcacggagctattcacgacgcgtcaacaatgaaccatataccttctatgtgggaaggacttcagaatatgcctcagatgaacttcaaccctggcgtggcagccgatagcggcaccaacaactctggctccatgaagatcgagcagtgagcttctgtatagctccggaattgttctgtgaatcatgaatcgtcgaaaagcgctcacggggtggagtcttttttgtatagctggaggcctaaccattcatgccggtttccttctgttgcttccatactgtgcgacacattgtttatggtacggcaaatgaggatcatgtacagctggagctggaaaactgatgccactgtaaatttctgctgtgttttggcctgtggaaattgggatggaaacctattaccatccatgaaatccaatggcagaagcttgttggaactagggaccaggtgctgaatgctgatgggccaacatactagaatggaatagtaggtacaaaaatgcagagtttgaagcctctttgtcggaaattccatggaacatgcaatgtaaggtttcatcatgcaatggaaggaaactcattattgttaatacttgttatttcaaacgtgtgatcataattttagtagaaatagtaggagattgccatatttatgttatcaaaacagtaaaactgaatgggagctggcacttggtgcaagcctccaacctgg

SEQ ID NO: 47759 - DNA, 1393 bp, Zea Mays
  misc_feature (1)..(2): n is a, c, g, or t
nngaattctccgatgcaaattggaattcttttgcagtgcatcaaaagatggcttataatggacagtatgggtttggatcttatggcatgggcttagaagataaactggggttgtatccatcttcatctggtacactgagtcaggacatccagatgagtgaagagcatagcggagttgtgaagaagaggaaaggagtggaggactgtgtcacattgttgcacgatgcaggtgatcaacaaacaaaaggttcgcctcagccagaaaggaattcagtggaggaggggaaccgaaagatttcgcccaaaatgcaaagcaaggaagattcttctgatggtgatggtactaaagaggactatgttcatatccgggcaaagcgaggccaagccactaacagccacagccttgcagaaagactgaggagaaagaagataagtgagaggatgaagcttcttcaagatcttgttcctggatgcagtaagatcactggcaaggcagtcatgctcgatgagattatcaactatgtgcagtcattgcaacgacaagtcgagatcatatccaaacaagtaaagccacccactcgatcaccatatctccctctaggatcaagcggccttactggcccatttaaccaaggaatcatgcagccagaattgatgtgcaccattgccaatcccgttgatgttttgcacggagctattcacgacgcgtcaacaatgaaccatataccttctatgtgggaaggacttcagaatatgcctcagatgaacttcaaccctggcgtggcagccgatagcggcaccaacaactctggctccatgaagatcgagcagtgagcttctgtatagctccggaattgttctgtgaatcatgaatcgtcgaaaagcgctcacggggtggagtcttttttgtatagctggaggcctaaccattcatgccggtttccttctgttgcttccatactgtgcgacacattgtttatggtacggcaaatgaggatcatgtacagctggagctggaaaactgatgccactgtaaatttctgctgtgttttggcctgtggaaattgggatggaaacctattaccatccatgaaatccaatggcagaagcttgttggaactagggaccaggtgctgaatgctgatgggccaacatactagaatggaatagtaggtacaaaaatgcagagtttgaagcctctttgtcggaaattccatggaacatgcaatgtaaggtttcatcatgcaatggaaggaaactcattattgttaatacttgttatttcaaacgtgtgatcataattttagtagaaatagtaggagattgccatatttatgttatcaaaacagtaaaactgaatgggagctggcacttggtgcaagcctccaacctgg

SEQ ID NO: 47760 - DNA, 1409 bp, Zea Mays
attctccgatgcaaattggaattcttttgcagtgcatcaaaagatggcttataatggacagtatgggtttggatcttatggcatgggcttagaagataaactggggttgtatccatcttcatctggtacactgagtcaggacatccagatgagtgaagagcatagcggagttgtgaagaagaggaaaggagtggaggactgtgtcacattgttgcacgatgcaggtgatcaacaaacaaaaggttcgcctcagccagaaaggaattcagtggaggaggggaaccgaaagatttcgcccaaaatgcaaagcaaggaagattcttctgatggtgatggtactaaagaggactatgttcatatccgggcaaagcgaggccaagccactaacagccacagccttgcagaaagactgaggagaaagaagataagtgagaggatgaagcttcttcaagatcttgttcctggatgcagtaagatcactggcaaggcagtcatgctcgatgagattatcaactatgtgcagtcattgcaacgacaagtcgagttcttgtcaatgaaactcgcaactgttaaccccgagcttggctttgacattgagcagatcatatccaaacaagatcaagcggccttactggcccatttaaccaaggaatcatgcagccagaattgatgtgcaccattgccaatcccgttgatgttttgcacggagctattcacgacgcgtcaacaatgaaccatataccttctatgtgggaaggacttcagaatatgcctcagatgaacttcaaccctggcgtggcagccgatagcggcaccaacaactctggctccatgaagatcgagcagtgagcttctgtatagctccggaattgttctgtgaatcatgaatcgtcgaaaagcgctcacggggtggagtcttttttgtatagctggaggcctaaccattcatgccggtttccttctgttgcttccatactgtgcgacacattgtttatggtacggcaaatgaggatcatgtacagctggagctggaaaactgatgccactgtaaatttctgctgtgttttggcctgtggaaattgggatggaaacctattaccatccatgaaatccaatggcagaagcttgttggaactagggaccaggtgctgaatgctgatgggccaacatactagaatggaatagtaggtacaaaaatgcagagtttgaagcctctttgtcggaaattccatggaacatgcaatgtaaggtttcatcatgcaatggaaggaaactcattattgttaatacttgttatttcaaacgtgtgatcataattttagtagaaatagtaggagattgccatatttatgttatcaaaacagtaaaactgaatgggagctggcacttggtgcaagcctccaacctgg

SEQ ID NO: 47761 - DNA, 1477 bp, Zea Mays
attctccgatgcaaattggaattcttttgcagtgcatcaaaagatggcttataatggacagtatgggtttggatcttatggcatgggcttagaagataaactggggttgtatccatcttcatctggtacactgagtcaggacatccagatgagtgaagagcatagcggagttgtgaagaagaggaaaggagtggaggactgtgtcacattgttgcacgatgcaggtgatcaacaaacaaaaggttcgcctcagccagaaaggaattcagtggaggaggggaaccgaaagatttcgcccaaaatgcaaagcaaggaagattcttctgatggtgatggtactaaagaggactatgttcatatccgggcaaagcgaggccaagccactaacagccacagccttgcagaaagactgaggagaaagaagataagtgagaggatgaagcttcttcaagatcttgttcctggatgcagtaagatcactggcaaggcagtcatgctcgatgagattatcaactatgtgcagtcattgcaacgacaagtcgagttcttgtcaatgaaactcgcaactgttaaccccgagcttggctttgacattgagcagatcatatccaaacaatgtaaattgttgcttgcagatgctgctttcacaagacagacatcttgctttctatggagtcgaaccaggatcaagcggccttactggcccatttaaccaaggaatcatgcagccagaattgatgtgcaccattgccaatcccgttgatgttttgcacggagctattcacgacgcgtcaacaatgaaccatataccttctatgtgggaaggacttcagaatatgcctcagatgaacttcaaccctggcgtggcagccgatagcggcaccaacaactctggctccatgaagatcgagcagtgagcttctgtatagctccggaattgttctgtgaatcatgaatcgtcgaaaagcgctcacggggtggagtcttttttgtatagctggaggcctaaccattcatgccggtttccttctgttgcttccatactgtgcgacacattgtttatggtacggcaaatgaggatcatgtacagctggagctggaaaactgatgccactgtaaatttctgctgtgttttggcctgtggaaattgggatggaaacctattaccatccatgaaatccaatggcagaagcttgttggaactagggaccaggtgctgaatgctgatgggccaacatactagaatggaatagtaggtacaaaaatgcagagtttgaagcctctttgtcggaaattccatggaacatgcaatgtaaggtttcatcatgcaatggaaggaaactcattattgttaatacttgttatttcaaacgtgtgatcataattttagtagaaatagtaggagattgccatatttatgttatcaaaacagtaaaactgaatgggagctggcacttggtgcaagcctccaacctgg

SEQ ID NO: 47762 - DNA, 1448 bp, Zea Mays
ctccgatgcaaattggaattcttttgcagtgcatcaaaagatggcttataatggacagtatgggtttggatcttatggcatgggcttagaagataaactggggttgtatccatcttcatctggtacactgagtcaggacatccagatgagtgaagagcatagcggagttgtgaagaagaggaaaggagtggaggactgtgtcacattgttgcacgtgatcaacaaacaaaaggttcgcctcagccagaaaggaattcagtggaggaggggaaccgaaagatttcgcccaaaatgcaaagcaaggaagattcttctgatggtgatggtactaaagaggactatgttcatatccgggcaaagcgaggccaagccactaacagccacagccttgcagaaagactgaggagaaagaagataagtgagaggatgaagcttcttcaagatcttgttcctggatgcagtaagatcactggcaaggcagtcatgctcgatgagattatcaactatgtgcagtcattgcaacgacaagtcgagttcttgtcaatgaaactcgcaactgttaaccccgagcttggctttgacattgagcagatcatatccaaacaaatgctgctttcacaagacagacatcttgctttctatggagtcgaaccaggatcaagcggccttactggcccatttaaccaaggaatcatgcagccagaattgatgtgcaccattgccaatcccgttgatgttttgcacggagctattcacgacgcgtcaacaatgaaccatataccttctatgtgggaaggacttcagaatatgcctcagatgaacttcaaccctggcgtggcagccgatagcggcaccaacaactctggctccatgaagatcgagcagtgagcttctgtatagctccggaattgttctgtgaatcatgaatcgtcgaaaagcgctcacggggtggagtcttttttgtatagctggaggcctaaccattcatgccggtttccttctgttgcttccatactgtgcgacacattgtttatggtacggcaaatgaggatcatgtacagctggagctggaaaactgatgccactgtaaatttctgctgtgttttggcctgtggaaattgggatggaaacctattaccatccatgaaatccaatggcagaagcttgttggaactagggaccaggtgctgaatgctgatgggccaacatactagaatggaatagtaggtacaaaaatgcagagtttgaagcctctttgtcggaaattccatggaacatgcaatgtaaggtttcatcatgcaatggaaggaaactcattattgttaatacttgttatttcaaacgtgtgatcataattttagtagaaatagtaggagattgccatatttatgttatcaaaacagtaaaactgaatgggagctggcacttggtgcaagcctccaacctgg

SEQ ID NO: 47763 - DNA, 1805 bp, Zea Mays
attagcgcaagagaaggcggcgtgacttggggcttgggttggatttttgggcgatagtgcctcgcctcctatgcggtggactgagccttgcatgtacgctcaccgtatggaccgtttggctcgaactgtcttgagcccaaggaaatctgggcctttaatcgtcgtcacctagctcgcggatggtccgcacgcagtttccaccgtcagtatcgcattggagtgaaacaactcccatcattgccaccgattaggaacttaggaatggactcgccggtgcctgctacgctcgcgcgcgcgccagcgagaccgcaagcgcgggcgggcgaggaggcttgcgcggatactcggcaggatgctccggcggaagcggagccacctccccgtcggccggccgcgttctacagctccgtgttcgcgcagatcgaagagatcgggtggaagcagctggtgagcgccacaggagacggagtgtcctgtctcaccttccgcgtcgtggatgaaccaggacggatgcatttactggagatcacactgcccatgggctatcccgaaagtcctccttcaatctctgcagacgtaccatatctcccgaaaatacattggtcaaaaaactcaagactgaaagatgttatttgccaatttcaagcggtaggtgaactgtttatatcgcctaaaacatatggttgtcctattcgtggattgttatgttgtgttgttctatgttattgggttcacacaatcagcacttgaaaatcttgcaagagttctggaatacgatggacgagattgataaggtcctttggattgttgatccaacaaagccgtcttatgctatgtctcatcgtcgtatagctttaggtgacgattgctacattttgttgcaagttgatgcacgcaagcccaactccttaccagagtaaggtgtcgcttcttgggcacagatggcaaacttgatcagctgataataaattggagaaagaaccgtaaaaaatgggatacaaagaaaaaattccatgagaatttggcagccgtcttggactttgcactgccttcacccccttcggtcggtgataaagcgaaagatgacgagcaagctgattgtgggatatgttatgccaagcatctgccagttgttcttgcttctctgatccgccagatgacgaactcggtgcccacagcgggtgtgcgacggactacatgtgtgagaaccccagctgcagcagagccttccattccgtgtgcctgagagactggttgcgctccatcaccacgactaggcagtcgttcgatgtcctgttcgggaactgcccctactgcagcgatcccgtcgccgtcaagatcaccggccactaacactgtatcttggtcagcgtttacaaagtcagccaggcgattttaggggaaaatgggagatgtgtgaaggaggtgtcgagaagagtgacacagacgctctggaggcctcttttcaagccaaaaaaattgggaggagccgaatttatacattggtgctttggagaaaatggcttgggggccggagcgcatttcttggaggatgaattctgatgaggtagatagtggagataatacaaaagataatggctggagtatgtctaggacctttgagccactttggagatgttttggagaatagcggacgcgcttcgaatacgttactgatgtaataatctcatgctgttacgctttatttcgggaggaatatagtgggggcaaacctttccgtctaaaaaaataacaaatgtcactttattttcctcagccgaatataaaaagtatacctcatggcg

SEQ ID NO: 47764 - DNA, 1658 bp, Zea Mays
tgggcgatagtgcctcgcctcctatgcggtggactgagccttgcatgtacgctcaccgtatggaccgtttggctcgaactgtcttgagcccaaggaaatctgggcctttaatcgtcgtcacctagctcgcggatggtccgcacgcagtttccaccgtcagtatcgcattggagtgaaacaactcccatcattgccaccgattaggaacttaggaatggactcgccggtgcctgctacgctcgcgcgcgcgccagcgagaccgcaagcgcgggcgggcgaggaggcttgcgcggatactcggcaggatgctccggcggaagcggagccacctccccgtcggccggccgcgttctacagctccgtgttcgcgcagatcgaagagatcgggtggaagcagctggtgagcgccacaggagacggagtgtcctgtctcaccttccgcgtcgtggatgaaccaggacggatgcatttactggagatcacactgcccatgggctatcccgaaagtcctccttcaatctctgcagacgtaccatatctcccgaaaatacattggtcaaaaaactcaagactgaaagatgttatttgccaatttcaagcgcacttgaaaatcttgcaagagttctggaatacgatggacgagattgataaggtcctttggattgttgatccaacaaagccgtcttatgctatgtctcatcgtcgtatagctttaggtgacgattgctacattttgttgcaagttgatgcacgcaagcccaactccttaccagagtgtcgcttcttgggcacagatggcaaacttgatcagctgataataaattggagaaagaaccgtaaaaaatgggatacaaagaaaaaattccatgagaatttggcagccgtcttggactttgcactgccttcacccccttcggtcggtgataaagcgaaagatgacgagcaagctgattgtgggatatgttatgccaagcatctgccagttgttcttgcttctctgatccgccagatgacgaactcggtgcccacagcgggtgtgcgacggactacatgtgtgagaaccccagctgcagcagagccttccattccgtgtgcctgagagactggttgcgctccatcaccacgactaggcagtcgttcgatgtcctgttcgggaactgcccctactgcagcgatcccgtcgccgtcaagatcaccggccactaacactgtatcttggtcagcgtttacaaagtcagccaggcgattttaggggaaaatgggagatgtgtgaaggaggtgtcgagaagagtgacacagacgctctggaggcctcttttcaagccaaaaaaattgggaggagccgaatttatacattggtgctttggagaaaatggcttgggggccggagcgcatttcttggaggatgaattctgatgaggtagatagtggagataatacaaaagataatggctggagtatgtctaggacctttgagccactttggagatgttttggagaatagcggacgcgcttcgaatacgttactgatgtaataatctcatgctgttacgctttatttcgggaggaatatagtgggggcaaacctttccgtctaaaaaaataacaaatgtcactttattttcctcagccgaatataaaaagtatacctcatggcg

SEQ ID NO: 47765 - DNA, 1586 bp, Zea Mays
cgctcaccgtatggaccgtttggctcgaactgtcttgagcccaaggaaatctgggcctttaatcgtcgtcacctagctcgcggatggtccgcacgcagtttccaccgtcagtatcgcattggagtgaaacaactcccatcattgccaccgattaggaacttaggaatggactcgccggtgcctgctacgctcgcgcgcgcgccagcgagaccgcaagcgcgggcgggcgaggaggcttgcgcggatactcggcaggatgctccggcggaagcggagccacctccccgtcggccggccgcgttctacagctccgtgttcgcgcagatcgaagagatcgggtggaagcagctggtgagcgccacaggagacggagtgtcctgtctcaccttccgcgtcgtggatgaaccaggacggatgcatttactggagatcacactgcccatgggctatcccgaaagtcctccttcaatctctgcagacgtaccatatctcccgaaaatacattggtcaaaaaactcaagactgaaagatgttatttgccaatttcaagcgcacttgaaaatcttgcaagagttctggaatacgatggacgagattgataaggtcctttggattgttgatccaacaaagccgtcttatgctatgtctcatcgtcgtatagctttaggtgacgattgctacattttgttgcaagttgatgcacgcaagcccaactccttaccagagtgtcgcttcttgggcacagatggcaaacttgatcagctgataataaattggagaaagaaccgtaaaaaatgggatacaaagaaaaaattccatgagaatttggcagccgtcttggactttgcactgccttcacccccttcggtcggtgataaagcgaaagatgacgagcaagctgattgtgggatatgttatgccaagcatctgccagttgatgacgaactcggtgcccacagcgggtgtgcgacggactacatgtgtgagaaccccagctgcagcagagccttccattccgtgtgcctgagagactggttgcgctccatcaccacgactaggcagtcgttcgatgtcctgttcgggaactgcccctactgcagcgatcccgtcgccgtcaagatcaccggccactaacactgtatcttggtcagcgtttacaaagtcagccaggcgattttaggggaaaatgggagatgtgtgaaggaggtgtcgagaagagtgacacagacgctctggaggcctcttttcaagccaaaaaaattgggaggagccgaatttatacattggtgctttggagaaaatggcttgggggccggagcgcatttcttggaggatgaattctgatgaggtagatagtggagataatacaaaagataatggctggagtatgtctaggacctttgagccactttggagatgttttggagaatagcggacgcgcttcgaatacgttactgatgtaataatctcatgctgttacgctttatttcgggaggaatatagtgggggcaaacctttccgtctaaaaaaataacaaatgtcactttattttcctcagccgaatataaaaagtatacctcatggcg

SEQ ID NO: 47766 - DNA, 1667 bp, Zea Mays
aaggaaatctgggcctttaatcgtcgtcacctagctcgcggatggtccgcacgcagtttccaccgtcagtatcgcattggagtgaaacaactcccatcattgccaccgattaggaacttaggaatggactcgccggtgcctgctacgctcgcgcgcgcgccagcgagaccgcaagcgcgggcgggcgaggaggcttgcgcggatactcggcaggatgctccggcggaagcggagccacctccccgtcggccggccgcgttctacagctccgtgttcgcgcagatcgaagagatcgggtggaagcagctggtgagcgccacaggagacggagtgtcctgtctcaccttccgcgtcgtggatgaaccaggacggatgcatttactggagatcacactgcccatgggctatcccgaaagtcctccttcaatctctgcagacgtaccatatctcccgaaaatacattggtcaaaaaactcaagactgaaagatgttatttgccaatttcaagcgcacttgaaaatcttgcaagagttctggaatacgatggacgagattgataaggtcctttggattgttgatccaacaaagccgtcttatgctatgtctcatcgtcgtatagctttaggtgacgattgctacattttgttgcaagttgatgcacgcaagcccaactccttaccagagtaaggtcagattttaggactatttgaagccaaccatggttgatcccatgtgtcaccatttcttctaggtgtcgcttcttgggcacagatggcaaacttgatcagctgataataaattggagaaagaaccgtaaaaaatgggatacaaagaaaaaattccatgagaatttggcagccgtcttggactttgcactgccttcacccccttcggtcggtgataaagcgaaagatgacgagcaagctgattgtgggatatgttatgccaagcatctgccagttgttcttgcttctctgatccgccagatgacgaactcggtgcccacagcgggtgtgcgacggactacatgtgtgagaaccccagctgcagcagagccttccattccgtgtgcctgagagactggttgcgctccatcaccacgactaggcagtcgttcgatgtcctgttcgggaactgcccctactgcagcgatcccgtcgccgtcaagatcaccggccactaacactgtatcttggtcagcgtttacaaagtcagccaggcgattttaggtgcaccttaacttgcgtttcacgtcacacaagggagaaaacgagactattttggttcctgcttacattttcctttcagaaaggtcaagatcgctctaggtggatacattcgtccgatttagcggagctgcaactgaaatatgtcaaaatttgccgccggcttctagagaacaaacgctcttctatagaagggaaggggttattcgataataattctacataagagtggttttacgaggcgactcgactcgtttcggcttgatttcagacctagtcgtagtcgagtccttgtgctctccatcgagcccatggacccatctataatgtatagcttgatctgaatacccatagtatatattcttaacattattctcttagtcgtccatagtatacattcttaatagtaggtcctgagttttatttgtccgagttattaaa

SEQ ID NO: 47767 - DNA, 1629 bp, Zea Mays
aaggaaatctgggcctttaatcgtcgtcacctagctcgcggatggtccgcacgcagtttccaccgtcagtatcgcattggagtgaaacaactcccatcattgccaccgattaggaacttaggaatggactcgccggtgcctgctacgctcgcgcgcgcgccagcgagaccgcaagcgcgggcgggcgaggaggcttgcgcggatactcggcaggatgctccggcggaagcggagccacctccccgtcggccggccgcgttctacagctccgtgttcgcgcagatcgaagagatcgggtggaagcagctggtgagcgccacaggagacggagtgtcctgtctcaccttccgcgtcgtggatgaaccaggacggatgcatttactggagatcacactgcccatgggctatcccgaaagtcctccttcaatctctgcagacgtaccatatctcccgaaaatacattggtcaaaaaactcaagactgaaagatgttatttgccaatttcaagcgagttctggaatacgatggacgagattgataaggtcctttggattgttgatccaacaaagccgtcttatgctatgtctcatcgtcgtatagctttaggtgacgattgctacattttgttgcaagttgatgcacgcaagcccaactccttaccagagtgtcgcttcttgggcacagatggcaaacttgatcagctgataataaattggagaaagaaccgtaaaaaatgggatacaaagaaaaaattccatgagaatttggcagccgtcttggactttgcactgccttcacccccttcggtcggtgataaagcgaaagatgacgagcaagctgattgtgggatatgttatgccaagcatctgccagttgatgacgaactcggtgcccacagcgggtgtgcgacggactacatgtgtgagaaccccagctgcagcagagccttccattccgtgtgcctgagagactggttgcgctccatcaccacgactaggcagtcgttcgatgtcctgttcgggaactgcccctactgcagcgatcccgtcgccgtcaagatcaccggccactaacactgtatcttggtcagcgtttacaaagtcagccaggcgattttaggtgcaccttaacttgcgtttcacgtcacacaagggagaaaacgagactattttggttcctgcttacatgtacaatagccaagtgtcaccttcggttacgttatctaaatgagctcctgcttacatgtagtattatgtcagtttcctttcagaaaggtcaagatcgctctaggtggatacattcgtccgatttagcggagctgcaactgaaatatgtcaaaatttgccgccggcttctagagaacaaacgctcttctatagaagggaaggggttattcgataataattctacataagagtggttttacgaggcgactcgactcgtttcggcttgatttcagacctagtcgtagtcgagtccttgtgctctccatcgagcccatggacccatctataatgtatagcttgatctgaatacccatagtatatattcttaacattattctcttagtcgtccatagtatacattcttaatagtaggtcctgagttttatttgtccgagttattaaa

SEQ ID NO: 47768 - DNA, 1685 bp, Zea Mays
aaggaaatctgggcctttaatcgtcgtcacctagctcgcggatggtccgcacgcagtttccaccgtcagtatcgcattggagtgaaacaactcccatcattgccaccgattaggaacttaggaatggactcgccggtgcctgctacgctcgcgcgcgcgccagcgagaccgcaagcgcgggcgggcgaggaggcttgcgcggatactcggcaggatgctccggcggaagcggagccacctccccgtcggccggccgcgttctacagctccgtgttcgcgcagatcgaagagatcgggtggaagcagctggtgagcgccacaggagacggagtgtcctgtctcaccttccgcgtcgtggatgaaccaggacggatgcatttactggagatcacactgcccatgggctatcccgaaagtcctccttcaatctctgcagacgtaccatatctcccgaaaatacattggtcaaaaaactcaagactgaaagatgttatttgccaatttcaagcggtaggtgaactgtttatatcgcctaaaacatatggttgtcctattcgtggattgttatgttgtgttgttctatgttattgggttcacacaatcagcacttgaaaatcttgcaagagttctggaatacgatggacgagattgataaggtcctttggattgttgatccaacaaagccgtcttatgctatgtctcatcgtcgtatagctttaggtgtcgcttcttgggcacagatggcaaacttgatcagctgataataaattggagaaagaaccgtaaaaaatgggatacaaagaaaaaattccatgagaatttggcagccgtcttggactttgcactgccttcacccccttcggtcggtgataaagcgaaagatgacgagcaagctgattgtgggatatgttatgccaagcatctgccagttgatgacgaactcggtgcccacagcgggtgtgcgacggactacatgtgtgagaaccccagctgcagcagagccttccattccgtgtgcctgagagactggttgcgctccatcaccacgactaggcagtcgttcgatgtcctgttcgggaactgcccctactgcagcgatcccgtcgccgtcaagatcaccggccactaacactgtatcttggtcagcgtttacaaagtcagccaggcgattttaggtgcaccttaacttgcgtttcacgtcacacaagggagaaaacgagactattttggttcctgcttacatgtacaatagccaagtgtcaccttcggttacgttatctaaatgagctcctgcttacatgtagtattatgtcagtttcctttcagaaaggtcaagatcgctctaggtggatacattcgtccgatttagcggagctgcaactgaaatatgtcaaaatttgccgccggcttctagagaacaaacgctcttctatagaagggaaggggttattcgataataattctacataagagtggttttacgaggcgactcgactcgtttcggcttgatttcagacctagtcgtagtcgagtccttgtgctctccatcgagcccatggacccatctataatgtatagcttgatctgaatacccatagtatatattcttaacattattctcttagtcgtccatagtatacattcttaatagtaggtcctgagttttatttgtccgagttattaaa

SEQ ID NO: 47769 - DNA, 1588 bp, Zea Mays
aaggaaatctgggcctttaatcgtcgtcacctagctcgcggatggtccgcacgcagtttccaccgtcagtatcgcattggagtgaaacaactcccatcattgccaccgattaggaacttaggaatggactcgccggtgcctgctacgctcgcgcgcgcgccagcgagaccgcaagcgcgggcgggcgaggaggcttgcgcggatactcggcaggatgctccggcggaagcggagccacctccccgtcggccggccgcgttctacagctccgtgttcgcgcagatcgaagagatcgggtggaagcagctggtgagcgccacaggagacggagtgtcctgtctcaccttccgcgtcgtggatgaaccaggacggatgcatttactggagatcacactgcccatgggctatcccgaaagtcctccttcaatctctgcagacgtaccatatctcccgaaaatacattggtcaaaaaactcaagactgaaagatgttatttgccaatttcaagcggtaggtgaactgtttatatcgcctaaaacatatggttgtcctattcgtggattgttatgttgtgttgttctatgttattgggttcacacaatcagcacttgaaaatcttgcaagagttctggaatacgatggacgagattgataaggtcctttggattgttgatccaacaaagccgtcttatgctatgtctcatcgtcgtatagctttaggtgacgattgctacattttgttgcaagttgatgcacgcaagcccaactccttaccagagtaaggtcagattttaggactatttgaagccaaccatggttgatcccatgtgtcaccatttcttctaggtgtcgcttcttgggcacagatggcaaacttgatcagctgataataaattggagaaagaaccgtaaaaaatgggatacaaagaaaaaattccatgagaatttggcagccgtcttggactttgcactgccttcacccccttcggtcggtgataaagcgaaagatgacgagcaagctgattgtgggatatgttatgccaagcatctgccagttgatgacgaactcggtgcccacagcgggtgtgcgacggactacatgtgtgagaaccccagctgcagcagagccttccattccgtgtgcctgagagactggttgcgctccatcaccacgactaggcagggaaaatgggagatgtgtgaaggaggtgtcgagaagagtgacacagacgctctggaggcctcttttcaagccaaaaaaattgggaggagccgaatttatacattggtgctttggagaaaatggcttgggggccggagcgcatttcttggaggatgaattctgatgaggtagatagtggagataatacaaaagataatggctggagtatgtctaggacctttgagccactttggagatgttttggagaatagcggacgcgcttcgaatacgttactgatgtaataatctcatgctgttacgctttatttcgggaggaatatagtgggggcaaacctttccgtctaaaaaaataacaaatgtcactttattttcctcagccgaatataaaaagtatacctcatggcg

SEQ ID NO: 47770 - DNA, 2952 bp, Zea Mays
aaaaaatcgtagcatcgcaaacgcctacgcggccgcatgcatgcccccgacgcggccgattgggcatttggggcgaacggttgtttcggcaaggaagccgcgcctacgcccgcccgcgctcgcgcctctccaccgccgccggcgtgaacctcaaccaagcaccgcgcccgcgccggcgactgtccataaggccgtgtcctgccgtcgcgcacccctgcgtcgtacgatcgtccacgataccaagtcaggtatcagcacagactgcagcatcagacttatttggctggagaaatcagggatcatcagagtcaaaggcaacaagattctgctaccatatcagtgcaagcgaatggctgactgtttaaagacatgcctggatcttctattgtgaattcgcagttctttcatgggtggattgtcaggatcccaaactggtagaggtgggggatggaattctctgctcttctgacttcagcggggataaacatcgctgtctgcgtgctcttcttgtccctctattcgatcctcaggaagcagcctcacaacttcagcgtctactttgggaggcggcttgctgaagagaggttccagaggcaggacgattacttctcgtttgagaggctactgcctactgctggttggattgtaaaggcgtactggtgcaccgaagaagagattcgacaagttgctggcttggactctgttgtgttccttcgcctcttcattttcagcatccgtatcttctcaattacttctcttgtttgtgtatttgttgtgcttcctgttaattatcatgggaaagagatgaatcacaatcatattccggaagagtcactgaatgtttttactatagccaatatcgtcgaagaatctcgaaagctttgggtgcactgctctgctttatatgtcataacaatctcagcctgcattcttcttttccacgaatacaagtatatttcgaggaagagactagcacatgttactggatatcctccaaatcctgggctttttaccgtgcttgtccgttcgattccgaggtttgacaatgagctgcttgatgacacaatcagaaatttctttgttaactatcacggatcaagttatctgtcgcatcaaatgatctttcgcaagggacattttcagaagtttgtggatagagcagagagggcttacaggagatttgtaagggtaagactctccgtatctgagcggaatgggagatctagcatgtccaggtgtggtgtctgtggtgtaagagcttcctcatttcagctttaccgcaacaagttcatcgaggccaagaagtcagacctcactaatccggaagtagtggaagctcaaaagaactgtcccggtgccttagtgttcttcaagactcgctacgcagccgtcgtcgcctcacgggtattccagtcatcaaaccctatgctatgggtgacagatctggctcctgagccacgcgatgtgtattggtcaaacctctggatcccctacagacagatctggctccggaagctagcgacactcgcagctagtatcgttttcatgttcgtgttcatcgtccccgtcgcgtttgtccagagcatgatgcagctggagcagctcaaaaggatgttcccgagcttgacaggtctcctaaataagtccttcttcgccagagtgataacgggataccttcctagcgtcaccttgctgctgtccctgtacaccgttcccccgctgatgatgctcttctcctctatagaagggtccatctctcgcagcgggaggaagaggagcgggtgcttgaaaatcctcttcttcaacatctggaacgtcttctttgtgaacgtcctgtcgggatccgtgctcaaccagctcaacgtcttctccagacccaaggacatgccgacgatgctagctgaactagtgccgaagcaggcaacctttttcatcacgtacgtgctcacctcaggctgggcgagtctgtgctcggagatactgcaggttttcaacttggtctacaacttcttcagcaggttcgtctgctgctgccatcgccagaataaggaatacgtttactctttcccgtaccacaccgaagtgcccaaagtcctcctgttcaacctgctcggcttcacgttctcgatcatggcgcccctcatactcccctttctgctcgtgtacttctgcctcggctacttggtgtatcggaaccagattctgaacgtgtactacccaaagtacgaaatggggggcaagctgtggccggtcatgcacaacgccatcgtgttctcgctggtcctgacgcaggtgatcgcgctcggcgtcttcaccatcaagcgctcccccgtgacggcgggcttcaccatcctgctgctcgtcggcacggtcctcttcaacgagtactgccggcaccgcttctcccgcatcttcgaggcctactccgcccaggacgtgatcgagctggacagggacgacgagcagtccgggaggatgcaggagatccaccagcatctgctggacgcctacagccagaccccgccgggggagggatcctccaggggcggcagccaggtgcccatcgagctcatcatggaggaccccgcgcaggaggcgtcggagtccagccaggagctctgcgacaccgtgcaggaggtgtccggggccatccacgaccacgaccacgtcgtcgaggacaaggcgcattccgtgtagactagatggtctggactctctgcgggtgcgtacgcatgtagatgctgtacagcgcgcatagcagactcgaaacccggaagcaaatacttacatttataaatctacgtgtatagaaacaacagtctaatctattggcaatcgggtactttggcccggcccaacacttcactctctgtccattggattggcacatcggaccgcccatcttaattctgatcttttatatttagttatgaaaacgccactataatttac

SEQ ID NO: 47771 - DNA, 2788 bp, Zea Mays
atcgcaaacgcctacgcggccgcatgcatgcccccgacgcggccgattgggcatttggggcgaacggttgtttcggcaaggaagccgcgcctacgcccgcccgcgctcgcgcctctccaccgccgccggcgtgaacctcaaccaagcaccgcgcccgcgccggcgactgtccataaggccgtgtcctgccgtcgcgcacccctgcgtcgtacgatcgtccacgataccaaggtatcagcacagactgcagcatcagacttatttggctggagaaatcagggatcatcagagtcaaaggcaacaagattctgctaccatatcagtgcaagcgaatggctgactgtttaaagacatgcctggatcttctattgtgaattcgcagttctttcatgggtggattgtcaggatcccaaactggtagaggtgggggatggaattctctgctcttctgacttcagcggggataaacatcgctgtctgcgtgctcttcttgtccctctattcgatcctcaggaagcagcctcacaacttcagcgtctactttgggaggcggcttgctgaagagaggttccagaggcaggacgattacttctcgtttgagaggctactgcctactgctggttggattgtaaaggcgtactggtgcaccgaagaagagattcgacaagttgctggcttggactctgttgtgttccttcgcctcttcattttcaggctttgggtgcactgctctgctttatatgtcataacaatctcagcctgcattcttcttttccacgaatacaagtatatttcgaggaagagactagcacatgttactggatatcctccaaatcctgggctttttaccgtgcttgtccgttcgattccgaggtttgacaatgagctgcttgatgacacaatcagaaatttctttgttaactatcacggatcaagttatctgtcgcatcaaatgatctttcgcaagggacattttcagaagtttgtggatagagcagagagggcttacaggagatttgtaagggtaagactctccgtatctgagcggaatgggagatctagcatgtccaggtgtggtgtctgtggtgtaagagcttcctcatttcagctttaccgcaacaagttcatcgaggccaagaagtcagacctcactaatccggaagtagtggaagctcaaaagaactgtcccggtgccttagtgttcttcaagactcgctacgcagccgtcgtcgcctcacgggtattccagtcatcaaaccctatgctatgggtgacagatctggctcctgagccacgcgatgtgtattggtcaaacctctggatcccctacagacagatctggctccggaagctagcgacactcgcagctagtatcgttttcatgttcgtgttcatcgtccccgtcgcgtttgtccagagcatgatgcagctggagcagctcaaaaggatgttcccgagcttgacaggtctcctaaataagtccttcttcgccagagtgataacgggataccttcctagcgtcaccttgctgctgtccctgtacaccgttcccccgctgatgatgctcttctcctctatagaagggtccatctctcgcagcgggaggaagaggagcgggtgcttgaaaatcctcttcttcaacatctggaacgtcttctttgtgaacgtcctgtcgggatccgtgctcaaccagctcaacgtcttctccagacccaaggacatgccgacgatgctagctgaactagtgccgaagcaggcaacctttttcatcacgtacgtgctcacctcaggctgggcgagtctgtgctcggagatactgcaggttttcaacttggtctacaacttcttcagcaggttcgtctgctgctgccatcgccagaataaggaatacgtttactctttcccgtaccacaccgaagtgcccaaagtcctcctgttcaacctgctcggcttcacgttctcgatcatggcgcccctcatactcccctttctgctcgtgtacttctgcctcggctacttggtgtatcggaaccagattctgaacgtgtactacccaaagtacgaaatggggggcaagctgtggccggtcatgcacaacgccatcgtgttctcgctggtcctgacgcaggtgatcgcgctcggcgtcttcaccatcaagcgctcccccgtgacggcgggcttcaccatcctgctgctcgtcggcacggtcctcttcaacgagtactgccggcaccgcttctcccgcatcttcgaggcctactccgcccaggacgtgatcgagctggacagggacgacgagcagtccgggaggatgcaggagatccaccagcatctgctggacgcctacagccagaccccgccgggggagggatcctccaggggcggcagccaggtgcccatcgagctcatcatggaggaccccgcgcaggaggcgtcggagtccagccaggagctctgcgacaccgtgcaggaggtgtccggggccatccacgaccacgaccacgtcgtcgaggacaaggcgcattccgtgtagactagatggtctggactctctgcgggtgcgtacgcatgtagatgctgtacagcgcgcatagcagactcgaaacccggaagcaaatacttacatttataaatctacgtgtatagaaacaacagtctaatctattggcaatcgggtactttggcccggcccaacacttcactctctgtccattggattggcacatcggaccgcccatcttaattctgatcttttatatttagttatgaaaacgccactataatttac

SEQ ID NO: 47772 - DNA, 1931 bp, Zea Mays
tttccacagcgatggataaagcaatacctggtttcctgatgctgaaacttttctgtaacaatctgtcatttttcttctcacgatcaagctcagagattatgatacaagcatgactggttcttgaacactatacaaggctttggagagatgggatgtgctgcttccaggttagaagatgaggaggctgtcaagatgtgccgggacagaagggacttgatcaagcaggcactggagcagcacaaccgatttgcatcttcccacattgcttacattgagtccctgaagcgtgtttcggtggctctccaacggtttgttgccggagatgatcaccatgagctaatcttcgatacattcatctcccctatcaagcaacagaagccagagatgcttggtctgccttatggttcatatgagaagagaactattcatgtttcaaggtacctgaggtcagggcctaacccatcagtgtccattgaggagcacccacgtccggtggaaacagtccgtgtcgagtcaaattaccctatggacaacgacagtggcatggtggatagattcctaccaacacactcttcaccagtgagatcgtcttcatactacccgccaccttataacaggccaagctaccaacctccattggaccaggaaacagttagaaattcttcctattgcatgccttatgacaggccaagctatgcacctccatcaccccaggagacaatgaggacttcttattatgcatcttatgacaggccaagctacccaccaccatcaccccaggagccactgagaaattcatatcacgtgccatatgacaggccaagctacccacctccgtcaccccaggagcaggaatcatcaccgtgggacttcttctggaacccattctcatcactggacagctttacatatccccgccctcggagtagctatgacaatgtggtcactgatgatgaactcgtgaggttacaacgggtacgagaggaggaaggaatcccagaacttgaagaggaagatgatgagtgtcaagagcatgtacagatggacagaaaagaggaaaaagaagagcacgacaatgcagatgatgatgaagacgatgatgaagacgatggcgaggaatgtgagcattcagatgagtgtatggtttctaatgtgaattttgatgccaatatgaagcaagaaacaaagggatttgaatccaaaggtattcagtgtactgaagcaccagaaccttgcaagacagtagaacttgagataaaggcacacaagaaagagttgatgagaaacagagtagcaaatgcagaagaaactcctggtttcacagtatatctgaatcgaaggccagcaagcttggttgaggccatgaaggatatcgactgtcagttctcggggatatgtgacgctgctcggaaaatctcagtaatgttggagcgaagatgctgaacccagttgcacttttgcgttctgcgtcatcccgttcatcatcatctcgtttccttcttgctccctctagctcaatagatgatctctttaacaatgagactagcagctgctactctgaagaatcttgcagtaccatgtctggaagtcaccactctaccttggatagactctatacatgggagaagaaattatacaaagaagtaaaggcaggtgagcggttaagaatcgagtatgagaagaggctgacacatttgaggaaccaagatgtgaaaggcgaagaacctatctctgttgataagacttgtgcagcattgagaagcttgcatactcggctgaaggtgtcaatacacacagttcagtcggtatcaaggaggattgaaattctaagggatgaggagctgcatcctcagcttatggagttgattgtggacacggagacgatcagcaagcacgacgtgatcagggattttccttcgcatctcctgtag

SEQ ID NO: 47773 - DNA, 1727 bp, Zea Mays
ccacagcgatggataaagcaatacctggtttcctgatgctgaaacttttctgtaacaatctgtcatttttcttctcacgatcaagctcagagattatgatacaagcatgactggttcttgaacactatacaaggctttggagagatgggatgtgctgcttccaggttagaagatgaggaggctgtcaagatgtgccgggacagaagggacttgatcaagcaggcactggagcagcacaaccgatttgcatcttcccacattgcttacattgagtccctgaagcgtgtttcggtggctctccaacggtttgttgccggagatgatcaccatgagctaatcttcgatacattcatctcccctatcaagcaacagaagccagagatgcttggtctgccttatggttcatatgagaagagaactattcatgtttcaaggtacctgaggtcagggcctaacccatcagtgtccattgaggagcacccacgtccggtggaaacagtccgtgtcgagtcaaattaccctatggacaacgacagtggcatggtggatagattcctaccaacacactcttcaccagtgagatcgtcttcatactacccgccaccttataacaggccaagctacccacctccgtcaccccaggagcaggaatcatcaccgtgggacttcttctggaacccattctcatcactggacagctttacatatccccgccctcggagtagctatgacaatgtggtcactgatgatgaactcgtgaggttacaacgggtacgagaggaggaaggaatcccagaacttgaagaggaagatgatgagtgtcaagagcatgtacagatggacagaaaagaggaaaaagaagagcacgacaatgcagatgatgatgaagacgatgatgaagacgatggcgaggaatgtgagcattcagatgagtgtatggtttctaatgtgaattttgatgccaatatgaagcaagaaacaaagggatttgaatccaaaggtattcagtgtactgaagcaccagaaccttgcaagacagtagaacttgagataaaggcacacaagaaagagttgatgagaaacagagtagcaaatgcagaagaaactcctggtttcacagtatatctgaatcgaaggccagcaagcttggttgaggccatgaaggatatcgactgtcagttctcggggatatgtgacgctgctcggaaaatctcagtaatgttggagcgaagatgctgaacccagttgcacttttgcgttctgcgtcatcccgttcatcatcatctcgtttccttcttgctccctctagctcaatagatgatctctttaacaatgagactagcagctgctactctgaagaatcttgcagtaccatgtctggaagtcaccactctaccttggatagactctatacatgggagaagaaattatacaaagaagtaaaggcaggtgagcggttaagaatcgagtatgagaagaggctgacacatttgaggaaccaagatgtgaaaggcgaagaacctatctctgttgataagacttgtgcagcattgagaagcttgcatactcggctgaaggtgtcaatacacacagttcagtcggtatcaaggaggattgaaattctaagggatgaggagctgcatcctcagcttatggagttgattgtggacacggagacgatcagcaagcacgacgtgatcagggattttccttcgcatctcctgtag

SEQ ID NO: 47774 - DNA, 1243 bp, Zea Mays
cacttcggcaccgtctccgtctgcctcaaaaagaaaacccgctagagtcaacggtgatcgtcattagctccgagtcctctccctcctcctacgagtattctagcgcgagtaaatcgctgcgtgccttggcaatcaagggagcaacacaccatttgaacagctctgcacctttcaatacgccactacctgcactgcagcctgcatcaaccgagcatcatggcctcctccgtctccggcaactacccgcgtttcaagagcgccgacatagacgagagggcgatccggagggaggaaccagagcagctggtcaaggccttggctgaagccaaggctgaggccatcaagcagaagcttcagggcgactctgctccggtcacagacggagaccaacctgcccgtctgctgatcacctcagaccaggttatggtgagcaaaggggtgatacgggagaggccacggagtgcagaagaagccagggaattcatcaatgggtactcgggcgatcgagcgttcgcagttaacttcgttcttgtcaccgacctgagcaccgggactacaagaggaggatgggacgtacctgaggtaaccgatgggatgccggagacctttctcaaaactgaaacgttaagtgaggtctttgctccgcaaatcatcactacgacatctgttctgctctgcgttgctttctgcagatcaggtttcagcacataccggacgagttcatcgaccaagtggttaatcagggcgacatgacctgcgtggccggcgggcttaagctgacacatccgtcagtacagccattcgtcaaagaactggtgggcacggtggatagcgtccgaggtcttccgagggagctcaccgagaagttgattcgagaatcgctgcaaggaaagtgatttttgtttgcgagcagaaattcgtcgatctgttgaagcagcttccacaggagtttaacagctcctgagtagtttcctcgtgttatataagtaaaggaagatgatatcgaaatacatgggtgctgaataaaacagtaactagtacagtgctcgtgtgtgcaactgcacaaattattcaaggggagactgctgctgtgttagctactgctaatggaatgaggggatagtagagagggagcagaggtaggagacgagaataggggaggaaacaggaacagactgtattgattcagagtaaagttcatacatggttctcttctaacccatagactcttacttgtacttca

SEQ ID NO: 47775 - DNA, 1155 bp, Zea Mays
cgtcattagctccgagtcctctccctcctcctacgagtattctagcgcgagtaaatcgctgcgtgccttggcaatcaagggagcaacacaccatttgaacagctctgcacctttcaatacgccactacctgcactgcagcctgcatcaaccgagcatcatggcctcctccgtctccggcaactacccgcgtttcaagtcagagcgccgacatagacgagagggcgatccggagggaggaaccagagcagctggtcaaggccttggctgaagccaaggctgaggccatcaagcagaagcttcagggcgactctgctccggtcacagacggagaccaacctgcccgtctgctgatcacctcagaccaggttatggtgagcaaaggggtgatacgggagaggccacggagtgcagaagaagccagggaattcatcaatgggtactcgggcgatcgagcgttcgcagttaacttcgttcttgtcaccgacctgagcaccgggactacaagaggaggatgggacgtacctgagatcaggtttcagcacataccggacgagttcatcgaccaagtggtaaaccttcggcacactacagacgctgttctgcttccagtagtgcaatgtttacacagcaaaccctttgttcaaggttaatcagggcgacatgacctgcgtggccggcgggcttaagctgacacatccgtcagtacagccattcgtcaaagaactggtgggcacggtggatagcgtccgaggtcttccgagggagctcaccgagaagttgattcgagaatcgctgcaaggaaagtgatttttgtttgcgagcagaaattcgtcgatctgttgaagcagcttccacaggagtttaacagctcctgagtagtttcctcgtgttatataagtaaaggaagatgatatcgaaatacatgggtgctgaataaaacagtaactagtacagtgctcgtgtgtgcaactgcacaaattattcaaggggagactgctgctgtgttagctactgctaatggaatgaggggatagtagagagggagcagaggtaggagacgagaataggggaggaaacaggaacagactgtattgattcagagtaaagttcatacatggttctcttctaacccatagactcttacttgtacttca

SEQ ID NO: 47776 - DNA, 1133 bp, Zea Mays
ctctccctcctcctacgagtattctagcgcgagtaaatcgctgcgtgccttggcaatcaagggagcaacacaccatttgaacagctctgcacctttcaatacgccactacctgcactgcagcctgcatcaaccgagcatcatggcctcctccgtctccggcaactacccgcgtttcaaggtcatactcggatcgtcgtcgccggcacgccgcgagatcttggccgacatgggatacgagttcaccgtcatgtcagagcgccgacatagacgagagggcgatccggagggaggaaccagagcagctggtcaaggccttggctgaagccaaggctgaggccatcaagcagaagcttcagggcgactctgctccggtcacagacggagaccaacctgcccgtctgctgatcacctcagaccaggttatggtgagcaaaggggtgatacgggagaggccacggagtgcagaagaagccagggaattcatcaatgggtactcgggcgatcgagcgttcgcagttaacttcgttcttgtcaccgacctgagcaccgggactacaagaggaggatgggacgtacctgagatcaggtttcagcacataccggacgagttcatcgaccaagtggttaatcagggcgacatgacctgcgtggccggcgggcttaagctgacacatccgtcagtacagccattcgtcaaagaactggtgggcacggtggatagcgtccgaggtcttccgagggagctcaccgagaagttgattcgagaatcgctgcaaggaaagtgatttttgtttgcgagcagaaattcgtcgatctgttgaagcagcttccacaggagtttaacagctcctgagtagtttcctcgtgttatataagtaaaggaagatgatatcgaaatacatgggtgctgaataaaacagtaactagtacagtgctcgtgtgtgcaactgcacaaattattcaaggggagactgctgctgtgttagctactgctaatggaatgaggggatagtagagagggagcagaggtaggagacgagaataggggaggaaacaggaacagactgtattgattcagagtaaagttcatacatggttctcttctaacccatagactcttacttgtacttca

SEQ ID NO: 47777 - DNA, 1117 bp, Zea Mays
ctacgagtattctagcgcgagtaaatcgctgcgtgccttggcaatcaagggagcaacacaccatttgaacagctctgcacctttcaatacgccactacctgcactgcagcctgcatcaaccgagcatcatggcctcctccgtctccggcaactacccgcgtttcaaggtcatactcggatcgtcgtcgccggcacgccgcgagatcttggccgacatgggatacgagttcaccgtcatgagcgccgacatagacgagagggcgatccggagggaggaaccagagcagctggtcaaggccttggctgaagccaaggctgaggccatcaagcagaagcttcagggcgactctgctccggtcacagacggagaccaacctgcccgtctgctgatcacctcagaccaggttatggtgagcaaaggggtgatacgggagaggccacggagtgcagaagaagccagggaattcatcaatgggtactcgggcgatcgagcgttcgcagttaacttcgttcttgtcaccgacctgagcaccgggactacaagaggaggatgggacgtacctgagatcaggtttcagcacataccggacgagttcatcgaccaagtggttaatcagggcgacatgacctgcgtggccggcgggcttaagctgacacatccgtcagtacagccattcgtcaaagaactggtgggcacggtggatagcgtccgaggtcttccgagggagctcaccgagaagttgattcgagaatcgctgcaaggaaagtgatttttgtttgcgagcagaaattcgtcgatctgttgaagcagcttccacaggagtttaacagctcctgagtagtttcctcgtgttatataagtaaaggaagatgatatcgaaatacatgggtgctgaataaaacagtaactagtacagtgctcgtgtgtgcaactgcacaaattattcaaggggagactgctgctgtgttagctactgctaatggaatgaggggatagtagagagggagcagaggtaggagacgagaataggggaggaaacaggaacagactgtattgattcagagtaaagttcatacatggttctcttctaacccatagactcttacttgtacttca

SEQ ID NO: 47778 - DNA, 4654 bp, Zea Mays
gagagcggagtgtttgacgtcttgcgagctcatcatgcttggagtgccaatgccaaacacgcagacgcagcagctccgaagcaaactccacgactcggtctcctcttcctagcaccatccggcccatccagccgccgccgccttgcatcctccacctctccggatcccgccgcgatggaggaagacgacgagttcggcgacctctacacggacatcctcatccccactcatacccccgcatccacctccgcgctatccaaccctgttctagtcgaaaccctacaccgcccgcctccacaccctaatcctacccccgtggcggcggcagcagaggaggtcgacgatgactggctcctaggagggagcgaacccatacccggggtcgacccgaccggcgattgggccgacgaggacgacgatggaggggagcccgcacctcccgcgaagcggtccacctctgcggatgatatcgatccgctcatggggggtggtgcgggggattccgggccggtcatccctgggctctcgtcatcatcggcagctggtgcggccgggagcgacgaatgggacagcgatagcgaggacgacatccagatcgtgctcaacgagaccgatggccgcccggggcttgtggaggatgaaggagacgacgaagacggtgaggacctcgtcatcgtcgccgacggaccagcgatggaggagcaggattggggagaggacccagcagcggcaggggcagaaggagagcgaaaggacggatgtgagcctggtaagacggtggcagcaccgaccggaaggatcgggtacagtggcggcggcccagggttccatcagcagcaccattccatgttcaagtatgtacgacctggcgctcctggtgcttcagtaggtggggtacctggtggtcctggtcaattccgccctcctgggcctttaggccctttctctggtcgtggcagaggtgaatggaggcctgctgctggtcgaggcatgaacaaaagttttcattcaggctatggaatcactccatggggtggttcagggcgcaattttggtggtggactagattttgcacttcctcctcacaagacaatatttgatattgatgtggaaactgcatttgaggagaagccatggaaattccctggtgctgatatttcagacttttttaactttggccttgatgaagagaagtggaaagatttttgcaagcagctggaccaacttcgactagaatccacaatgcaatctaggatacgggtgtacgaaagtggccgctctgaacaggattatgacccagatttgccacctgagcttgctgctgtgactggtcatccagacatctctgctgacagtcgcaataaaatggttaacgggcatacagattttagtgcccaaggaagaggtccggcaaacgtacggacaccattgatgacagggagacctattcaagttgaaactaattacacagaccggtttccatctgttgattcacgctcgcatcgaatgcgtgaatcagattcggttattgagattgtgtgccagggccgtgattcgatggatgatgagacagtggaccaaactgaaaaggattctcaaggagtgaaaaagacacagcataagggacagctaccagtttcatctgaaagtgatatgttatctatggatgccaatactcactcccctcccagctacaaaacaagaggttcacctcgtggagcatggccattgaaaggaagctcactgggtcagaactctattcgagaaattgaaagctccaatgaagtaattcctcgtcagtcatcttcaaagagatgccatgattcccagaaagagaaccttattgagggctcagaaaataaggctgattcagattcagaagggtcacttgctgctaatgatgacgtggcagataaactgagtacagaagatcattttgatgatgctggtggtggtggtggtggtgatgatgataagctcacattggttggtcgtgttgaaatggatgttgatgatgctacctcagaccccaacatgcctagtgatgcaaatcacgatgataacctggttcattctgatacaaagcagaaacacatatctgtggttgagcaacctactgaacacaatagcagtgaacctgatgaattgaggaatactgaaaatagtaaagggaggtctggtagcagcaaagatcagcagaaacaccttgaatctggtgaagaagttcttcaagataagcaattaaggagagtaaataatgtaagaatgcatcatgacgcggaagaacacaaacttcgccaaaaagatgagcattcacgagatgcaaaatcagatttggaaagatcacgtttaccctccagaggcagggaagatatccaccaatcttatgcaaacagagatagggttgacatacagggcaggagttataataaggtaagagagactgaaattttgccaaggagagatgatggtgttcacagccgacgtgctaaagaggaagatttgaggctagagtacaatgttgaaggtggtgcaaggcatagaaataaggtgaggcccattgataggaatgatagagatgaagatcattcacggaagcgtttggatgatggcgataggagaggctctcgacaaagagagcgtggtgatgtggttttgaatcgccgtgaaagtgatgattctcttataaagagaaagaaggacgatgagaacttgcgtaggttgaagcctgaaaatgaagacatggtcgcgacacatggttataaagcaagggatgacagtaacagaagaaaaaaagagagggatgatggaattgatcagaaaagacgagatgatagtggtagactgcgggaaaaggatgatgatcgttatcatgtcaaacagaaggatggcaactggagacaaagagaaagggaggatagacagaggcccaagcaagaaaatacattaaccgttcagagggaagaaggaagaggaactggtcggggtagtcggatgatggatgataagttagtcagtggtggtaggaagaaggatgaaccaagatcttcattattaagcaaagacactcaagagcgtacaaggcaaaatgaaccttcgaggagaggtcagggtgtggaagaaaacaacatgcagaataaagggcgttttgatgacaattcaaacagtgagaggaactccaggcaagaaaaacaaaacaataatcgtctatctggcagttctgacgctcgccatgcaggcagagataagcatagggagagcacaaggaagggcagaggttccgagcttgctgagcatgatctccacagatcgagcaaaaggaggtgtgaagaccatgaaagccatcgcagtgggaaggttgaaacaaaagaagtgaatgaacaagagagtagtagaggtcatgcagcattatccaagaagggccagaatcctcagccagataattcattgttgaatgaagtggaagaagatgccatatcagatgacgaaaaccacgaggattctagaaggggtcgctctaagttggagcgatggacaagccacaaagagatagaatatagtaatattgatgatgatagtacacaaacatttccgaccatcaaagctgatgttgaagccgatgagacatctgataagatgactgaagaatgtgagcgtgaccgacatctagacacagttgagaggctcaagagacgaagtgagcgtttcaaacttcccatgcccggcgagaaggatgcacctcaaagcaaaaaggtagataccgaagtgcagcctccccaaaatgaatcgtcagctgttgatatggaagtgaagccagagcggccagctcgcaagaggagatggactgggagttagttgaactggaacatttccacttcatcaagaaatttcagcagattccatggcagttgcttgcacttcggcatgtttcttccttacagttgaaagttgagttgatgtgccactgtactcaggatagttctgaggctgttacgagaagcagtggcctcggagcccagttgaatatctgggttcggaatgagctgcattttgaagctggagtgcccctgctgcaagttgattttgtttgaagtgcaggtggcctggaagcactgggtcttgtaacacgcttgtgctggtgggagatacttgcaagctgtggtggctgaatgcttgccatgtgatgctgttttatggagcaataggtgatagaaacaaaggactagagatttcagaactgatgatataatcactaatttgtatgcttaatactatattagccatgtacattctgataaacatataactgtcgtgcatgagttgttgatggagtaaaggtagactgtagtgtagagctgcagggtgcactggaccatttggatggatcaatacatatatatatatacctgtaggcagtgctaggtaagaagaatatgattgtttgcttgttgtagatttgcgatgtatataactggttcatgtggagttttgctaatcatacagagttctgaatggcactatgtaaatttattgaaatttagcatttcagattacttgcttgctatatctgtactgtttgagaagttaaccctcacgcccacgacttgtggtacacgttagcgcggcatcatgatcaccacaccagaaatgtaag

SEQ ID NO: 47779 - DNA, 4855 bp, Zea Mays
gcggagtgtttgacgtcttgcgagctcatcatgcttggagtgccaatgccaaacacgcagacgcagcagctccgaagcaaactccacgactcggtctcctcttcctagcaccatccggcccatccagccgccgccgccttgcatcctccacctctccggatcccgccgcgatggaggaagacgacgagttcggcgacctctacacggacatcctcatccccactcatacccccgcatccacctccgcgctatccaaccctgttctagtcgaaaccctacaccgcccgcctccacaccctaatcctacccccgtggcggcggcagcagaggaggtcgacgatgactggctcctaggagggagcgaacccatacccggggtcgacccgaccggcgattgggccgacgaggacgacgatggaggggagcccgcacctcccgcgaagcggtccacctctgcggatgatatcgatccgctcatggggggtggtgcgggggattccgggccggtcatccctgggctctcgtcatcatcggcagctggtgcggccgggagcgacgaatgggacagcgatagcgaggacgacatccagatcgtgctcaacgagaccgatggccgcccggggcttgtggaggatgaaggagacgacgaagacggtgaggacctcgtcatcgtcgccgacggaccagcgatggaggagcaggattggggagaggacccagcagcggcaggggcagaaggagagcgaaaggacggatgtgagcctggtaagacggtggcagcaccgaccggaaggatcgggtacagtggcggcggcccagggttccatcagcagcaccattccatgttcaagtatgtacgacctggcgctcctggtgcttcagtaggtggggtacctggtggtcctggtcaattccgccctcctgggcctttaggccctttctctggtcgtggcagaggtgaatggaggcctgctgctggtcgaggcatgaacaaaagttttcattcaggctatggaatcactccatggggtggttcagggcgcaattttggtggtggactagattttgcacttcctcctcacaagacaatatttgatattgatgtggaaactgcatttgaggagaagccatggaaattccctggtgctgatatttcagacttttttaactttggccttgatgaagagaagtggaaagatttttgcaagcagctggaccaacttcgactagaatccacaatgcaatctaggatacgggtgtacgaaagtggccgctctgaacaggattatgacccagatttgccacctgagcttgctgctgtgactggtcatccagacatctctgctgacagtcgcaataaaatggttaacgggcatacagattttagtgcccaaggaagaggtccggcaaacgtacggacaccattgatgacagggagacctattcaagttgaaactaattacacagaccggtttccatctgttgattcacgctcgcatcgaatgcgtgaatcagattcggttattgagattgtgtgccagggccgtgattcgatggatgatgagacagtggaccaaactgaaaaggattctcaaggagtgaaaaagacacagcataagggacagctaccagtttcatctgaaagtgatatgttatctatggatgccaatactcactcccctcccagctacaaaacaagaggttcacctcgtggagcatggccattgaaaggaagctcactgggtcagaactctattcgagaaattgaaagctccaatgaagtaattcctcgtcagtcatcttcaaagagatgccatgattcccagaaagagaaccttattgagggctcagaaaataaggctgattcagattcagaagggtcacttgctgctaatgatgacgtggcagataaactgagtacagaagatcattttgatgatgctggtggtggtggtggtggtgatgatgataagctcacattggttggtcgtgttgaaatggatgttgatgatgctacctcagaccccaacatgcctagtgatgcaaatcacgatgataacctggttcattctgatacaaagcagaaacacatatctgtggttgagcaacctactgaacacaatagcagtgaacctgatgaattgaggaatactgaaaatagtaaagggaggtctggtagcagcaaagatcagcagaaacaccttgaatctggtgaagaagttcttcaagataagcaattaaggagagtaaataatgtaagaatgcatcatgacgcggaagaacacaaacttcgccaaaaagatgagcattcacgagatgcaaaatcagatttggaaagatcacgtttaccctccagaggcagggaagatatccaccaatcttatgcaaacagagatagggttgacatacagggcaggagttataataaggtaagagagactgaaattttgccaaggagagatgatggtgttcacagccgacgtgctaaagaggaagatttgaggctagagtacaatgttgaaggtggtgcaaggcatagaaataaggtgaggcccattgataggaatgatagagatgaagatcattcacggaagcgtttggatgatggcgataggagaggctctcgacaaagagagcgtggtgatgtggttttgaatcgccgtgaaagtgatgattctcttataaagagaaagaaggacgatgagaacttgcgtaggttgaagcctgaaaatgaagacatggtcgcgacacatggttataaagcaagggatgacagtaacagaagaaaaaaagagagggatgatggaattgatcagaaaagacgagatgatagtggtagactgcgggaaaaggatgatgatcgttatcatgtcaaacagaaggatggcaactggagacaaagagaaagggaggatagacagaggcccaagcaagaaaatacattaaccgttcagagggaagaaggaagaggaactggtcggggtagtcggatgatggatgataagttagtcagtggtggtaggaagaaggatgaaccaagatcttcattattaagcaaagacactcaagagcgtacaaggcaaaatgaaccttcgaggagaggtcagggtgtggaagaaaacaacatgcagaataaagggcgttttgatgacaattcaaacagtgagaggaactccaggcaagaaaaacaaaacaataatcgtctatctggcagttctgacgctcgccatgcaggcagagataagcatagggagagcacaaggaagggcagaggttccgagcttgctgagcatgatctccacagatcgagcaaaaggaggtgtgaagaccatgaaagccatcgcagtgggaaggttgaaacaaaagaagtgaatgaacaagagagtagtagaggtcatgcagcattatccaagaagggccagaatcctcagccagataattcattgttgaatgaagtggaagaagatgccatatcagatgacgaaaaccacgaggattctagaaggggtcgctctaagttggagcgatggacaagccacaaagagatagaatatagtaatattgatgatgatagtacacaaacatttccgaccatcaaagctgatgttgaagccgatgaggtaggtaaatctcaagtttctgctgcagctggcaactcggacatcaatagcaatgttgatactgggcagacatctgataagatgactgaagaatgtgagcgtgaccgacatctagacacagttgagaggctcaagagacgaagtgagcgtttcaaacttcccatgcccggcgagaaggatgcacctcaaagcaaaaaggtagataccgaagtgcagcctccccaaaatgaatcgtcagctgttgatatggaagtgaagccagagcggccagctcgcaagaggagatggactgggagttagttgaactggaacatttccacttcatcaagaaatttcagcagattccatggcagttgcttgcacttcggcatgtttcttccttacagttgaaagttgagttgatgtatggttttactgtttaacttgtaccagcaaagtgtaaacttagttgttttgtggctgggaactggatactgtactaaaatcacatccattttcccaccatgattcgggattccggtgaccattgtgtggcacaggtgccactgtactcaggatagttctgaggctgttacgagaagcagtggcctcggagcccagttgaatatctgggttcggaatgagctgcattttgaagctggagtgcccctgctgcaagttgattttgtttgaagtgcaggtggcctggaagcactgggtcttgtaacacgcttgtgctggtgggagatacttgcaagctgtggtggctgaatgcttgccatgtgatgctgttttatggagcaataggtgatagaaacaaaggactagagatttcagaactgatgatataatcactaatttgtatgcttaatactatattagccatgtacattctgataaacatataactgtcgtgcatgagttgttgatggagtaaaggtagactgtagtgtagagctgcagggtgcactggaccatttggatggatcaatacatatatatatatacctgtaggcagtgctaggtaagaagaatatgattgtttgcttgttgtagatttgcgatgtatataactggttcatgtggagttttgctaatcatacagagttctgaatggcactatgtaaatttattgaaatttagcatttcagattacttgcttgctatatctgtactgtttgagaagttaaccctcacgcccacgacttgtggtacacgttagcgcggcatcatgatcaccacaccagaaatgtaag

SEQ ID NO: 47780 - DNA, 3366 bp, Zea Mays
gtgtttgacgtcttgcgagctcatcatgcttggagtgccaatgccaaacacgcagacgcagcagctccgaagcaaactccacgactcggtctcctcttcctagcaccatccggcccatccagccgccgccgccttgcatcctccacctctccggatcccgccgcgatggaggaagacgacgagttcggcgacctctacacggacatcctcatccccactcatacccccgcatccacctccgcgctatccaaccctgttctagtcgaaaccctacaccgcccgcctccacaccctaatcctacccccgtggcggcggcagcagaggaggtcgacgatgactggctcctaggagggagcgaacccatacccggggtcgacccgaccggcgattgggccgacgaggacgacgatggaggggagcccgcacctcccgcgaagcggtccacctctgcggatgatatcgatccgctcatggggggtggtgcgggggattccgggccggtcatccctgggctctcgtcatcatcggcagctggtgcggccgggagcgacgaatgggacagcgatagcgaggacgacatccagatcgtgctcaacgagaccgatggccgcccggggcttgtggaggatgaaggagacgacgaagacggtgaggacctcgtcatcgtcgccgacggaccagcgatggaggagcaggattggggagaggacccagcagcggcaggggcagaaggagagcgaaaggacggatgtgagcctggtaagacggtggcagcaccgaccggaaggatcgggtacagtggcggcggcccagggttccatcagcagcaccattccatgttcaagtatgtacgacctggcgctcctggtgcttcagtaggtggggtacctggtggtcctggtcaattccgccctcctgggcctttaggccctttctctggtcgtggcagaggtgaatggaggcctgctgctggtcgaggcatgaacaaaagttttcattcaggctatggaatcactccatggggtggttcagggcgcaattttggtggtggactagattttgcacttcctcctcacaagacaatatttgatattgatgtggaaactgcatttgaggagaagccatggaaattccctggtgctgatatttcagacttttttaactttggccttgatgaagagaagtggaaagatttttgcaagcagctggaccaacttcgactagaatccacaatgcaatctaggatacgggtgtacgaaagtggccgctctgaacaggattatgacccagatttgccacctgagcttgctgctgtgactggtcatccagacatctctgctgacagtcgcaataaaatggttaacgggcatacagattttagtgcccaaggaagaggtccggcaaacatgacagggagacctattcaagttgaaactaattacacagaccggtttccatctgttgattcacgctcgcatcgaatgcgtgaatcagattcggttattgagattgtgtgccagggccgtgattcgatggatgatgagacagtggaccaaactgaaaaggattctcaaggagtgaaaaagacacagcataagggacagctaccagtttcatctgaaagtgatatgttatctatggatgccaatactcactcccctcccagctacaaaacaagaggttcacctcgtggagcatggccattgaaaggaagctcactgggtcagaactctattcgagaaattgaaagctccaatgaagtaattcctcgtcagtcatcttcaaagagatgccatgattcccagaaagagaaccttattgagggctcagaaaataaggctgattcagattcagaagggtcacttgctgctaatgatgacgtggcagataaactgagtacagaagatcattttgatgatgctggtggtggtggtggtggtgatgatgataagctcacattggttggtcgtgttgaaatggatgttgatgatgctacctcagaccccaacatgcctagtgatgcaaatcacgatgataacctggttcattctgatacaaagcagaaacacatatctgtggttgagcaacctactgaacacaatagcagtgaacctgatgaattgaggaatactgaaaatagtaaagggaggtctggtagcagcaaagatcagcagaaacaccttgaatctggtgaagaagttcttcaagataagcaattaaggagagtaaataatgtaagaatgcatcatgacgcggaagaacacaaacttcgccaaaaagatgagcattcacgagatgcaaaatcagatttggaaagatcacgtttaccctccagaggcagggaagatatccaccaatcttatgcaaacagagatagggttgacatacagggcaggagttataataaggtaagagagactgaaattttgccaaggagagatgatggtgttcacagccgacgtgctaaagaggaagatttgaggctagagtacaatgttgaaggtggtgcaaggcatagaaataaggtgaggcccattgataggaatgatagagatgaagatcattcacggaagcgtttggatgatggcgataggagaggctctcgacaaagagagcgtggtgatgtggttttgaatcgccgtgaaagtgatgattctcttataaagagaaagaaggacgatgagaacttgcgtaggttgaagcctgaaaatgaagacatggtcgcgacacatggttataaagcaagggatgacagtaacagaagaaaaaaagagagggatgatggaattgatcagaaaagacgagatgatagtggtagactgcgggaaaaggatgatgatcgttatcatgtcaaacagaaggatggcaactggagacaaagagaaagggaggatagacagaggcccaagcaagaaaatacattaaccgttcagagggaagaaggaagaggaactggtcggggtagtcggatgatggatgataagttagtcagtggtggtaggaagaaggatgaaccaagatcttcattattaagcaaagacactcaagagcgtacaaggcaaaatgaaccttcgaggagaggtcagggtgtggaagaaaacaacatgcagaataaagggcgttttgatgacaattcaaacagtgagaggaactccaggcaagaaaaacaaaacaataatcgtctatctggcagttctgacgctcgccatgcaggcagagataagcatagggagagcacaaggaagggcagaggttccgagcttgctgagcatgatctccacagatcgagcaaaaggaggtgtgaagaccatgaaagccatcgcagtgggaaggtttgcagttgcagcttaactcttctacatatg

SEQ ID NO: 47781 - DNA, 4774 bp, Zea Mays
gcttggagtgccaatgccaaacacgcagacgcagcagctccgaagcaaactccacgactcggtctcctcttcctagcaccatccggcccatccagccgccgccgccttgcatcctccacctctccggatcccgccgcgatggaggaagacgacgagttcggcgacctctacacggacatcctcatccccactcatacccccgcatccacctccgcgctatccaaccctgttctagtcgaaaccctacaccgcccgcctccacaccctaatcctacccccgtggcggcggcagcagaggaggtcgacgatgactggctcctaggagggagcgaacccatacccggggtcgacccgaccggcgattgggccgacgaggacgacgatggaggggagcccgcacctcccgcgaagcggtccacctctgcggatgatatcgatccgctcatggggggtggtgcgggggattccgggccggtcatccctgggctctcgtcatcatcggcagctggtgcggccgggagcgacgaatgggacagcgatagcgaggacgacatccagatcgtgctcaacgagaccgatggccgcccggggcttgtggaggatgaaggagacgacgaagacggtgaggacctcgtcatcgtcgccgacggaccagcgatggaggagcaggattggggagaggacccagcagcggcaggggcagaaggagagcgaaaggacggatgtgagcctggtaagacggtggcagcaccgaccggaaggatcgggtacagtggcggcggcccagggttccatcagcagcaccattccatgttcaagtatgtacgacctggcgctcctggtgcttcagtaggtggggtacctggtggtcctggtcaattccgccctcctgggcctttaggccctttctctggtcgtggcagaggtgaatggaggcctgctgctggtcgaggcatgaacaaaagttttcattcaggctatggaatcactccatggggtggttcagggcgcaattttggtggtggactagattttgcacttcctcctcacaagaccaacttcgactagaatccacaatgcaatctaggatacgggtgtacgaaagtggccgctctgaacaggattatgacccagatttgccacctgagcttgctgctgtgactggtcatccagacatctctgctgacagtcgcaataaaatggttaacgggcatacagattttagtgcccaaggaagaggtccggcaaacgtacggacaccattgatgacagggagacctattcaagttgaaactaattacacagaccggtttccatctgttgattcacgctcgcatcgaatgcgtgaatcagattcggttattgagattgtgtgccagggccgtgattcgatggatgatgagacagtggaccaaactgaaaaggattctcaaggaggtaacaaaggagcccattgtattgagggaaagccatattcatcagataagataaataattctgatcataactcaaattcagtgaaaaagacacagcataagggacagctaccagtttcatctgaaagtgatatgttatctatggatgccaatactcactcccctcccagctacaaaacaagaggttcacctcgtggagcatggccattgaaaggaagctcactgggtcagaactctattcgagaaattgaaagctccaatgaagtaattcctcgtcagtcatcttcaaagagatgccatgattcccagaaagagaaccttattgagggctcagaaaataaggctgattcagattcagaagggtcacttgctgctaatgatgacgtggcagataaactgagtacagaagatcattttgatgatgctggtggtggtggtggtggtgatgatgataagctcacattggttggtcgtgttgaaatggatgttgatgatgctacctcagaccccaacatgcctagtgatgcaaatcacgatgataacctggttcattctgatacaaagcagaaacacatatctgtggttgagcaacctactgaacacaatagcagtgaacctgatgaattgaggaatactgaaaatagtaaagggaggtctggtagcagcaaagatcagcagaaacaccttgaatctggtgaagaagttcttcaagataagcaattaaggagagtaaataatgtaagaatgcatcatgacgcggaagaacacaaacttcgccaaaaagatgagcattcacgagatgcaaaatcagatttggaaagatcacgtttaccctccagaggcagggaagatatccaccaatcttatgcaaacagagatagggttgacatacagggcaggagttataataaggtaagagagactgaaattttgccaaggagagatgatggtgttcacagccgacgtgctaaagaggaagatttgaggctagagtacaatgttgaaggtggtgcaaggcatagaaataaggtgaggcccattgataggaatgatagagatgaagatcattcacggaagcgtttggatgatggcgataggagaggctctcgacaaagagagcgtggtgatgtggttttgaatcgccgtgaaagtgatgattctcttataaagagaaagaaggacgatgagaacttgcgtaggttgaagcctgaaaatgaagacatggtcgcgacacatggttataaagcaagggatgacagtaacagaagaaaaaaagagagggatgatggaattgatcagaaaagacgagatgatagtggtagactgcgggaaaaggatgatgatcgttatcatgtcaaacagaaggatggcaactggagacaaagagaaagggaggatagacagaggcccaagcaagaaaatacattaaccgttcagagggaagaaggaagaggaactggtcggggtagtcggatgatggatgataagttagtcagtggtggtaggaagaaggatgaaccaagatcttcattattaagcaaagacactcaagagcgtacaaggcaaaatgaaccttcgaggagaggtcagggtgtggaagaaaacaacatgcagaataaagggcgttttgatgacaattcaaacagtgagaggaactccaggcaagaaaaacaaaacaataatcgtctatctggcagttctgacgctcgccatgcaggcagagataagcatagggagagcacaaggaagggcagaggttccgagcttgctgagcatgatctccacagatcgagcaaaaggaggtgtgaagaccatgaaagccatcgcagtgggaaggttgaaacaaaagaagtgaatgaacaagagagtagtagaggtcatgcagcattatccaagaagggccagaatcctcagccagataattcattgttgaatgaagtggaagaagatgccatatcagatgacgaaaaccacgaggattctagaaggggtcgctctaagttggagcgatggacaagccacaaagagatagaatatagtaatattgatgatgatagtacacaaacatttccgaccatcaaagctgatgttgaagccgatgaggtaggtaaatctcaagtttctgctgcagctggcaactcggacatcaatagcaatgttgatactgggcagacatctgataagatgactgaagaatgtgagcgtgaccgacatctagacacagttgagaggctcaagagacgaagtgagcgtttcaaacttcccatgcccggcgagaaggatgcacctcaaagcaaaaaggtagataccgaagtgcagcctccccaaaatgaatcgtcagctgttgatatggaagtgaagccagagcggccagctcgcaagaggagatggactgggagttagttgaactggaacatttccacttcatcaagaaatttcagcagattccatggcagttgcttgcacttcggcatgtttcttccttacagttgaaagttgagttgatgtatggttttactgtttaacttgtaccagcaaagtgtaaacttagttgttttgtggctgggaactggatactgtactaaaatcacatccattttcccaccatgattcgggattccggtgaccattgtgtggcacaggtgccactgtactcaggatagttctgaggctgttacgagaagcagtggcctcggagcccagttgaatatctgggttcggaatgagctgcattttgaagctggagtgcccctgctgcaagttgattttgtttgaagtgcaggtggcctggaagcactgggtcttgtaacacgcttgtgctggtgggagatacttgcaagctgtggtggctgaatgcttgccatgtgatgctgttttatggagcaataggtgatagaaacaaaggactagagatttcagaactgatgatataatcactaatttgtatgcttaatactatattagccatgtacattctgataaacatataactgtcgtgcatgagttgttgatggagtaaaggtagactgtagtgtagagctgcagggtgcactggaccatttggatggatcaatacatatatatatatacctgtaggcagtgctaggtaagaagaatatgattgtttgcttgttgtagatttgcgatgtatataactggttcatgtggagttttgctaatcatacagagttctgaatggcactatgtaaatttattgaaatttagcatttcagattacttgcttgctatatctgtactgtttgagaagttaaccctcacgcccacgacttgtggtacacgttagcgcggcatcatgatcaccacaccagaaatgtaag

SEQ ID NO: 47782 - DNA, 2457 bp, Zea Mays
gccaaacacgcagacgcagcagctccgaagcaaactccacgactcggtctcctcttcctagcaccatccggcccatccagccgccgccgccttgcatcctccacctctccggatcccgccgcgatggaggaagacgacgagttcggcgacctctacacggacatcctcatccccactcatacccccgcatccacctccgcgctatccaaccctgttctagtcgaaaccctacaccgcccgcctccacaccctaatcctacccccgtggcggcggcagcagaggaggtcgacgatgactggctcctaggagggagcgaacccatacccggggtcgacccgaccggcgattgggccgacgaggacgacgatggaggggagcccgcacctcccgcgaagcggtccacctctgcggatgatatcgatccgctcatggggggtggtgcgggggattccgggccggtcatccctgggctctcgtcatcatcggcagctggtgcggccgggagcgacgaatgggacagcgatagcgaggacgacatccagatcgtgctcaacgagaccgatggccgcccggggcttgtggaggatgaaggagacgacgaagacggtgaggacctcgtcatcgtcgccgacggaccagcgatggaggagcaggattggggagaggacccagcagcggcaggggcagaaggagagcgaaaggacggatgtgagcctggtaagacggtggcagcaccgaccggaaggatcgggtacagtggcggcggcccagggttccatcagcagcaccattccatgttcaagtatgtacgacctggcgctcctggtgcttcagtaggtggggtacctggtggtcctggtcaattccgccctcctgggcctttaggccctttctctggtcgtggcagaggtgaatggaggcctgctgctggtcgaggcatgaacaaaagttttcattcaggctatggaatcactccatggggtggttcagggcgcaattttggtggtggactagattttgcacttcctcctcacaagacaatatttgatattgatgtggaaactgcatttgaggagaagccatggaaattccctggtgctgatatttcagacttttttaactttggccttgatgaagagaagtggaaagatttttgcaagcagctggaccaacttcgactagaatccacaatgcaatctaggatacgggtgtacgaaagtggccgctctgaacaggattatgacccagatttgccacctgagcttgctgctgtgactggtcatccagacatctctgctgacagtcgcaataaaatggttaacgggcatacagattttagtgcccaaggaagaggtccggcaaactgacagggagacctattcaagttgaaactaattacacagaccggtttccatctgttgattcacgctcgcatcgaatgcgtgaatcagattcggttattgagattgtgtgccagggccgtgattcgatggatgatgagacagtggaccaaactgaaaaggattctcaaggagtgaaaaagacacagcataagggacagctaccagtttcatctgaaagtgatatgttatctatggatgccaatactcactcccctcccagctacaaaacaagaggttcacctcgtggagcatggccattgaaaggaagctcactgggtcagaactctattcgagaaattgaaagctccaatgaagtaattcctcgtcagtcatcttcaaagagatgccatgattcccagaaagagaaccttattgagggctcagaaaataaggctgattcagattcagaagggtcacttgctgctaatgatgacgtggcagataaactgagtacagaagatcattttgatgatgctggtggtggtggtggtggtgatgatgataagctcacattggttggtcgtgttgaaatggatgttgatgatgctacctcagaccccaacatgcctagtgatgcaaatcacgatgataacctggttcattctgatacaaagcagaaacacatatctgtggttgagcaacctactgaacacaatagcagtgaacctgatgaattgaggaatactgaaaatagtaaagggaggtctggtagcagcaaagatcagcagaaacaccttgaatctggtgaagaagttcttcaagataagcaattaaggagagtaaataatgtaagaatgcatcatgacgcggaagaacacaaacttcgccaaaaagatgagcattcacgagatgcaaaatcagatttggaaagatcacgtttaccctccagaggcagggaagatatccaccaatcttatgcaaacagagatagggttgacatacagggcaggagttataataaggtaagagagactgaaattttgccaaggagagatgatggtgttcacagccgacgtgctaaagaggaagatttgaggctagagtacaatgttg

SEQ ID NO: 47783 - DNA, 1383 bp, Zea Mays
gcagctccgaagcaaactccacgactcggtctcctcttcctagcaccatccggcccatccagccgccgccgccttgcatcctccacctctccggatcccgccgcgatggaggaagacgacgagttcggcgacctctacacggacatcctcatccccactcatacccccgcatccacctccgcgctatccaaccctgttctagtcgaaaccctacaccgcccgcctccacaccctaatcctacccccgtggcggcggcagcagaggaggtcgacgatgactggctcctaggagggagcgaacccatacccggggtcgacccgaccggcgattgggccgacgaggacgacgatggaggggagcccgcacctcccgcgaagcggtccacctctgcggatgatatcgatccgctcatggggggtggtgcgggggattccgggccggtcatccctgggctctcgtcatcatcggcagctggtgcggccgggagcgacgaatgggacagcgatagcgaggacgacatccagatcgtgctcaacgagaccgatggccgcccggggcttgtggaggatgaaggagacgacgaagacggtgaggacctcgtcatcgtcgccgacggaccagcgatggaggagcaggattggggagaggacccagcagcggcaggggcagaaggagagcgaaaggacggatgtgagcctggtaagacggtggcagcaccgaccggaaggatcgggtacagtggcggcggcccagggttccatcagcagcaccattccatgttcaagtatgtacgacctggcgctcctggtgcttcagtaggtggggtacctggtggtcctggtcaattccgccctcctgggcctttaggccctttctctggtcgtggcagaggtgaatggaggcctgctgctggtcgaggcatgaacaaaagttttcattcaggctatggaatcactccatggggtggttcagggcgcaattttggtggtggactagattttgcacttcctcctcacaagacaatatttgatattgatgtggaaactgcatttgaggagaagccatggaaattccctggtgctgatatttcagacttttttaactttggccttgatgaagagaagtggaaagatttttgcaagcagctggaccaacttcgactagaatccacaatgcaatctaggatacgggtgtacgaaagtggccgctctgaacaggattatgacccagatttgccacctgagcttgctgctgtgactggtcatccagacatctctgctgacagtcgcaataaaatggttaacgggcatacagattttagtgcccaaggaagaggtccggcaaacgtacggacaccattgtgatgtgagtttgcttttcag

SEQ ID NO: 47784 - DNA, 1795 bp, Zea Mays
gcgcaccgagaccgagagaaaggcagactgggggagagagaggaatcgagagaccacacgccggcgccacgtagcttgatctaggcgatggaggtggcgcttgtggagcggttggaggcggcggtgaagatcggcgggaaggtgctggacgcgaccaaggtgctcgccgaggcatttgccgtcgccaaggacatgctcgtacaggccaagcagcaccagaaaccagcatcaatggctgatgcgcagggcttcgttaagcccctcagtgatgttatggcaaaagcaactgcaatgaccgaaggaaggagaccagactatttcaaccatttaaagagtgttgctgacagtctacctgctttggcttgggtggcattcttaggaaaggactgtggcatgagtttcccaacggcacatgtagaggaaagctggcagatggctgagttctataataacaaggttcttgtggagtacagaaacaaagaccctgatcatgttgaatgggctaaagcattgaaggatctatatatgcctggtttgcgggattatgttaaaaagcactaccctcttggtcctgtctggggtcctgctggaggcgctgttgtttctcaaccaaaggctgctgctcctacacctaaagctccagcggttaaggctccccctccaccagctcctcctgcagcgcctctgtttagcacagagaagtctccaaaatcttcaaagcctaaagaagggatgtctgctgtcttccaagagattagttcaaaacctgtgactgcagggttgcgaaaggttaccgatgacatgaagtctaaaaaccgcgctgatagaagcggtgttgtcagcagcactgctcctgctcctgctgcagctcctgaaaagacttcccgtgcagggtccttctctttcaaatctggaccccctaaactggaacttcagatgggacgcaaatgggtggttgagaatcaggttggcaagaagacccttgctattgatgattgtgattccagacaatctgtctatgtgtatggatgcaaggattctgtccttcaagtaaacggcaaggttaacaatatcactgttgacaaatgcactaagtttggaattgtattcaaggatgttgtagcagcttttgagattgtcaactgcaatggcgttgaggtccaatgtcagggtacgtcaccgacaatatcaatcgacaacacatctggatgtcaattatacttaagcaaagattcgctgggagcttcaattacttctgccaaatctagcgaaatcaatgtgatggttccaagtggtggcgctgatggtgattgggtggagcatgcattgcctcaacagtacatccatagtttcaaggatgggcagttcaccacttcaccagtttcacactcaggagcgtgaatacaattgttactgctgttgtttttgaggtttgtaaacagttttgggtcttgcagcactggactcggtctgcgattgttgttttttgttgcccttgctcagtccgcggtgtgtatgtcctgcatgcacgtggttcctttctgttggtgtttttgtgtgccaacaaaccaccaaacttggtttgtatgtctttagctgatcattctttgacactgaatctcattatatttgtattcatttggacgcttgcttttttcgagtctcttttcagattcctttaacaaagtgacaatggcaaatgctgttatcgtactttaaatctcgacgctgtgcttggatcgtgaaacacgtactagaatacgagaggtggcgcaatacattaggcagaaaaaag

SEQ ID NO: 47785 - DNA, 1879 bp, Zea Mays
cgagagaaaggcagactgggggagagagaggaatcgagagaccacacgccggcgccacgtagcttgatctaggcgatggaggtggcgcttgtggagcggttggaggcggcggtggcgcggctcgaggccgccgtggcctccggcgcctcgctcgcgtcgacggctccgcgcgacttcgacgctctggaggcccggtcggatccggccatcatggcttacgacgagttcgtcgcggaggccgtcgggcggctcacggccgcggcggagaagatcggcgggaaggtgctggacgcgaccaaggtgctcgccgaggcatttgccgtcgccaaggacatgctcgtacaggccaagcagcaccagaaaccagcatcaatggctgatgcgcagggcttcgttaagcccctcagtgatgttatggcaaaagcaactgcaatgaccgaaggaaggagaccagactatttcaaccatttaaagagtgttgctgacagtctacctgctttggcttgggtggcattcttaggaaaggactgtggcatgagtttcccaacggcacatgtagaggaaagctggcagatggctgagttctataataacaaggttcttgtggagtacagaaacaaagaccctgatcatgttgaatgggctaaagcattgaaggatctatatatgcctggtttgcgggattatgttaaaaagcactaccctcttggtcctgtctggggtcctgctggaggcgctgttgtttctcaaccaaaggctgctgctcctacacctaaagctccagcggttaaggctccccctccaccagctcctcctgcagcgcctctgtttagcacagagaagtctccaaaatcttcaaagcctaaagaagggatgtctgctgtcttccaagagattagttcaaaacctgtgactgcagggttgcgaaaggttaccgatgacatgaagtctaaaaaccgcgctgatagaagcggtgttgtcagcagcactgctcctgctcctgctgcagctcctgaaaagacttcccgtgcagggtccttctctttcaaatctggaccccctaaactggaacttcagatgggacgcaaatgggtggttgagaatcaggttggcaagaagacccttgctattgatgattgtgattccagacaatctgtctatgtgtatggatgcaaggattctgtccttcaagtaaacggcaaggttaacaatatcactgttgacaaatgcactaagtttggaattgtattcaagggtacgtcaccgacaatatcaatcgacaacacatctggatgtcaattatacttaagcaaagattcgctgggagcttcaattacttctgccaaatctagcgaaatcaatgtgatggttccaagtggtggcgctgatggtgattgggtggagcatgcattgcctcaacagtacatccatagtttcaaggatgggcagttcaccacttcaccagtttcacactcaggagcgtgaatacaattgttactgctgttgtttttgaggtttgtaaacagttttgggtcttgcagcactggactcggtctgcgattgttgttttttgttgcccttgctcagtccgcggtgtgtatgtcctgcatgcacgtggttcctttctgttggtgtttttgtgtgccaacaaaccaccaaacttggtttgtatgtctttagctgatcattctttgacactgaatctcattatatttgtattcatttggacgcttgcttttttcgagtctcttttcagattcctttaacaaagtgacaatggcaaatgctgttatcgtactttaaatctcgacgctgtgcttggatcgtgaaacacgtactagaatacgagaggtggcgcaatacattaggcagaaaaaag

SEQ ID NO: 47786 - DNA, 1880 bp, Zea Mays
cgagagaaaggcagactgggggagagagaggaatcgagagaccacacgccggcgccacgtagcttgatctaggcgatggaggtggcgcttgtggagcggttggaggcggcggtggcgcggctcgaggccgccgtggcctccggcgcctcgctcgcgtcgacggctccgcgcgacttcgacgctctggaggcccggtcggatccggccatcatggcttacgacgagttcgtcgcggaggccgtcgggcggctcacggccgcggcggagaagatcggcgggaaggtgctggacgcgaccaaggtgctcgccgaggcatttgccgtcgccaaggacatgctcgtacaggccaagcagcaccagaaaccagcatcaatggctgatgcgcagggcttcgttaagcccctcagtgatgttatggcaaaagcaactgcaatgaccgaaggaaggagaccagactatttcaaccatttaaagagtgttgctgacagtctacctgctttggcttgggtggcattcttaggaaaggactgtggcatgagtttcccaacggcacatgtagaggaaagctggcagatggctgagttctataataacaaggttcttgtggagtacagaaacaaagaccctgatcatgttgaatgggctaaagcattgaaggatctatatatgcctggtttgcgggattatgttaaaaagcactaccctcttggtcctgtctggggtcctgctggaggcgctgttgtttctcaaccaaaggctgctgctcctacacctaaagctccagcggttaaggctccccctccaccagctcctcctgcagcgcctctgtttagcacagagaagtctccaaaatcttcaaagcctaaagaagggatgtctgctgtcttccaagagattagttcaaaacctgtgactgcagggttgcgaaaggttaccgatgacatgaagtctaaaaaccgcgctgatagaagcggtgttgtcagcagcactgctcctgctcctgctgcagctcctgaaaagacttcccgtgcagggtccttctctttcaaatctggaccccctaaactggaacttcagatgggacgcaaatgggtggttgagaatcaggttggcaagaagacccttgctattgatgattgtgattccagacaatctgtctatgtgtatggatgcaaggattctgtccttcaagtaaacggatgttgtagcagcttttgagattgtcaactgcaatggcgttgaggtccaatgtcagggtacgtcaccgacaatatcaatcgacaacacatctggatgtcaattatacttaagcaaagattcgctgggagcttcaattacttctgccaaatctagcgaaatcaatgtgatggttccaagtggtggcgctgatggtgattgggtggagcatgcattgcctcaacagtacatccatagtttcaaggatgggcagttcaccacttcaccagtttcacactcaggagcgtgaatacaattgttactgctgttgtttttgaggtttgtaaacagttttgggtcttgcagcactggactcggtctgcgattgttgttttttgttgcccttgctcagtccgcggtgtgtatgtcctgcatgcacgtggttcctttctgttggtgtttttgtgtgccaacaaaccaccaaacttggtttgtatgtctttagctgatcattctttgacactgaatctcattatatttgtattcatttggacgcttgcttttttcgagtctcttttcagattcctttaacaaagtgacaatggcaaatgctgttatcgtactttaaatctcgacgctgtgcttggatcgtgaaacacgtactagaatacgagaggtggcgcaatacattaggcagaaaaaag

SEQ ID NO: 47787 - DNA, 1392 bp, Zea Mays
atgggtataaatttagacagcagcggtcaaagttgtcttgaaggttacaaaaggttcttgtggagtacagaaacaaagaccctgatcatgttgaatgggctaaagcattgaaggatctatatatgcctggtttgcgggattatgttaaaaagcactaccctcttggtcctgtctggggtcctgctggaggcgctgttgtttctcaaccaaaggctgctgctcctacacctaaagctccagcggttaaggctccccctccaccagctcctcctgcagcgcctctgtttagcacagagaagtctccaaaatcttcaaagcctaaagaagggatgtctgctgtcttccaagagattagttcaaaacctgtgactgcagggttgcgaaaggttaccgatgacatgaagtctaaaaaccgcgctgatagaagcggtgttgtcagcagcactgctcctgctcctgctgcagctcctgaaaagacttcccgtgcagggtccttctctttcaaatctggaccccctaaactggaacttcagatgggacgcaaatgggtggttgagaatcaggttggcaagaagacccttgctattgatgattgtgattccagacaatctgtctatgtgtatggatgcaaggattctgtccttcaagtaaacggcaaggttaacaatatcactgttgacaaatgcactaagtttggaattgtattcaaggatgttgtagcagcttttgagattgtcaactgcaatggcgttgaggtccaatgtcagggtacgtcaccgacaatatcaatcgacaacacatctggatgtcaattatacttaagcaaagattcgctgggagcttcaattacttctgccaaatctagcgaaatcaatgtgatggttccaagtggtggcgctgatggtgattgggtggagcatgcattgcctcaacagtacatccatagtttcaaggatgggcagttcaccacttcaccagtttcacactcaggagcgtgaatacaattgttactgctgttgtttttgaggtttgtaaacagttttgggtcttgcagcactggactcggtctgcgattgttgttttttgttgcccttgctcagtccgcggtgtgtatgtcctgcatgcacgtggttcctttctgttggtgtttttgtgtgccaacaaaccaccaaacttggtttgtatgtctttagctgatcattctttgacactgaatctcattatatttgtattcatttggacgcttgcttttttcgagtctcttttcagattcctttaacaaagtgacaatggcaaatgctgttatcgtactttaaatctcgacgctgtgcttggatcgtgaaacacgtactagaatacgagaggtggcgcaatacattaggcagaaaaaag

SEQ ID NO: 47788 - DNA, 2861 bp, Zea Mays
tccaggttaggaattaataactccgccctttcaataaaagccaagagctatagaaaaggcagcaaacataaagaagctctaattgaaaccgagtgaaaatgtgtggttaccctttattggtttcataattcatatagagagttttatgagagaaaaaagcagatgaagtaccttccctatccccatttcccaatgtttggctgtgtttctgttcctgtacggtagctggtgtcgccactgcatctttagtcttattgagctcatccttaccttttgaagatgaatcatcaggagcctccacctcaacacttggcaagtcattcacttgttcagtattacctgcaacaacgtcgggagaagctaataaaaccacattcactcgcattatctacaggaaactgaatctttcatggaacttattgaaccttttgtagtttcggttgcactcttgtccccaatagcagttgaatcacctgactccttagcattattggtttttggctccactaaggagcaatcatcacttgagacgctcttaatgcctgattcttggtggtcattttgtgacatggatgaattgtttttcttttccacagataaagacttaccttctttctcattgatctcttttttctcggtatcaattgaattttgaatcatatcctcatcttgtttttgatcaccatctctatttttcttactgccaagagcacatttcatttatatcgtcagaaaaacttgtgagcatttcaatgcaaaataggtgcaagcattgcttaccttacactagcacaaatgtctttgagttcatctggcggatcctcaagaataaaacagtgcctacttgataattggagtgcaggagacacatcagatacagattttagtgaactacggaatgaagtggtggtgttatcatcttccacaagaccagctaaatacgctgcctgcatagacataccttaggcccttgagcggtacatactgtatgaataacttaaaataacaatcagtatggtacttactagtgccataactggatttcctgcatccgcaaatgaaccttcatattctgggctgtgaccagtagcctcaaatgcagattttaagatatcaatagcaacatttgatagtttttcaccagaagtatctacatctgcagaattttcctttactacaggttgctcatcagaagattgctttggctcttcagtgcttggagatgcacctgaatctctgccatctgaattctgagtatctttatttacaacaacactggcattttcagtttttgtttcttcacagtttccctctgttttctctgaggccttttcatccacagtacctcttccttccactttatcttcaacttccattttctcagatgtttcagcaatggctttctcagttgtggcttgatctgtacttactgggatgttttgattaatatctttgccatcatggaagcggtcttcaatttgcatttgaagaaagtgcaacatgcattgtgcttttgtcttagtagcaacatgttcagcaatctcagcccattttccaccaaaaatttccaaaccttctaatagaagtaatgtttcctcatctgtccaactagtaccactagcacctgaaactcctgcagaatccatgaggatgaaatcggttttggccatgcctggatcaaatttcccttcattatagcaatcacaacagaggtcaaaatctgcctgcataaatgaaagaaaaaaaaattaccaatcgatggattcaaaacacaactctccctgtttcttaaacaatggcagtgtaaaagggcctctagccgagttggttaggtggtctaaatagcactccttaggtcctgagttcgaatttcaggctgtggttaaaaaaggtcactcgttggttcccctggttgtgtgcacacgagatggactgacctatggggggtggatcctcgtgtaggggctgggagggctcaaagcacgagtaaagatctggcctataggggactataggggacggaccctcatgttttatgggggaccagctttcgtgaatcgtgacctttctcggtcggggcttcgattgaacttcttcttaatttaatattgtgggggtggtctttcccctacaggctgagtttttaaacaatggcagtaacaagaaaagttgacatcacaaagatgaggtaagcagtacaggccacagagaagtattttgaaaagataaagtcacatcagattgatgtttatagatctcagaattcatagatggcaggttacttgcacccacattctatacccaacactgtaatagtcgttctttatgcagtataggcgaaagggcctctagcctagtggttaagggcttccgagtagcacctccaagtcctaggttcgatccccctcgggggcggattttcatgcttggttaaaaaaaatctactcgttgtgccccatccgctatcgggttacgatgtcctgtgcgccaccctcttgttgcgccgttgcagagttgacggttgacgtcggtccgttagtgatgggggcagggttcgaggattttctcagtcaggaccattgtttcggtctcttaatataagaccgaagggcggtctttccctccccggacgagttttgtttatgcagtatagactgtgcccaatcaatttgggaggagaaaacaacactgaaaaaatgtatatacaagaatcaagtctgcctccaaataatacagtgtgtatctccgcatactgtaacatgtgacacttatactgaatctgcatacatgcgcagtatacataagctgatgaaatatacaagaaaatttcagaaggggctacagcactgaatcaaaaaaaa

SEQ ID NO: 47789 - DNA, 565 bp, Zea Mays
aagattgtgaagtcttgctcctcttcaccatagagaatattattcatacagataaccagaagttcagaaagctctggtcaagaatctgaagtgcagaacagcagaaatactgaagagcagggatcagcctggacggctgatttccaagacgagtgaatccgaaccaaagatagcaatagtcgcccgggaaagactctgtgcgactgcaccgatatccgtacccaattcattttccacagctcaccggtttgttgttgcgcaccggtgattgcaaacctgaaggttggcttatttattgcattgactgaaacaacgaacatgaattacctgctgggaggcagagaaatgtgcagcctaattttttcggcctctacgattctctgtctttataatataattgatgacgtcgactctctcttgattgtgtgcacgtctgataccattcagagttaacagtgattttagcatcaacgccatagggggcgtttggatcccttgcggctccttgctttgccaggacattttgtacttggattttttgctggctttcttggtttcaacgctg

SEQ ID NO: 47790 - DNA, 2260 bp, Zea Mays
attctcgggtcgagacggcaagcgtcagaccagtgacgaagcaaatctaccatgcgatgcgagcatgacaaataaataccctttacctcgtccttgccgccgcggccgccggggcgtcccggatcgtggtggtgcttgccgtcgctgcgcgcgcgatgcgccggcggtgggacagctgcttctcgggcagcgacgtccgcgtgggcgggcgcgtcccccccgaggagccggagccggaggtcttctccttcgccgagcccctcccgtcgtggcccacaggcgggggattcgcgcgggggaggatacgtatcggcggaggggagctggagctcgccgcggccaccgcgttccagaagatctgcaccctgtcgtcgcggcggcgtggcggcggcggcagcgccaccttttaccggccggtcggcgtcccagaggggttctcgctcctgggttactactgccagcctaactgccgcccgctccacggccacgtcctcgttgccagagcgggggagcgcccgtccggcgcctcacctcagccgccgccgccgccgctctgcaagccgctggactatacgctcatctgggaattccaagccagtggcgataccggctacggctacggtcgaagcgacgcctacttctggatccccgtgccgccggagaggtatcgggcgctcgggtgtctcgtgaccacggaaccacggagaccaccgctcgaggaggtggtatgcgtccgcgaggacctgacggacgagtgcgagccgcacggctcgctgctctgcctagagcagccgcggccgtcttcgttcttcaccgtgcggggcgttcgtccggtgcgccgagggatacgggagaaaggagtgtgcgtgggcaccttctgctgcgccgctgacgggctccccccgcgcgagcacggcatggcgtgcctgggcaacgtcgagctcgacctgtcggcgatgccaacgctggagcaggcgcacgcggtgatccggcactacggccccacgctgttcttccaccccaaggaggtctacctgccgtcgtccgtctcttggttcttcaagaacggcgccgcgttgtacaggcgagggggagacaccgcgggcgaggagatcgacggcgaggggtccaacctccctggtggcggttgcaacgacggggagttctggatcgacgttcccagcggcgagcggggccgcgccgtgtgccgcggcagcatcgacagcgcggagctctacgcgcacgtgaagccggccatgggcggcacgtgcaccgacgtggccatgtgggtgttctgcccgttcaacggcccggcgaggctcaagctgggcccgatcagcctcccgctgggcaagaccgggcggcacgtcggggactgggagcacttcacgttccgcgtcagcaacctcaccggtgagctcatgggcgtgtactactcgcagcacagcggcgggcactgggtggacgcctccgcattggagtacatcgacggcaaccggcctgtggtgtactcgtccaggaacgggcacgcgagctacgcgtaccctggcgtgtacctgcagggctcggcggcgctcggggtcggcatccgcaacgacgccgctcggagcagcctattcgtggactccagcgccaggtaccgcatcgttgcggcggggtatctgggcgagggcgccgtcgtcgagccgcagtggctgcagttcatgcgggagtggggtccgacggtggtgtacaagtggaggaagcggatggagtgggtgatcggccgcctacctccctggctcaggtgcagagcggagagcatgctgaacaagatgcccaacgagctgtccagggaagaagggccgaccgggcccaaggagaagaacaactgggagggagacgagagatggtaagactggtacgtaggaacagtgctcaacgatgtgattttataacatgtgtggcttaaattaaggggcgtgctatatttaggtgtttgaaaaacagcttcttcgcggaccatacactagtacaatttggctctataccagcggtacgctttttacatcacagacggttcggttagaaaaccgcctgtaatgtcccaggcggttcagtacgcctgtgatgtaatagtatcacaagcggtttttgtttaggaccgtctgtggtgctctatccttttcacaaacggaccctaagaaaaaaccgcctctgattgtaaaaatatttttaatttttaacagaaatatgcaaatacaatttaaatgaattaata

SEQ ID NO: 47791 - DNA, 242 bp, Zea Mays
tggcaatgcaatgaatgacattctgggcttgggttagaaccctaacatgtgcacagcatggcacggagttcaacaatgatcacaccatgtacaacatgacagccctattgctaaaaatgcatcacaaagtacctaaaaaacaaaatggcctgttacatcggggctagaaagagaaaaaaaaaataaagttatattacaagcgcaacacagggcatggattgattgcacacagcgtcaaagac

SEQ ID NO: 47792 - DNA, 928 bp, Zea Mays
caattactttaaaataaatgggtctaaaggctccgttaaaaaaatggaaataacatgtaaaaatgggtttctaactaggcttaaaaaaatcctcggtgtgtatttttttccccaaaagactcctcaccgtggccggttctgctggcgcctgacggttgcggggcggcggcggtcatccgagggccgaatccgcctttatgacaccgccgcagcgacgtcagcgtatccagcagtaaaccaccaacggcttcgccgtcccctagctccgcacgggaatgcgaagaatgtgagacttgagagatccaacaggggagatgcaccgcagcgacggcatggaggtggcgggagggtggaggccgcctgctaccgctagctactgagacagctccgagtcttcgagctctggttccggcctgcgcatatgttgagttacaggcagaaacagagcagaagtatggagccgtactatgcattcggtgatcctacacgccgctccaacatttctcattctccgcaaaccaccgtggctttccgaatgaactctgagagagctggcatcaagggcagaaataagaatctttggcaaagggtaacttgaagtacacatgaaataaaaacacatcacaatacacataaatcagttaatcagaattaaccataattgtcttcctctgttctgtattgttttccgagaatatgcaggagatctacgtatctttacccctcatatggaaagaacataggtatcagtcataaaaccccctatcaatcacagaaaaaaagcctttaatgtttgtagcagaggttatagggcaaaatcaagaaagaggataaccaagaaacacacaaggagcagaacgatgggataatttatgtggcatggtggcggaaagattaggataacaaagacatccaaacacgcgaagat

SEQ ID NO: 47793 - DNA, 374 bp, Zea Mays
atggtgcaggagatcaccggcctccccttccctgcccccctccttctccgctgccttggaggctgccaccgtcgtagcgcccaaatggatgcctgcgcacgcgtgtgtgctcctgaactgaacctggacacgtccgctttctccctgcttgaccgtgccctggtcatagaacataagccctacgatcgtagagcagatgtttttagctttgctattgttctatgggaactgctaacccacaagggtatcaaacaattctttgttgctgttaagaaagaggagtgaaagtttgatacgctttgtgatctttaggaccacctacgcccaagcgttcgggacttcggggtggatctcgagcttccgcttgctgcgaa

SEQ ID NO: 47794 - DNA, 869 bp, Zea Mays
atggtgcaggagatcaccggcctccccttccctgcccccctccttctccgctgccttggaggctgccaccgtcgtagcgcccaaatggatgcctgcgcacgcgtgtgtgctcctgaactgaacctggacacgtccgctttctccctgcttgaccgtgccctggtcatagaacataagccctacgatcgtagagcagatgtttttagctttgctattgttctatgggaactgctaacccacaaggaaccgattgaagaaagaacatccaccatttgcatcatcaagtatcatttaaggcatcattattgggcactcttatatgaccatgtcataagatcaccttacaacattaaaaatattgagaaaaaaaaatacagtttgtattcagtgctgatgggattgattttatcattaaatatatttcagaaccactttggggccaacattgtcgtaacaagagggcccctatcgtgtcatgatggaagctatcctccatattatgctgctaatataacatctacatatttttttactgtaagaaccctcagtgtaggctccaagcgcatgatgagaaggatgtctacaatagaagagtgaaagggggaccagaagaataatcagaagattttacgaaaccaaaacacaaaggcatagcaagtcagatcgagattgagaatccaagcctggtgaaaactaagaatgtaaaggtcaaggacattgataaaggttggccattttttagactgcttattgctcttctcaagttcatggaaccatatcccagaggcgccttaagaatcggtcatcgcataagaatcggtcagctacagttacaagaagatatactccaatactccagcgagttctag

SEQ ID NO: 47795 - DNA, 1297 bp, Zea Mays
ctctccatttccttttgctgccctcccctcttgcatcatccttgttcatcgtctctccagccgcgcgcccagcagcagcgttctcgatcgatcagtcgtcgatccggccgtgtgttcttcttctgtatcactatcaccttcaccgcttcacctattcggccggccagctgctgatatcttcttcttcgctgccgcctgctgccgattaatttattcactcgacggcagcgacttcatcgtctatcataggaagctgagcaaagaagacgtagggtgcagccgtgcaggaggaatagagatagagagcttcaggtatatatagcaggcaggcaggctgtgtggttgatccggtgatctatatcgatccgtcgaggatgtgcaccaggggccactggagaccgtcggaggacgagaagctgaaggagctcgtcgcgctctacggcccgcacaactggaacgccatcgccgagaagcttcaagggagatcagggaaaagctgcaggctgaggtggttcaaccagctggacccgaggatcaaccggagccccttctcagagcaggaggaggcgctgctcctggcgtcccaccgcgtccacggcaaccggtgggccgtcatcgccaggctcttcccggggcgcaccgacaacgccgtcaagaaccactggcatgtgatcatggcgcggcggtgcagggagcggatgaggctctcgaacaggggcggcgccgctgctggccagcatggtgccgtcgacaccggtgctgtggaagatggcagtaaccctaggaacgccaagaagctgaggcctgatgccagcagcgtggcctccttcctagacaagtaccgaagagaattttccgtcgtcgtcccgtttgctattaaccatgatcgcaagcagcaggactattgttcaactactaacgaagcagacgcaaacaaatcggttgaattctacgattttctccaagtgaatgcgaactcgagcgacaccaagtgtggttcgagcatcgaggagcaggaggagaaccgggatgatcaagccgaagggcaggtgcagttcatagacttcctggaggttgtaatgctttgtgaaagacgcatatgctgcaaatggcaatcgtctgctagctaacaccaaacgtacttatagaggaagcagaatgcaccgcgtacatatatgacatgtaacttattgatatgtatacatatctgtccatatccgcgcgccgtttgggggccggtacacatgcaaaattattctgagataaatgaggaattaattattatttcatcatattt

SEQ ID NO: 47796 - DNA, 1382 bp, Zea Mays
ctccatttccttttgctgccctcccctcttgcatcatccttgttcatcgtctctccagccgcgcgcccagcagcagcgttctcgatcgatcagtcgtcgatccggccgtgtgttcttcttctgtatcactatcaccttcaccgcttcacctattcggccggccagctgctgatatcttcttcttcgctgccgcctgctgccgattaatttattcactcgacggcagcgacttcatcgtctatcataggaagctgagcaaagaagacgtagggtgcagccgtgcaggaggaatagagatagagagcttcaggtatatatagcaggcaggcaggctgtgtggttgatccggtgatctatatcgatccgtcgaggatgtgcaccaggggccactggagaccgtcggaggacgagaagctgaaggagctcgtcgcgctctacggcccgcacaactggaacgccatcgccgagaagcttcaagggagatcagggaaaagctgcaggctgaggtggttcaaccagctggacccgaggatcaaccggagccccttctcagagcaggaggaggcgctgctcctggcgtcccaccgcgtccacggcaaccggtgggccgtcatcgccaggctcttcccggggcgcaccgacaacgccgtcaagaaccactggcatgtgatcatggcgcggcggtgcagggagcggatgaggctctcgaacaggggcggcgccgctgctggccagcatggtgccgtcgacaccggtgctgtggaagatggcagtaaccctaggaacgccaagaagctgaggcctgatgccagcagcgtggcctccttcctagacaagtaccgaagagaattttccgtcgtcgtcccgtttgctattaaccatgatcgcaagcagcaggactattgttcaactactaacgaagacgcaaacaaatcggttgaattctacgattttctccaagtgaatgcgaactcgagcgacaccaagtgtggttcgagcatcgaggagcaggaggagaaccgggatgatcaagccgaagggcaggtgcagttcatagacttcctggaggttggggtctctcatccccagtgatttatctgtattaatttctatatatatatatatatatatatttaactagggatgcatccaaagcaggttgtaatgctttgtgaaagacgcatatgctgcaaatggcaatcgtctgctagctaacaccaaacgtacttatagaggaagcagaatgcaccgcgtacatatatgacatgtaacttattgatatgtatacatatctgtccatatccgcgcgccgtttgggggccggtacacatgcaaaattattctgagataaatgaggaattaattattatttcatcatattt

SEQ ID NO: 47797 - DNA, 3231 bp, Zea Mays
ccaaaatttactccagtttctctttcttcttatctctcccccaagcctgtctctctgacgcaatgccgtttcccaccgcgcggtggcggcggcggcgcgagggcaccgcctctcggtggtgcgggatcttggtcctggctctggtggcgctggcggccggtgcgacggcggagacgtcgccgttggacgtggcggcgatgcgggctgtggcgaaggcgcttggcgcggacaagacgctgggatgggacgtcgcgggcgacccctgctcgccgaagcggtgggacggggtgtcctgcgactcgtcgggtcgcgtcacggcgatccaggtcggggcgcgaggcctgacggggaccctgcccccggaggtgggcgacctcaccgagctcacccgcctcgaggttttcgacaacaagctctccggcccgctgccctcgctcccgggtctctcctcgcttcaggttttactagcccacaacagcagtttcgcctccatcccctccgacttcttcaaaggcctcaccgggctcaccgccgtcgctatcgactacaacccgttcgcgtcgtggtcgctccccaccgacctcgccgcatgcgcctccctcgccaacttctccgccgtcagcgccaacgtctctggcacgctccccgacttcttgggtgagatgccggcgctccagcggctgtcgctgtccttaaaccagctgtcaggacccgtaccggcgtcgctggccggcgcgccgctggtgcagctctggctcaatggcgcgcacctcaatgggtcgattagctttgtcagcaacatgacgtctctggagcaactgtggctgcattctaacgacttcactgggcccatgccggacttctctaggtttgataatctatgggatttgcaacttcgcgacaacgagctcacagggccggtgcctgagagtcttttcaagttgaaggccctgaagaacgtgactctgacgaataatttgctgcaggggccgatgcctcagattcctaatcaacttcatgctgacatcaaagcagattcagagcggttttgtgtgcaggaagccgggaagccgtgcgatccccgtgtgagcctgctgcttgaggttgctgctgggttcatgtacccgaaggcacttgctacggattggaaggggaatgatccgtgtgtgtttccgggcgttagttgcatacaagaggttgatttgtcaaacaacaatctatatgggaaacttcctacatttgcttccaagagtgcagtggtgaaaactgctggtaaccctaacataggcaaggatgctcctgcaccaacagcaggatcaggtggtagcaacgacagtctatcggggggaggcagcagcggaagcattggtaacaatgggggttcctctccatcttctgttggagtcattgtaggctcagtggctggtacagtcgttggactaggccttgttgctgcattgggattctattgttacaagaggaaacagaagcctttcggaagggtgcagagtccacatgccatggttatccatccgcgacactcaggttcagatgacatggttaaaatcacagttgcagggggaaatgctaacgatggtgctcgcgcaagcgagacatatagccaagcgagcaatggtccacgcgacatccatgttgttgaaagtggaaatatggtcatttcaatccaagttctccgcaatgtgaccaacaacttcagtgaggagaacatccttggtcgaggagggtttggcactgtttacaagggcgagcttcatgacggcacgaaaattgctgtaaagcggatggaggctggtgttatgggtaacaaggggctaaatgagtttaaatcagagattgctgttttgaccaaggtccgacaccgcaatcttgtttcactgctgggctactgccttgatggcaatgagaggattctagtgtatgagtacatgccacagggggcactgagccaacacctgtttgagtggtctgagaaaaatttgcgaccattggaatggaaaaaacgacttagcattgcacttgatgttgcaagaggcgtcgagtaccttcacagccttgcccagcagacctttatccacagagacttgaagccatcaaacatacttcttggtgatgacatgaaggccaaggtggcggactttggattggtccggcttgcaccagctgatgggaagtgtgtctccgtagagacaagacttgctggcacttttgggtaccttgcaccagagtatgcagtcactggacgagtgaccacaaaagctgatgtcttcagctttggtgtcatcttgatggaactgattacaggacgcaaggcacttgatgagactcagcccgaggatagcatgcatttagttacatggttccggaggacgcagctcaacaaggaaacattccgcaaagcaatcgaccctgtcattgacctcgacgaggaaacctacgctagtgttagtaccgtctcagagcttgctggccactgctgcgctagggaagcgcaccagaggcctgacatgggccatgctgtcaatgtgctctctaccctttcggaagtttggaaaccagccgatccggactcggatgacagctacggtatcgaccttaacatgtccctgcctcaggctctgaagagatggcaggcgttcgaggacagcagccactttgacggtgcgacctcgtcgtttgttgcgagcctggataacactcagaccagcatccctacgaggcctcctgggttcgcggactcgttcacctctgccgacggaagataaagacatttagcgctgctagtaagggtgtgcaaaaaccttatgtttccgttgaaatggaagctcgggcgatccttgttcattcttttagtctcttcacccccgccaccaatctttccatgtctctttattcgtctctgtactgccgtgtagctgctctttggtcgtgtatgctgtgatcttgtcccgaaaattgcctggaagttcgaagactttgctaactggtctatgtcgtttgctaagattaaagtagaagaatgctagagctgtatggttgtatcgggtactgacaatttgcaaaggaaggtgaccctgtgttcgtcaaaaagaagtatggccctggcctgaagcttttccaacgcctaagctatgatcatttcactcgctgtacttactgtcatctactgtgagaactcaactatttgtcatgatctggtctcttatccgctgg

SEQ ID NO: 47798 - DNA, 1002 bp, Zea Mays
tcatcctatatttcttcataccaatcactggacgagtgaccacaaaagctgatgtcttcagctttggtgtcatcttgatggaactgattacaggacgcaaggcacttgatgagactcagcccgaggatagcatgcatttagttacatggttccggaggacgcagctcaacaaggaaacattccgcaaagcaatcgaccctgtcattgacctcgacgaggaaacctacgctagtgttagtaccgtctcagagcttgctggccactgctgcgctagggaagcgcaccagaggcctgacatgggccatgctgtcaatgtgctctctaccctttcggaagtttggaaaccagccgatccggactcggatgacagctacggtatcgaccttaacatgtccctgcctcaggctctgaagagatggcaggcgttcgaggacagcagccactttgacggtgcgacctcgtcgtttgttgcgagcctggataacactcagaccagcatccctacgaggcctcctgggttcgcggactcgttcacctctgccgacggaagataaagacatttagcgctgctagtaagggtgtgcaaaaaccttatgtttccgttgaaatggaagctcgggcgatccttgttcattcttttagtctcttcacccccgccaccaatctttccatgtctctttattcgtctctgtactgccgtgtagctgctctttggtcgtgtatgctgtgatcttgtcccgaaaattgcctggaagttcgaagactttgctaactggtctatgtcgtttgctaagattaaagtagaagaatgctagagctgtatggttgtatcgggtactgacaatttgcaaaggaaggtgaccctgtgttcgtcaaaaagaagtatggccctggcctgaagcttttccaacgcctaagctatgatcatttcactcgctgtacttactgtcatctactgtgagaactcaactatttgtcatgatctggtctcttatccgctgg

SEQ ID NO: 47799 - DNA, 1815 bp, Zea Mays
agtccttcccattcctctgcaagtcgcaactcgcaaccaaaggcaaggagcatttcaaaaaccctacctccctaccccacttcgcagtccgcaccgcacccaccccgatctccttctcccacccagatcgccggcccgtgcgcacgaaatggaggtgccgcggagatgctcgacgccctcgcaggctggttcgcgcagtcgctctctcccgacaccgccgcgcgccggccgagcagacatcgcctccgccgcctcctccccgggcttccgctggcctcctcggcctcgcggcctccccgcgccacgacctccaggcccgcctcgccgcctccgtccacttcaagaatcttctccgccgccggtgcccaagcccgacgccgatgccgacgccgacgtcgaccaccttcccgcctccgactgcgccatcatcaaggcgaccttctccagctcctcctcaccaccccgcccctcatccaggcgcagtctccgaggcctcgcgccgcgcgctccgatttccccgccaggtgggagtcccttctcccgtccatcgtgtcctccctaggcactgccgtcaacgcgggggacatcaccgccaccaactctcttctcgctgccgtggtgtcgctcttctctcgcttccgcaacgcattcgacaataatgccctccgcctcgacctcaagtactgccttgacatcttcgccgccccactccttgaggtttttctctttgcctcccgccgccttcaagccgctgccaccacggccaacccgctcgagctccgtcccgtgtttgagtgccttcgcctctgttgcgagatcttctactcgcttaactccattgaccttcctgagttcttcgaggataacatgcgccagtggatgacagagttccaagccttcctcaccacatcctacccaccgcctgttgaggcagatggtgccccggatgcgctccgtgctgctgtctgtgataacctgcagctttatatggagaagtacgaggaggagtttaggggatacctgaaggagtttgttgaggctgtgtgggggctcctcatggcgcagaccgcttcgccttcccgtgtgcagcttgccgttactgcgataaggttcttgactacagttgctgagagtgtgcaccatgctttatttgggagtcctgaggcgatgaagcagatatgtgatagtgtcgttgtgcctaacttgcgcctgcgggatgaggatgaggagttgtttgagggcaattgggtggaatatgtcaggcgcgactctgagggtagcgatgcagatacactcagacgggcagcgtgccggttgctgcggggccttgcagcgaactaccaagagcaggtggctgcactcgtctcagcacaggtccagcagatgttggttgcatatgctgctaatcggtcaaacaactggaaggagaaggatgctgcaatataccttgttattgctcttatgcagaagcctggtgccacaggtggtggcacacctgtggttgacatggagagcttctttacatctgtgattgtgcctgagctccaagcccctgattggcagtctgagccaatgttgaaggcaactgtgctcaggttcttgaaggagttcaaggatcagatccccaaagctactgcactggcactcctacaaagtgtgatgcggtttttgatgcatgagtccaatgttgttcattcatatgctgcaacttttatcgagaacctgttgataatcaaggatgctgtaccggtaccaggggtgaccacagtgatcagtccatgtgctctagtgctgcatcagctttcagactgagaa

SEQ ID NO: 47800 - DNA, 3230 bp, Zea Mays
  misc_feature (3229)..(3230): n is a, c, g, or t
agtccttcccattcctctgcaagtcgcaactcgcaaccaaaggcaaggagcatttcaaaaaccctacctccctaccccacttcgcagtccgcaccgcacccaccccgatctccttctcccacccagatcgccggcccgtgcgcacgaaatggaggtgccgcggagatgctcgacgccctcgcaggctggttcgcgcagtcgctctctcccgacaccgccgcgcgccggccgagcagacatcgcctccgccgcctcctccccgggcttccgctggcctcctcggcctcgcggcctccccgcgccacgacctccaggcccgcctcgccgcctccgtccacttcaagaatcttctccgccgccggtgcccaagcccgacgccgatgccgacgccgacgtcgaccaccttcccgcctccgactgcgccatcatcaaggcgaccttctccagctcctcctcaccaccccgcccctcatccaggcgcagtctccgaggcctcgcgccgcgcgctccgatttccccgccaggtgggagtcccttctcccgtccatcgtgtcctccctaggcactgccgtcaacgcgggggacatcaccgccaccaactctcttctcgctgccgtggtgtcgctcttctctcgcttccgcaacgcattcgacaataatgccctccgcctcgacctcaagtactgccttgacatcttcgccgccccactccttgaggtttttctctttgcctcccgccgccttcaagccgctgccaccacggccaacccgctcgagctccgtcccgtgtttgagtgccttcgcctctgttgcgagatcttctactcgcttaactccattgaccttcctgagttcttcgaggataacatgcgccagtggatgacagagttccaagccttcctcaccacatcctacccaccgcctgttgaggcagatggtgccccggatgcgctccgtgctgctgtctgtgataacctgcagctttatatggagaagtacgaggaggagtttaggggatacctgaaggagtttgttgaggctgtgtgggggctcctcatggcgcagaccgcttcgccttcccgtgtgcagcttgccgttactgcgataaggttcttgactacagttgctgagagtgtgcaccatgctttatttgggagtcctgaggcgatgaagcagatatgtgatagtgtcgttgtgcctaacttgcgcctgcgggatgaggatgaggagttgtttgagggcaattgggtggaatatgtcaggcgcgactctgagggtagcgatgcagatacactcagacgggcagcgtgccggttgctgcggggccttgcagcgaactaccaagagcaggtggctgcactcgtctcagcacaggtccagcagatgttggttgcatatgctgctaatcggtcaaacaactggaaggagaaggatgctgcaatataccttgttattgctcttatgcagaagcctggtgccacaggtggtggcacacctgtggttgacatggagagcttctttacatctgtgattgtgcctgagctccaagcccctgattggcagtctgagccaatgttgaaggcaactgtgctcaggttcttgaaggagttcaaggatcagatccccaaagctactgcactggcactcctacaaagtgtgatgcggtttttgatgcatgagtccaatgttgttcattcatatgctgcaacttttatcgagaacctgttgataatcaaggatgctgtaccggtaccaggggtgaccacagtgatcaggtctccacgttatgttgctgctgatatcaatccatttgccccacagatcattcagaacctgtccacagcactaggtttccctgattcacaagagaacccctacctgatgaagtgcctgatgcgggtgcttgggattgctaatattgctggtcaaattgttcatgagatcacagctcaacttgtgggtattctcatggaagtgtgtaataatcccaagaaccctgacttcaaccattacttgtttgaggctctggcagcagttattggccggactggtgagcaggacccaacactactccctgcttttgagaccagcctctttccagtgctccagaggatattggttgaggacatctcagagttctggccatatgcttttcagatatttgctcaacttgtcaatttgagccgaccacctctctcacagaattacatgcagctatttggtgtccttctcagtaatgcaacttgggaccggccaccatgtgttcctgccttggttcgtttgctgcgagcattccttaggaaaattctaaatgagctaaaccaagagggcaggcttccaaatatattggcaatatcccgtagcctcctctcacgcagcagcactgaagattctgcattctacatgctgaacacactagtggaaaacgttggttttgacattctgaacccatatataagtgagatatggagtgctttgtttactcggctacagactagacagacagtgaaatttgtgaactctcttgtggttttcatgtcgctagtgctggtcaaatatgggtcaagtgttcttgtcaattccgttgatgcaattcagccaaatcttttcacccaaatccttcagcgattttggattcccaacctcaatttgatcaaaggtgctcttgaagttaagttgacagcagttgcttcgataaagttgctttgtgagtctgcggtcctgttggatgctgcagcagcccagttatggggtaaattacttgacagtattgtcacactattgtccagaatgaatcaagatggatcacaacaagagcataatgatggtactgatgcagtggatactcagaagacatcaagttattctgtttcatttgtacgacttcaatatgctgggaagagtgaagatgaccttttgaaagaagtaaatgatccaaaacagtttgtggtcacatccttagccacaatttctgcccagtttcctgggaggtttggtcctgtcattgagcagcatgtggacctagcaaacaaaagtgtgcttcttcaactttgtgcagcctacaatgccaacattgtctagtcttggaaacaatgccatgaaactctccactaggaatggtcttggactcttggtggtctcaacgttcaagtacggagtaggatttagctacatggctgtcccattagtagccattcttgctacagacacaattaatgactaaatttcnn

SEQ ID NO: 47801 - DNA, 3146 bp, Zea Mays
agtccttcccattcctctgcaagtcgcaactcgcaaccaaaggcaaggagcatttcaaaaaccctacctccctaccccacttcgcagtccgcaccgcacccaccccgatctccttctcccacccagatcgccggcccgtgcgcacgaaatggaggtgccgcggagatgctcgacgccctcgcaggctggttcgcgcagtcgctctctcccgacaccgccgcgcgccggccgagcagacatcgcctccgccgcctcctccccgggcttccgctggcctcctcggcctcgcggcctccccgcgccacgacctccaggcccgcctcgccgcctccgtccacttcaagaatcttctccgccgccggtgcccaagcccgacgccgatgccgacgccgacgtcgaccaccttcccgcctccgactgcgccatcatcaaggcgaccttctccagctcctcctcaccaccccgcccctcatccaggcgcagtctccgaggcctcgcgccgcgcgctccgatttccccgccaggtgggagtcccttctcccgtccatcgtgtcctccctaggcactgccgtcaacgcgggggacatcaccgccaccaactctcttctcgctgccgtggtgtcgctcttctctcgcttccgcaacgcattcgacaataatgccctccgcctcgacctcaagtactgccttgacatcttcgccgccccactccttgaggtttttctctttgcctcccgccgccttcaagccgctgccaccacggccaacccgctcgagctccgtcccgtgtttgagtgccttcgcctctgttgcgagatcttctactcgcttaactccattgaccttcctgagttcttcgaggataacatgcgccagtggatgacagagttccaagccttcctcaccacatcctacccaccgcctgttgaggcagatggtgccccggatgcgctccgtgctgctgtctgtgataacctgcagctttatatggagaagtacgaggaggagtttaggggatacctgaaggagtttgttgaggctgtgtgggggctcctcatggcgcagaccgcttcgccttcccgtgtgcagcttgccgttactgcgataaggttcttgactacagttgctgagagtgtgcaccatgctttatttgggagtcctgaggcgatgaagcagatatgtgatagtgtcgttgtgcctaacttgcgcctgcgggatgaggatgaggagttgtttgagggcaattgggtggaatatgtcaggcgcgactctgagggtagcgatgcagatacactcagacgggcagcgtgccggttgctgcggggccttgcagcgaactaccaagagcaggtggctgcactcgtctcagcacaggtccagcagatgttggttgcatatgctgctaatcggtcaaacaactggaaggagaaggatgctgcaatataccttgttattgctcttatgcagaagcctggtgccacaggtggtggcacacctgtggttgacatggagagcttctttacatctgtgattgtgcctgagctccaagcccctgattggcagtctgagccaatgttgaaggcaactgtgctcaggttcttgaaggagttcaaggatcagatccccaaagctactgcactggcactcctacaaagtgtgatgcggtttttgatgcatgagtccaatgttgttcattcatatgctgcaacttttatcgagaacctgttgataatcaaggatgctgtaccggtaccaggggtgaccacagtgatcaggtctccacgttatgttgctgctgatatcaatccatttgccccacagatcattcagaacctgtccacagcactaggtttccctgattcacaagagaacccctacctgatgaagtgcctgatgcgggtgcttgggattgctaatattgctggtcaaattgttcatgagatcacagctcaacttgtgggtattctcatggaagtgtgtaataatcccaagaaccctgacttcaaccattacttgtttgaggctctggcagcagttattggccggactggtgagcaggacccaacactactccctgcttttgagaccagcctctttccagtgctccagaggatattggttgaggacatctcagagttctggccatatgcttttcagatatttgctcaacttgtcaatttgagccgaccacctctctcacagaattacatgcagctatttggtgtccttctcagtaatgcaacttgggaccggccaccatgtgttcctgccttggttcgtttgctgcgagcattccttaggaaaattctaaatgagctaaaccaagagggcaggcttccaaatatattggcaatatcccgtagcctcctctcacgcagcagcactgaagattctgcattctacatgctgaacacactagtggaaaacgttggttttgacattctgaacccatatataagtgagatatggagtgctttgtttactcggctacagactagacagacagtgaaatttgtgaactctcttgtggttttcatgtcgctagtgctggtcaaatatgggtcaagtgttcttgtcaattccgttgatgcaattcagccaaatcttttcacccaaatccttcagcgattttggattcccaacctcaatttgatcaaaggtgctcttgaagttaagttgacagcagttgcttcgataaagttgctttgtgagtctgcggtcctgttggatgctgcagcagcccagttatggggtaaattacttgacagtattgtcacactattgtccagaatgaatcaagatggatcacaacaagagcataatgatggtactgatgcagtggatactcagaagacatcaagttattctgtttcatttgtacgacttcaatatgctgggaagagtgaagatgaccttttgaaagaagtaaatgatccaaaacagtttgtggtcacatccttagccacaatttctgcccagtttcctgggaggtttggtcctgtcattgagcagcatgtggacctagcaaacaaaagtgtgcttcttcaactttgtgcagcctacaatgccaacattgtctagaggacggtgtaaagcctctaggtcgcgactgatggcacacggcactcgcagcgccattaacaaat

SEQ ID NO: 47802 - DNA, 4664 bp, Zea Mays
agtccttcccattcctctgcaagtcgcaactcgcaaccaaaggcaaggagcatttcaaaaaccctacctccctaccccacttcgcagtccgcaccgcacccaccccgatctccttctcccacccagatcgccggcccgtgcgcacgaaatggaggtgccgcggagatgctcgacgccctcgcaggctggttcgcgcagtcgctctctcccgacaccgccgcgcgccggccgagcagacatcgcctccgccgcctcctccccgggcttccgctggcctcctcggcctcgcggcctccccgcgccacgacctccaggcccgcctcgccgcctccgtccacttcaagaatcttctccgccgccggtgcccaagcccgacgccgatgccgacgccgacgtcgaccaccttcccgcctccgactgcgccatcatcaaggcgaccttctccagctcctcctcaccaccccgcccctcatccaggcgcagtctccgaggcctcgcgccgcgcgctccgatttccccgccaggtgggagtcccttctcccgtccatcgtgtcctccctaggcactgccgtcaacgcgggggacatcaccgccaccaactctcttctcgctgccgtggtgtcgctcttctctcgcttccgcaacgcattcgacaataatgccctccgcctcgacctcaagtactgccttgacatcttcgccgccccactccttgaggtttttctctttgcctcccgccgccttcaagccgctgccaccacggccaacccgctcgagctccgtcccgtgtttgagtgccttcgcctctgttgcgagatcttctactcgcttaactccattgaccttcctgagttcttcgaggataacatgcgccagtggatgacagagttccaagccttcctcaccacatcctacccaccgcctgttgaggcagatggtgccccggatgcgctccgtgctgctgtctgtgataacctgcagctttatatggagaagtacgaggaggagtttaggggatacctgaaggagtttgttgaggctgtgtgggggctcctcatggcgcagaccgcttcgccttcccgtgtgcagcttgccgttactgcgataaggttcttgactacagttgctgagagtgtgcaccatgctttatttgggagtcctgaggcgatgaagcagatatgtgatagtgtcgttgtgcctaacttgcgcctgcgggatgaggatgaggagttgtttgagggcaattgggtggaatatgtcaggcgcgactctgagggtagcgatgcagatacactcagacgggcagcgtgccggttgctgcggggccttgcagcgaactaccaagagcaggtggctgcactcgtctcagcacaggtccagcagatgttggttgcatatgctgctaatcggtcaaacaactggaaggagaaggatgctgcaatataccttgttattgctcttatgcagaagcctggtgccacaggtggtggcacacctgtggttgacatggagagcttctttacatctgtgattgtgcctgagctccaagcccctgattggcagtctgagccaatgttgaaggcaactgtgctcaggttcttgaaggagttcaaggatcagatccccaaagctactgcactggcactcctacaaagtgtgatgcggtttttgatgcatgagtccaatgttgttcattcatatgctgcaacttttatcgagaacctgttgataatcaaggatgctgtaccggtaccaggggtgaccacagtgatcaggtctccacgttatgttgctgctgatatcaatccatttgccccacagatcattcagaacctgtccacagcactaggtttccctgattcacaagagaacccctacctgatgaagtgcctgatgcgggtgcttgggattgctaatattgctggtcaaattgttcatgagatcacagctcaacttgtgggtattctcatggaagtgtgtaataatcccaagaaccctgacttcaaccattacttgtttgaggctctggcagcagttattggccggactggtgagcaggacccaacactactccctgcttttgagaccagcctctttccagtgctccagaggatattggttgaggacatctcagagttctggccatatgcttttcagatatttgctcaacttgtcaatttgagccgaccacctctctcacagaattacatgcagctatttggtgtccttctcagtaatgcaacttgggaccggccaccatgtgttcctgccttggttcgtttgctgcgagcattccttaggaaaattctaaatgagctaaaccaagagggcaggcttccaaatatattggcaatatcccgtagcctcctctcacgcagcagcactgaagattctgcattctacatgctgaacacactagtggaaaacgttggttttgacattctgaacccatatataagtgagatatggagtgctttgtttactcggctacagactagacagacagtgaaatttgtgaactctcttgtggttttcatgtcgctagtgctggtcaaatatgggtcaagtgttcttgtcaattccgttgatgcaattcagccaaatcttttcacccaaatccttcagcgattttggattcccaacctcaatttgatcaaaggtgctcttgaagttaagttgacagcagttgcttcgataaagttgctttgtgagtctgcggtcctgttggatgctgcagcagcccagttatggggtaaattacttgacagtattgtcacactattgtccagaatgaatcaagatggatcacaacaagagcataatgatggtactgatgcagtggatactcagaagacatcaagttattctgtttcatttgtacgacttcaatatgctgggaagagtgaagatgaccttttgaaagaagtaaatgatccaaaacagtttgtggtcacatccttagccacaatttctgcccagtttcctgggaggtttggtcctgtcattgagcagcatgtggacctagcaaacaaaagtgtgcttcttcaactttgtgcagcctacaatgccaacattgtctaggaaaaaatatgtgcaggcgtgctgaattgctaattacttactgtgtaatcgttaatgattatcctggggatcttttcggctgatctgccagtttagaatgacactgctattctatgctgacggcggaggcgtcaagattgcgagctgcaggatcatgctgtctccatctccgtgtcatccatgatccatctcataggctagagtgcccaaggtgttcggagatatatgcccattcgaactttcttaacgcctacctgcaatgcaatgcagtgcttgcatcgagcagaaagttcgccatcgttttccaagtaaaaaatctgggataaaaaatggaaagaaattaaataaaaaatatatcggtccttgcgtgtcactctctatcataatcagctcaaatgctaaattaatcggactgctgagtataaaggcataccatatctgtaccaaaaatcctccctttcccatctcaagctattttcctgcttagtgagcttaatggctctgacggccagagtgaggaggcttccccagttgcacatctcgctcgacgtcccctcgtgcgccttccgtcaccacaacccgcccgcggcggcctcgacgtccgcgtcgcgagccagcggtgagttccggctctcggacttcgacaggctcgccgtgctggggcgcgggaacggcggcacggtgtacaaggtcgcgcaccgccggacgtcggcgctgtacgcgctcaaggtgctgcaccgcggcgaccccggggccgcgtcggaggtggacgccctgcggcgggccgacagctcgccgcacgtcgtgcggtgccactccgtgctccccgcggcggcccccggcgaggtcgcgctcctgctcgagctcgtggacggcggctcgctggacgccgtcgcggcccggcgcggggcgttcgccgaggccgcgctcgccgaggtcgcggcgcaggcgctggccggcctggcgcacctccacgcgcgccgcgtcgtccaccgcgacgtcaagccggcgaacctcctcgtcagcgccgccggggaggtcaagatcgccgacttcggcatcgccaaggtcctctcgcgcgccggcgaccactgcgccgcctacgagggcaccgccgcgtacatgagccccgagcggttcgacacggagcgccacagccacgccgacccctgcgccgccgacgtgtggagcctgggcgtcaccgttctggagcttctcatgggccggtacccgctgctccctgccgggcagaagcccagctgggcggggctcatgtgcgccatctgcttcggcgagctgccgtcgctgccggacggcgcagcgtcgccggagctccgtgcgttcgtcgccgcctgtcttgagaaggactacaccaagcgcgcgtctgtggcacagcttattgcgcacccgttcgtcgccagaagagacgtcgcggcctccaaagacgcgctccggcgactggtggccggggcctgaattgactgcgccgcttaggcattagattgaccacacagccgtatgatcgtacatttgtacacatgtgcatagctctttcttacacagtttagtaatctaaacaaaat

SEQ ID NO: 47803 - DNA, 3535 bp, Zea Mays
agtccttcccattcctctgcaagtcgcaactcgcaaccaaaggcaaggagcatttcaaaaaccctacctccctaccccacttcgcagtccgcaccgcacccaccccgatctccttctcccacccagatcgccggcccgtgcgcacgaaatggaggtgccgcggagatgctcgacgccctcgcaggctggttcgcgcagtcgctctctcccgacaccgccgcgcgccggccgagcagacatcgcctccgccgcctcctccccgggcttccgctggcctcctcggcctcgcggcctccccgcgccacgacctccaggcccgcctcgccgcctccgtccacttcaagaatcttctccgccgccggtgcccaagcccgacgccgatgccgacgccgacgtcgaccaccttcccgcctccgactgcgccatcatcaaggcgaccttctccagctcctcctcaccaccccgcccctcatccaggcgcagtctccgaggcctcgcgccgcgcgctccgatttccccgccaggtgggagtcccttctcccgtccatcgtgtcctccctaggcactgccgtcaacgcgggggacatcaccgccaccaactctcttctcgctgccgtggtgtcgctcttctctcgcttccgcaacgcattcgacaataatgccctccgcctcgacctcaagtactgccttgacatcttcgccgccccactccttgaggtttttctctttgcctcccgccgccttcaagccgctgccaccacggccaacccgctcgagctccgtcccgtgtttgagtgccttcgcctctgttgcgagatcttctactcgcttaactccattgaccttcctgagttcttcgaggataacatgcgccagtggatgacagagttccaagccttcctcaccacatcctacccaccgcctgttgaggcagatggtgccccggatgcgctccgtgctgctgtctgtgataacctgcagctttatatggagaagtacgaggaggagtttaggggatacctgaaggagtttgttgaggctgtgtgggggctcctcatggcgcagaccgcttcgccttcccgtgtgcagcttgccgttactgcgataaggttcttgactacagttgctgagagtgtgcaccatgctttatttgggagtcctgaggcgatgaagcagatatgtgatagtgtcgttgtgcctaacttgcgcctgcgggatgaggatgaggagttgtttgagggcaattgggtggaatatgtcaggcgcgactctgagggtagcgatgcagatacactcagacgggcagcgtgccggttgctgcggggccttgcagcgaactaccaagagcaggtggctgcactcgtctcagcacaggtccagcagatgttggttgcatatgctgctaatcggtcaaacaactggaaggagaaggatgctgcaatataccttgttattgctcttatgcagaagcctggtgccacaggtggtggcacacctgtggttgacatggagagcttctttacatctgtgattgtgcctgagctccaagcccctgattggcagtctgagccaatgttgaaggcaactgtgctcaggttcttgaaggagttcaaggatcagatccccaaagctactgcactggcactcctacaaagtgtgatgcggtttttgatgcatgagtccaatgttgttcattcatatgctgcaacttttatcgagaacctgttgataatcaaggatgctgtaccggtaccaggggtgaccacagtgatcaggtctccacgttatgttgctgctgatatcaatccatttgccccacagatcattcagaacctgtccacagcactaggtttccctgattcacaagagaacccctacctgatgaagtgcctgatgcgggtgcttgggattgctaatattgctggtcaaattgttcatgagatcacagctcaacttgtgggtattctcatggaagtgtgtaataatcccaagaaccctgacttcaaccattacttgtttgaggctctggcagcagttattggccggactggtgagcaggacccaacactactccctgcttttgagaccagcctctttccagtgctccagaggatattggttgaggacatctcagagttctggccatatgcttttcagatatttgctcaacttgtcaatttgagccgaccacctctctcacagaattacatgcagctatttggtgtccttctcagtaatgcaacttgggaccggccaccatgtgttcctgccttggttcgtttgctgcgagcattccttaggaaaattctaaatgagctaaaccaagagggcaggcttccaaatatattggcaatatcccgtagcctcctctcacgcagcagcactgaagattctgcattctacatgctgaacacactagtggaaaacgttggttttgacattctgaacccatatataagtgagatatggagtgctttgtttactcggctacagactagacagacagtgaaatttgtgaactctcttgtggttttcatgtcgctagtgctggtcaaatatgggtcaagtgttcttgtcaattccgttgatgcaattcagccaaatcttttcacccaaatccttcagcgattttggattcccaacctcaatttgatcaaaggtgctcttgaagttaagttgacagcagttgcttcgataaagttgctttgtgagtctgcggtcctgttggatgctgcagcagcccagttatggggtaaattacttgacagtattgtcacactattgtccagaatgaatcaagatggatcacaacaagagcataatgatggtactgatgcagtggatactcagaagacatcaagttattctgtttcatttgtacgacttcaatatgctgggaagagtgaagatgaccttttgaaagaagtaaatgatccaaaacagtttgtggtcacatccttagccacaatttctgcccagtttcctgggaggtttggtcctgtcattgagcagcatgtggacctagcaaacaaaagtgtgcttcttcaactttgtgcagcctacaatgccaacattgtctaggctatttaaccgagggagctatttaacttcactggaaggtgcagccccgtccccgtatatgaacaaggacattccggtcacgttcaccgttttacatgcatgagtcttcgagccgttggatggaacgcacgaaatccccttgatctttctacaaggaataaaataaatttgtttctagcaaacaacgccacaaggatgagtttctcacacactactggccatggtgttggtttaagtgaagttagggggaggatgatatcctgtacacatggatcggaacgctggtgcagaaacagaattctggtctttaaaatcggatttaacggttcacgctatgagaggtttttttttacaaagtgaaccgtgtttttaaaaaaaccgcgttagatctgattttagatgctagaattctagtatattttatcagcaccggatatcatcggcatagggcgtt

SEQ ID NO: 47804 - DNA, 1652 bp, Zea Mays
attccacgtgtgtagtgagtgagtttagacactgggggtgagccggtgaggcaataaaaaccctatcccagtaaacgccgcggctccttccgctaccaccttcatccatcctggcgtcggtgtcttgccctgccccagcgccgccgctccttcccccaccccgaagcgccgcctcttctgcctccgtcgacggtggtggtgctcctgatccccgccgttgaactggccataggagagcaaagaggaaggggaggccacgagggcgccagtagatatattcatcttcatctcggcttgcgatatttttgaattttctattccgtattgaaggcgtcgatggccttgtccgccctaatcagcaccctcctcgccgccgccatctgcacaccccacctccagctttgtaggtcctactatacttgcaacctctcccgccgactcgcttcgatctacccgccctcgcgtcaccatggggtacgcgcagctcgtcatcggccccgctgggagcggcaagtcaacttattgctccagtttatacgaccattgccagaccgtgggaaggacaattcatattgtcaatcttgatccagctgctgagcacttcgactatcctgtagatatggatatcagagagctgatttcattggatgatgttatggaggagattgggttggggccaaatggcggtctcatctactgcatggagcaccttgaagacagcttggatgattggtttgatgaacagctagagaactacctagatgatgattatcttgtgtttgattgccctgattgaactcttcacacatgttccagttctgcggaactttgtcgagcacctgaaacgaaaaaatttcaacgtttgcgctgtttaccttcttgattcacagtttgtcagcgatgtaacaaaatacatcagtggttgcatggcttctctatctgctatgattcagcttgaacttcctcatatcaacatcctttcaaagatggatctggtctccaacaaaaaagatgtagaagagtacctggacccgaatgcacaggttcttctttcacagctgaatcggcagatggcacctcggtttggcaagttgaacaagtgtttagctgaactggttgatgattacagcatggttaatttcattccacttgatttgagaaaggaaagcagcatacaatatgtgctatcttctatcgacacatgtatccagtatggggaagatgcagacgtgaaggtcagggacttcgaagaagacgaagactaaccactggatgctgtgggaggtgcaaactggttgctagcagtcgtgtagtgcggagtgagactttgggactgtgtatggcgcaggcatgcaaaaacgtcgtaggatgctgatggcagctatgtggtctatgtaagacgaactaaaccagatactccatttggcaagtcctagtaaaacgtgtgcgcgccttgatggtcctgttctccctcgatgctccgttggtattttatcaaaatcaattcaacggttgccgtatttatagaaacttagcaaagggtgagtttgatgtcaaatcgattgagttgtttacgggccttccggcatagtccgccctcgttgcaatgctgagacgttggctggggcggggctcttctgaactgtttcaag

SEQ ID NO: 47805 - DNA, 1641 bp, Zea Mays
attccacgtgtgtagtgagtgagtttagacactgggggtgagccggtgaggcaataaaaaccctatcccagtaaacgccgcggctccttccgctaccaccttcatccatcctggcgtcggtgtcttgccctgccccagcgccgccgctccttcccccaccccgaagcgccgcctcttctgcctccgtcgacggtggtggtgctcctgatccccgccgttgaactggccataggagagcaaagaggaaggggaggccacgagggcgccagtagatatattcatcttcatctcggcttgcgatatttttgaattttctattccgtattgaaggcgtcgatggccttgtccgccctaatcagcaccctcctcgccgccgccatctgctttgtaggtcctactatacttgcaacctctcccgccgactcgcttcgatctacccgccctcgcgtcaccatggggtacgcgcagctcgtcatcggccccgctgggagcggcaagtcaacttattgctccagtttatacgaccattgccagaccgtgggaaggacaattcatattgtcaatcttgatccagctgctgagcacttcgactatcctgtagatatggatatcagagagctgatttcattggatgatgttatggaggagattgggttggggccaaatggcggtctcatctactgcatggagcaccttgaagacagcttggatgattggtttgatgaacagctagagaactacctagatgatgattatcttgtgtttgattgccctggccagattgaactcttcacacatgttccagttctgcggaactttgtcgagcacctgaaacgaaaaaatttcaacgtttgcgctgtttaccttcttgattcacagtttgtcagcgatgtaacaaaatacatcagtggttgcatggcttctctatctgctatgattcagcttgaacttcctcatatcaacatcctttcaaagatggatctggtctccaacaaaaaagatgtagaagagtacctggacccgaatgcacaggttcttctttcacagctgaatcggcagatggcacctcggtttggcaagttgaacaagtgtttagctgaactggttgatgattacagcatggttaatttcattccacttgatttgagaaaggaaagcagcatacaatatgtgctatcttctatcgacacatgtatccagtatggggaagatgcagacgtgaaggtcagggacttcgaagaagacgaagactaaccactggatgctgtgggaggtgcaaactggttgctagcagtcgtgtagtgcggagtgagactttgggactgtgtatggcgcaggcatgcaaaaacgtcgtaggatgctgatggcagctatgtggtctatgtaagacgaactaaaccagatactccatttggcaagtcctagtaaaacgtgtgcgcgccttgatggtcctgttctccctcgatgctccgttggtattttatcaaaatcaattcaacggttgccgtatttatagaaacttagcaaagggtgagtttgatgtcaaatcgattgagttgtttacgggccttccggcatagtccgccctcgttgcaatgctgagacgttggctggggcggggctcttctgaactgtttcaag

SEQ ID NO: 47806 - DNA, 1635 bp, Zea Mays
attccacgtgtgtagtgagtgagtttagacactgggggtgagccggtgaggcaataaaaaccctatcccagtaaacgccgcggctccttccgctaccaccttcatccatcctggcgtcggtgtcttgccctgccccagcgccgccgctccttcccccaccccgaagcgccgcctcttctgcctccgtcgacggtggtggtgctcctgatccccgccgttgaactggccataggagagcaaagaggaaggggaggccacgagggcgccagtagatatattcatcttcatctcggcttgcgatatttttgaattttctattccgtattgaaggcgtcgatggccttgtccgccctaatcagcaccctcctcgccgccgccatctgcacaccccacctccagctttgtaggtcctactatacttgcaacctctcccgccgactcgcttcgatctacccgccctcgcgtcaccatggggtacgcgcagctcgtcatcggccccgctgggagcggcaagtcaacttattgctccagtttatacgaccattgccagaccgtgggaaggacaattcatattgtcaatcttgatccagctgctgagcacttcgactatcctgtagatatggatatcagagagctgatttcattggatgatgttatggaggagattgggttggggccaaatggcggtctcatctactgcatggagcaccttgaagacagcttggatgattggtttgatgaacagctagagaactacctagatgatgattatcttgtgtttgattgccctggccagattgaactcttcacacatgttccagttctgcggaactttgtcgagcacctgaaacgaaaaaatttcaacgtttgcgctgtttaccttcttgattcacagtttgtcagcgatgtaacaaaatacatcagtggttgcatggcttctctatctgctatgattcagcttgaacttcctcatatcaacatcctttcaaagatggatctggtctccaacaaaaaagatgtagaagagttcttctttcacagctgaatcggcagatggcacctcggtttggcaagttgaacaagtgtttagctgaactggttgatgattacagcatggttaatttcattccacttgatttgagaaaggaaagcagcatacaatatgtgctatcttctatcgacacatgtatccagtatggggaagatgcagacgtgaaggtcagggacttcgaagaagacgaagactaaccactggatgctgtgggaggtgcaaactggttgctagcagtcgtgtagtgcggagtgagactttgggactgtgtatggcgcaggcatgcaaaaacgtcgtaggatgctgatggcagctatgtggtctatgtaagacgaactaaaccagatactccatttggcaagtcctagtaaaacgtgtgcgcgccttgatggtcctgttctccctcgatgctccgttggtattttatcaaaatcaattcaacggttgccgtatttatagaaacttagcaaagggtgagtttgatgtcaaatcgattgagttgtttacgggccttccggcatagtccgccctcgttgcaatgctgagacgttggctggggcggggctcttctgaactgtttcaag

SEQ ID NO: 47807 - DNA, 2303 bp, Zea Mays
cgaccggaaaaggacattgttcttttctgcgcccctactccacccgccgcctccgctcctcgccgccgcgcggcgcggcgacgtgcaatcttagggttcgtgagagggttcccgaatcctccttgccgtgcaccacaccgtccccctccaccgacgccgctgcttcccatgtcgctccgatccggcggccgccagctatctttcgagcttctcgcgggcgacctcaccgccgacgacccggacgacatctccccgcgctccctgcccgatacatcgtccgatgggcagcgccggcgcaggaggcggtctaagcgcaagcgtgggttccggagccccccgatccaggaggcggtttcggagggggagcagcagccgcgcgtggagggcggcggcaactcggccgcggcgttcagggtcctggatctgaagtcgactgcggagacggtgtgcgagagctcggacgcggaaaggtctgcggcgagctgcgtgacctatgttggcgtggagctgaggcagaggagcgtctccgggggcgggagggtggtggcagcgtccgcggatgatgggaccagcagctgcggaagcagcacgcgggagagcgccgcagctgctgcggctgtggcggatgtggcagccatggcgtggcggcctgaggcaaatggcggcatgaagaagaagctggagaaggagtcgtcgctggactgggagaagtacatgaaggacaataacaaaattctcggagaatttgagcgccttgacaaatcaccattcagatactttcttggggaactatatggtggcaattcactgagaagcacaattgcagtgggcaatgagaagaagcggcagcgggtgtacaacactatgtttcatgtcccatggagatgtgaacgggattcttcgtctgcttggattcctttctgtcattgcttacaattatgcctgcacgaattgtcgttaccatctggcgggtgatgaagaccaggaagttccggcggccaaatgctgctgatttatcagattatggatgttttgtagttctagcccttggagttgcctctttgcaaatgatagatattagcttaatttaccatgtcattcgtggtcagggcacaatcaagctttatgtcgtatacaacgtactagagatctttgacaaactctgtcaatcattcggtgaggatgtgctgcaagttctgttcaactcagctgaggggttgtcagcatgctcgacagataatgtgacatttgaactgatgcggttcattttggatgaggctatagccgttgttgcatttgttgtccattcatttgtcttgttagctcaggcgatcaccctgtcaacatgcattattgcccacaataatgcattattggctctactggtatcaaacaattttgctgagattaaaagtaatgtatttaagcgtgttagcaaagagaatcttcataatttggtatactatgacatcattgagcgatttcacatcatggcctttctgctatttgttcttgctcaaaatatcttggaagcagagggcccatggtttgacagctttcttattccagttgcatattcagaatttttggaagatctttgcaagcagattttgaatgacaaacctgatgaccgtcagaaggacctaacattcatcccacttgccccagcttgtgttgtaattcgtgtattgaccccagtatatgctaccctccttcctgctggcccttttatctggagaatattctggattttactttggtcagttctgacctattttatgctcgccatattcaagataatcgtgggattgatactgcgctgccttgcaaattggtatgtaaatctacggctcacaagaaaacaacacgtggattgagtacatggcaccacaattctgctgctatcgttacatctgtgagtagaaattttgctgtggtgcatgaagtgcagcaagcactgcagctgctgagagttatatgacagaagtattcatagtatagtacagcgcagatgaatattatagtctcttcttccaagggttttgtcgattcgaggaacagattagtcaaattttgtggtgtttagacttctgacctccgtttgtgcatagctcagcttcatccaaaactatctgctgtcacctaaccaagatgttctggtctgtgatgtaagacatgtttatacattttttttaaaaaagaaacaaactgtactttcgtgttcagcagaagctcgataaggttgttcgcgttgcgtctgtttttgtgtgctattccctggtgcatgtcttccagataagata

SEQ ID NO: 47808 - DNA, 2310 bp, Zea Mays
cgaccggaaaaggacattgttcttttctgcgcccctactccacccgccgcctccgctcctcgccgccgcgcggcgcggcgacgtgcaatcttagggttcgtgagagggttcccgaatcctccttgccgtgcaccacaccgtccccctccaccgacgccgctgcttcccatgtcgctccgatccggcggccgccagctatctttcgagcttctcgcgggcgacctcaccgccgacgacccggacgacatctccccgcgctccctgcccgatacatcgtccgatgggcagcgccggcgcaggaggcggtctaagcgcaagcgtgggttccggagccccccgatccaggaggcggtttcggagggggagcagcagccgcgcgtggagggcggcggcaactcggccgcggcgttcagggtcctggatctgaagtcgactgcggagacggtgtgcgagagctcggacgcggaaaggtctgcggcgagctgcgtgacctatgttggcgtggagctgaggcagaggagcgtctccgggggcgggagggtggtggcagcgtccgcggatgatgggaccagcagctgcggaagcagcacgcgggagagcgccgcagctgctgcggctgtggcggatgtggcagccatggcgtggcggcctgaggcaaatggcggcatgaagaagaagctggagaaggagtcgtcgctggactgggagaagtacatgaaggacaataacaaaattctcggagaatttgagcgccttgacaaatcaccattcagatactttcttggggaactatatggtggcaattcactgagaagcacaattgcagtgggcaatgagaagaagcggcagcgggtgtacaacactatgtttcatgtcccatggagatgtgaacggctaattgtcgcaggattcttcgtctgcttggattcctttctgtcattgcttacaattatgcctgcacgaattgtcgttaccatctggcgggtgatgaagaccaggaagttccggcggccaaatgctgctgatttatcagattatggatgttttgtagttctagcccttggagttgcctctttgcaaatgatagatattagcttaatttaccatgtcattcgtggtcagggcacaatcaagctttatgtcgtatacaacgtactagagatctttgacaaactctgtcaatcattcggtgaggatgtgctgcaagttctgttcaactcagctgaggggttgtcagcatgctcgacagataatgcgatcaccctgtcaacatgcattattgcccacaataatgcattattggctctactggtatcaaacaattttgctgagattaaaagtaatgtatttaagcgtgttagcaaagagaatcttcataatttggtatactatgacatcattgagcgatttcacatcatggcctttctgctatttgttcttgctcaaaatatcttggaagcagagggcccatggtttgacagctttcttattaatgcgtcattggtttttttgtgtgaagtacttatcgatgctatcaaacattctttccttgcaaaatttaatgagataaagccagttgcatattcagaatttttggaagatctttgcaagcagattttgaatgacaaacctgatgaccgtcagaaggacctaacattcatcccacttgccccagcttgtgttgtaattcgtgtattgaccccagtatatgctaccctccttcctgctggcccttttatctggagaatattctggattttactttggtcagttctgacctattttatgctcgccatattcaagataatcgtgggattgatactgcgctgccttgcaaattggtatgtaaatctacggctcacaagaaaacaacacgtggattgagtacatggcaccacaattctgctgctatcgttacatctgtgagtagaaattttgctgtggtgcatgaagtgcagcaagcactgcagctgctgagagttatatgacagaagtattcatagtatagtacagcgcagatgaatattatagtctcttcttccaagggttttgtcgattcgaggaacagattagtcaaattttgtggtgtttagacttctgacctccgtttgtgcatagctcagcttcatccaaaactatctgctgtcacctaaccaagatgttctggtctgtgatgtaagacatgtttatacattttttttaaaaaagaaacaaactgtactttcgtgttcagcagaagctcgataaggttgttcgcgttgcgtctgtttttgtgtgctattccctggtgcatgtcttccagataagata

SEQ ID NO: 47809 - DNA, 2731 bp, Zea Mays
cgaccggaaaaggacattgttcttttctgcgcccctactccacccgccgcctccgctcctcgccgccgcgcggcgcggcgacgtgcaatcttagggttcgtgagagggttcccgaatcctccttgccgtgcaccacaccgtccccctccaccgacgccgctgcttcccatgtcgctccgatccggcggccgccagctatctttcgagcttctcgcgggcgacctcaccgccgacgacccggacgacatctccccgcgctccctgcccgatacatcgtccgatgggcagcgccggcgcaggaggcggtctaagcgcaagcgtgggttccggagccccccgatccaggaggcggtttcggagggggagcagcagccgcgcgtggagggcggcggcaactcggccgcggcgttcagggtcctggatctgaagtcgactgcggagacggtgtgcgagagctcggacgcggaaaggtctgcggcgagctgcgtgacctatgttggcgtggagctgaggcagaggagcgtctccgggggcgggagggtggtggcagcgtccgcggatgatgggaccagcagctgcggaagcagcacgcgggagagcgccgcagctgctgcggctgtggcggatgtggcagccatggcgtggcggcctgaggcaaatggcggcatgaagaagaagctggagaaggagtcgtcgctggactgggagaagtacatgaaggacaataacaaaattctcggagaatttgagcgccttgacaaatcaccattcagatactttcttggggaactatatggtggcaattcactgagaagcacaattgcagtgggcaatgagaagaagcggcagcgggtgtacaacactatgtttcatgtcccatggagatgtgaacgggattcttcgtctgcttggattcctttctgtcattgcttacaattatgcctgcacgaattgtcgttaccatctggcgggtgatgaagaccaggaagttccggcggccaaatgctgctgatttatcagattatggatgttttgtagttctagcccttggagttgcctctttgcaaatgatagatattagcttaatttaccatgtcattcgtggtcagggcacaatcaagctttatgtcgtatacaacgtactagagatctttgacaaactctgtcaatcattcggtgaggatgtgctgcaagttctgttcaactcagctgaggggttgtcagcatgctcgacagataatgtgacatttgaactgatgcggttcattttggatgaggctatagccgttgttgcatttgatatccttttctgcagattgcatcagttaattttcttgctagtcactgtaggttaagttagttgagttctaatctgtcagtagttaatttccctttaaatgttaggtgtaatttgaattagaactagataagatcatagacacctgactgcctaatgataaaggtcacacacagatctggtggtgaatctagtgattgcaatagcaaaattttcaattgaatatacagtggtatggatttgcttgacatcaatgagctctaattacattgtaaaatttaattgtattatcaatactgttgctattataatataaacatcgaattttgaatcccttaataagttatacttgtccattcatttgtcttgttagctcaggcgatcaccctgtcaacatgcattattgcccacaataatgcattattggctctactggtatcaaacaattttgctgagattaaaagtaatgtatttaagcgtgttagcaaagagaatcttcataatttggtatactatgacatcattgagcgatttcacatcatggcctttctgctatttgttcttgctcaaaatatcttggaagcagagggcccatggtttgacagctttcttattaatgcgtcattggtttttttgtgtgaagtacttatcgatgctatcaaacattctttccttgcaaaatttaatgagataaagccagttgcatattcagaatttttggaagatctttgcaagcagattttgaatgacaaacctgatgaccgtcagaaggacctaacattcatcccacttgccccagcttgtgttgtaattcgtgtattgaccccagtatatgctaccctccttcctgctggcccttttatctggagaatattctggattttactttggtcagttctgacctattttatgctcgccatattcaagataatcgtgggattgatactgcgctgccttgcaaattggtatgtaaatctacggctcacaagaaaacaacacgtggattgagtacatggcaccacaattctgctgctatcgttacatctgtgagtagaaattttgctgtggtgcatgaagtgcagcaagcactgcagctgctgagagttatatgacagaagtattcatagtatagtacagcgcagatgaatattatagtctcttcttccaagggttttgtcgattcgaggaacagattagtcaaattttgtggtgtttagacttctgacctccgtttgtgcatagctcagcttcatccaaaactatctgctgtcacctaaccaagatgttctggtctgtgatgtaagacatgtttatacattttttttaaaaaagaaacaaactgtactttcgtgttcagcagaagctcgataaggttgttcgcgttgcgtctgtttttgtgtgctattccctggtgcatgtcttccagataagata

SEQ ID NO: 47810 - DNA, 2744 bp, Zea Mays
cgaccggaaaaggacattgttcttttctgcgcccctactccacccgccgcctccgctcctcgccgccgcgcggcgcggcgacgtgcaatcttagggttcgtgagagggttcccgaatcctccttgccgtgcaccacaccgtccccctccaccgacgccgctgcttcccatgtcgctccgatccggcggccgccagctatctttcgagcttctcgcgggcgacctcaccgccgacgacccggacgacatctccccgcgctccctgcccgatacatcgtccgatgggcagcgccggcgcaggaggcggtctaagcgcaagcgtgggttccggagccccccgatccaggaggcggtttcggagggggagcagcagccgcgcgtggagggcggcggcaactcggccgcggcgttcagggtcctggatctgaagtcgactgcggagacggtgtgcgagagctcggacgcggaaaggtctgcggcgagctgcgtgacctatgttggcgtggagctgaggcagaggagcgtctccgggggcgggagggtggtggcagcgtccgcggatgatgggaccagcagctgcggaagcagcacgcgggagagcgccgcagctgctgcggctgtggcggatgtggcagccatggcgtggcggcctgaggcaaatggcggcatgaagaagaagctggagaaggagtcgtcgctggactgggagaagtacatgaaggacaataacaaaattctcggagaatttgagcgccttgacaaatcaccattcagatactttcttggggaactatatggtggcaattcactgagaagcacaattgcagtgggcaatgagaagaagcggcagcgggtgtacaacactatgtttcatgtcccatggagatgtgaacggctaattgtcgcaggattcttcgtctgcttggattcctttctgtcattgcttacaattatgcctgcacgaattgtcgttaccatctggcgggtgatgaagaccaggaagttccggcggccaaatgctgctgatttatcagattatggatgttttgtagttctagcccttggagttgcctctttgcaaatgatagatattagcttaatttaccatgtcattcgtggtcagggcacaatcaagctttatgtcgtatacaacgtactagagatctttgacaaactctgtcaatcattcggtgaggatgtgctgcaagttctgttcaactcagctgaggggttgtcagcatgctcgacagataatgtgacatttgaactgatgcggttcattttggatgaggctatagccgttgttgcatttgatatccttttctgcagattgcatcagttaattttcttgctagtcactgtaggttaagttagttgagttctaatctgtcagtagttaatttccctttaaatgttaggtgtaatttgaattagaactagataagatcatagacacctgactgcctaatgataaaggtcacacacagatctggtggtgaatctagtgattgcaatagcaaaattttcaattgaatatacagtggtatggatttgcttgacatcaatgagctctaattacattgtaaaatttaattgtattatcaatactgttgctattataatataaacatcgaattttgaatcccttaataagttatacttgtccattcatttgtcttgttagctcaggcgatcaccctgtcaacatgcattattgcccacaataatgcattattggctctactggtatcaaacaattttgctgagattaaaagtaatgtatttaagcgtgttagcaaagagaatcttcataatttggtatactatgacatcattgagcgatttcacatcatggcctttctgctatttgttcttgctcaaaatatcttggaagcagagggcccatggtttgacagctttcttattaatgcgtcattggtttttttgtgtgaagtacttatcgatgctatcaaacattctttccttgcaaaatttaatgagataaagccagttgcatattcagaatttttggaagatctttgcaagcagattttgaatgacaaacctgatgaccgtcagaaggacctaacattcatcccacttgccccagcttgtgttgtaattcgtgtattgaccccagtatatgctaccctccttcctgctggcccttttatctggagaatattctggattttactttggtcagttctgacctattttatgctcgccatattcaagataatcgtgggattgatactgcgctgccttgcaaattggtatgtaaatctacggctcacaagaaaacaacacgtggattgagtacatggcaccacaattctgctgctatcgttacatctgtgagtagaaattttgctgtggtgcatgaagtgcagcaagcactgcagctgctgagagttatatgacagaagtattcatagtatagtacagcgcagatgaatattatagtctcttcttccaagggttttgtcgattcgaggaacagattagtcaaattttgtggtgtttagacttctgacctccgtttgtgcatagctcagcttcatccaaaactatctgctgtcacctaaccaagatgttctggtctgtgatgtaagacatgtttatacattttttttaaaaaagaaacaaactgtactttcgtgttcagcagaagctcgataaggttgttcgcgttgcgtctgtttttgtgtgctattccctggtgcatgtcttccagataagata

SEQ ID NO: 47811 - DNA, 2261 bp, Zea Mays
cgaccggaaaaggacattgttcttttctgcgcccctactccacccgccgcctccgctcctcgccgccgcgcggcgcggcgacgtgcaatcttagggttcgtgagagggttcccgaatcctccttgccgtgcaccacaccgtccccctccaccgacgccgctgcttcccatgtcgctccgatccggcggccgccagctatctttcgagcttctcgcgggcgacctcaccgccgacgacccggacgacatctccccgcgctccctgcccgatacatcgtccgatgggcagcgccggcgcaggaggcggtctaagcgcaagcgtgggttccggagccccccgatccaggaggcggtttcggagggggagcagcagccgcgcgtggagggcggcggcaactcggccgcggcgttcagggtcctggatctgaagtcgactgcggagacggtgtgcgagagctcggacgcggaaaggtctgcggcgagctgcgtgacctatgttggcgtggagctgaggcagaggagcgtctccgggggcgggagggtggtggcagcgtccgcggatgatgggaccagcagctgcggaagcagcacgcgggagagcgccgcagctgctgcggctgtggcggatgtggcagccatggcgtggcggcctgaggcaaatggcggcatgaagaagaagctggagaaggagtcgtcgctggactgggagaagtacatgaaggacaataacaaaattctcggagaatttgagcgccttgacaaatcaccattcagatactttcttggggaactatatggtggcaattcactgagaagcacaattgcagtgggcaatgagaagaagcggcagcgggtgtacaacactatgtttcatgtcccatggagatgtgaacgggattcttcgtctgcttggattcctttctgtcattgcttacaattatgcctgcacgaattgtcgttaccatctggcgggtgatgaagaccaggaagttccggcggccaaatgctgctgatttatcagattatggatgttttgtagttctagcccttggagttgcctctttgcaaatgatagatattagcttaatttaccatgtcattcgtggtcagggcacaatcaagctttatgtcgtatacaacgtactagagatctttgacaaactctgtcaatcattcggtgaggatgtgctgcaagttctgttcaactcagctgaggggttgtcagcatgctcgacagataatgtgacatttgaactgatgcggttcattttggatgaggctatagccgttgttgcatttgttgtccattcatttgtcttgttagctcaggcgatcaccctgtcaacatgcattattgcccacaataatgcattattggctctactggtatcaaacaattttgctgagattaaaagtaatgtatttaagcgtgttagcaaagagaatcttcataatttggtatactatgacatcattgagcgatttcacatcatggcctttctgctatttgttcttgctcaaaatatcttggaagcagagggcccatggtttgacagctttcttattattttgaatgacaaacctgatgaccgtcagaaggacctaacattcatcccacttgccccagcttgtgttgtaattcgtgtattgaccccagtatatgctaccctccttcctgctggcccttttatctggagaatattctggattttactttggtcagttctgacctattttatgctcgccatattcaagataatcgtgggattgatactgcgctgccttgcaaattggtatgtaaatctacggctcacaagaaaacaacacgtggattgagtacatggcaccacaattctgctgctatcgttacatctgtgagtagaaattttgctgtggtgcatgaagtgcagcaagcactgcagctgctgagagttatatgacagaagtattcatagtatagtacagcgcagatgaatattatagtctcttcttccaagggttttgtcgattcgaggaacagattagtcaaattttgtggtgtttagacttctgacctccgtttgtgcatagctcagcttcatccaaaactatctgctgtcacctaaccaagatgttctggtctgtgatgtaagacatgtttatacattttttttaaaaaagaaacaaactgtactttcgtgttcagcagaagctcgataaggttgttcgcgttgcgtctgtttttgtgtgctattccctggtgcatgtcttccagataagata

SEQ ID NO: 47812 - DNA, 2656 bp, Zea Mays
cgaccggaaaaggacattgttcttttctgcgcccctactccacccgccgcctccgctcctcgccgccgcgcggcgcggcgacgtgcaatcttagggttcgtgagagggttcccgaatcctccttgccgtgcaccacaccgtccccctccaccgacgccgctgcttcccatgtcgctccgatccggcggccgccagctatctttcgagcttctcgcgggcgacctcaccgccgacgacccggacgacatctccccgcgctccctgcccgatacatcgtccgatgggcagcgccggcgcaggaggcggtctaagcgcaagcgtgggttccggagccccccgatccaggaggcggtttcggagggggagcagcagccgcgcgtggagggcggcggcaactcggccgcggcgttcagggtcctggatctgaagtcgactgcggagacggtgtgcgagagctcggacgcggaaaggtctgcggcgagctgcgtgacctatgttggcgtggagctgaggcagaggagcgtctccgggggcgggagggtggtggcagcgtccgcggatgatgggaccagcagctgcggaagcagcacgcgggagagcgccgcagctgctgcggctgtggcggatgtggcagccatggcgtggcggcctgaggcaaatggcggcatgaagaagaagctggagaaggagtcgtcgctggactgggagaagtacatgaaggacaataacaaaattctcggagaatttgagcgccttgacaaatcaccattcagatactttcttggggaactatatggtggcaattcactgagaagcacaattgcagtgggcaatgagaagaagcggcagcgggtgtacaacactatgtttcatgtcccatggagatgtgaacgggattcttcgtctgcttggattcctttctgtcattgcttacaattatgcctgcacgaattgtcgttaccatctggcgggtgatgaagaccaggaagttccggcggccaaatgctgctgatttatcagattatggatgttttgtagttctagcccttggagttgcctctttgcaaatgatagatattagcttaatttaccatgtcattcgtggtcagggcacaatcaagctttatgtcgtatacaacgtactagagatctttgacaaactctgtcaatcattcggtgaggatgtgctgcaagttctgttcaactcagctgaggggttgtcagcatgctcgacagataatgtgacatttgaactgatgcggttcattttggatgaggctatagccgttgttgcatttgatatccttttctgcagattgcatcagttaattttcttgctagtcactgtaggttaagttagttgagttctaatctgtcagtagttaatttccctttaaatgttaggtgtaatttgaattagaactagataagatcatagacacctgactgcctaatgataaaggtcacacacagatctggtggtgaatctagtgattgcaatagcaaaattttcaattgaatatacagtggtatggatttgcttgacatcaatgagctctaattacattgtaaaatttaattgtattatcaatactgttgctattataatataaacatcgaattttgaatcccttaataagttatacttgtccattcatttgtcttgttagctcaggcgatcaccctgtcaacatgcattattgcccacaataatgcattattggctctactggtatcaaacaattttgctgagattaaaagtaatgtatttaagcgtgttagcaaagagaatcttcataatttggtatactatgacatcattgagcgatttcacatcatggcctttctgctatttgttcttgctcaaaatatcttggaagcagagggcccatggtttgacagctttcttattataaagccagttgcatattcagaatttttggaagatctttgcaagcagattttgaatgacaaacctgatgaccgtcagaaggacctaacattcatcccacttgccccagcttgtgttgtaattcgtgtattgaccccagtatatgctaccctccttcctgctggcccttttatctggagaatattctggattttactttggtcagttctgacctattttatgctcgccatattcaagataatcgtgggattgatactgcgctgccttgcaaattggtatgtaaatctacggctcacaagaaaacaacacgtggattgagtacatggcaccacaattctgctgctatcgttacatctgtgagtagaaattttgctgtggtgcatgaagtgcagcaagcactgcagctgctgagagttatatgacagaagtattcatagtatagtacagcgcagatgaatattatagtctcttcttccaagggttttgtcgattcgaggaacagattagtcaaattttgtggtgtttagacttctgacctccgtttgtgcatagctcagcttcatccaaaactatctgctgtcacctaaccaagatgttctggtctgtgatgtaagacatgtttatacattttttttaaaaaagaaacaaactgtactttcgtgttcagcagaagctcgataaggttgttcgcgttgcgtctgtttttgtgtgctattccctggtgcatgtcttccagataagata

SEQ ID NO: 47813 - DNA, 2274 bp, Zea Mays
cgaccggaaaaggacattgttcttttctgcgcccctactccacccgccgcctccgctcctcgccgccgcgcggcgcggcgacgtgcaatcttagggttcgtgagagggttcccgaatcctccttgccgtgcaccacaccgtccccctccaccgacgccgctgcttcccatgtcgctccgatccggcggccgccagctatctttcgagcttctcgcgggcgacctcaccgccgacgacccggacgacatctccccgcgctccctgcccgatacatcgtccgatgggcagcgccggcgcaggaggcggtctaagcgcaagcgtgggttccggagccccccgatccaggaggcggtttcggagggggagcagcagccgcgcgtggagggcggcggcaactcggccgcggcgttcagggtcctggatctgaagtcgactgcggagacggtgtgcgagagctcggacgcggaaaggtctgcggcgagctgcgtgacctatgttggcgtggagctgaggcagaggagcgtctccgggggcgggagggtggtggcagcgtccgcggatgatgggaccagcagctgcggaagcagcacgcgggagagcgccgcagctgctgcggctgtggcggatgtggcagccatggcgtggcggcctgaggcaaatggcggcatgaagaagaagctggagaaggagtcgtcgctggactgggagaagtacatgaaggacaataacaaaattctcggagaatttgagcgccttgacaaatcaccattcagatactttcttggggaactatatggtggcaattcactgagaagcacaattgcagtgggcaatgagaagaagcggcagcgggtgtacaacactatgtttcatgtcccatggagatgtgaacggctaattgtcgcaggattcttcgtctgcttggattcctttctgtcattgcttacaattatgcctgcacgaattgtcgttaccatctggcgggtgatgaagaccaggaagttccggcggccaaatgctgctgatttatcagattatggatgttttgtagttctagcccttggagttgcctctttgcaaatgatagatattagcttaatttaccatgtcattcgtggtcagggcacaatcaagctttatgtcgtatacaacgtactagagatctttgacaaactctgtcaatcattcggtgaggatgtgctgcaagttctgttcaactcagctgaggggttgtcagcatgctcgacagataatgtgacatttgaactgatgcggttcattttggatgaggctatagccgttgttgcatttgttgtccattcatttgtcttgttagctcaggcgatcaccctgtcaacatgcattattgcccacaataatgcattattggctctactggtatcaaacaattttgctgagattaaaagtaatgtatttaagcgtgttagcaaagagaatcttcataatttggtatactatgacatcattgagcgatttcacatcatggcctttctgctatttgttcttgctcaaaatatcttggaagcagagggcccatggtttgacagctttcttattattttgaatgacaaacctgatgaccgtcagaaggacctaacattcatcccacttgccccagcttgtgttgtaattcgtgtattgaccccagtatatgctaccctccttcctgctggcccttttatctggagaatattctggattttactttggtcagttctgacctattttatgctcgccatattcaagataatcgtgggattgatactgcgctgccttgcaaattggtatgtaaatctacggctcacaagaaaacaacacgtggattgagtacatggcaccacaattctgctgctatcgttacatctgtgagtagaaattttgctgtggtgcatgaagtgcagcaagcactgcagctgctgagagttatatgacagaagtattcatagtatagtacagcgcagatgaatattatagtctcttcttccaagggttttgtcgattcgaggaacagattagtcaaattttgtggtgtttagacttctgacctccgtttgtgcatagctcagcttcatccaaaactatctgctgtcacctaaccaagatgttctggtctgtgatgtaagacatgtttatacattttttttaaaaaagaaacaaactgtactttcgtgttcagcagaagctcgataaggttgttcgcgttgcgtctgtttttgtgtgctattccctggtgcatgtcttccagataagata

SEQ ID NO: 47814 - DNA, 2608 bp, Zea Mays
cgaccggaaaaggacattgttcttttctgcgcccctactccacccgccgcctccgctcctcgccgccgcgcggcgcggcgacgtgcaatcttagggttcgtgagagggttcccgaatcctccttgccgtgcaccacaccgtccccctccaccgacgccgctgcttcccatgtcgctccgatccggcggccgccagctatctttcgagcttctcgcgggcgacctcaccgccgacgacccggacgacatctccccgcgctccctgcccgatacatcgtccgatgggcagcgccggcgcaggaggcggtctaagcgcaagcgtgggttccggagccccccgatccaggaggcggtttcggagggggagcagcagccgcgcgtggagggcggcggcaactcggccgcggcgttcagggtcctggatctgaagtcgactgcggagacggtgtgcgagagctcggacgcggaaaggtctgcggcgagctgcgtgacctatgttggcgtggagctgaggcagaggagcgtctccgggggcgggagggtggtggcagcgtccgcggatgatgggaccagcagctgcggaagcagcacgcgggagagcgccgcagctgctgcggctgtggcggatgtggcagccatggcgtggcggcctgaggcaaatggcggcatgaagaagaagctggagaaggagtcgtcgctggactgggagaagtacatgaaggacaataacaaaattctcggagaatttgagcgccttgacaaatcaccattcagatactttcttggggaactatatggtggcaattcactgagaagcacaattgcagtgggcaatgagaagaagcggcagcgggtgtacaacactatgtttcatgtcccatggagatgtgaacgggattcttcgtctgcttggattcctttctgtcattgcttacaattatgcctgcacgaattgtcgttaccatctggcgggtgatgaagaccaggaagttccggcggccaaatgctgctgatttatcagattatggatgttttgtagttctagcccttggagttgcctctttgcaaatgatagatattagcttaatttaccatgtcattcgtggtcagggcacaatcaagctttatgtcgtatacaacgtactagagatctttgacaaactctgtcaatcattcggtgaggatgtgctgcaagttctgttcaactcagctgaggggttgtcagcatgctcgacagataatgtgacatttgaactgatgcggttcattttggatgaggctatagccgttgttgcatttgatatccttttctgcagattgcatcagttaattttcttgctagtcactgtaggttaagttagttgagttctaatctgtcagtagttaatttccctttaaatgttaggtgtaatttgaattagaactagataagatcatagacacctgactgcctaatgataaaggtcacacacagatctggtggtgaatctagtgattgcaatagcaaaattttcaattgaatatacagtggtatggatttgcttgacatcaatgagctctaattacattgtaaaatttaattgtattatcaatactgttgctattataatataaacatcgaattttgaatcccttaataagttatacttgtccattcatttgtcttgttagctcaggcgatcaccctgtcaacatgcattattgcccacaataatgcattattggctctactggtatcaaacaattttgctgagattaaaagtaatgtatttaagcgtgttagcaaagagaatcttcataatttggtatactatgacatcattgagcgatttcacatcatggcctttctgctatttgttcttgctcaaaatatcttggaagcagagggcccatggtttgacagctttcttattattttgaatgacaaacctgatgaccgtcagaaggacctaacattcatcccacttgccccagcttgtgttgtaattcgtgtattgaccccagtatatgctaccctccttcctgctggcccttttatctggagaatattctggattttactttggtcagttctgacctattttatgctcgccatattcaagataatcgtgggattgatactgcgctgccttgcaaattggtatgtaaatctacggctcacaagaaaacaacacgtggattgagtacatggcaccacaattctgctgctatcgttacatctgtgagtagaaattttgctgtggtgcatgaagtgcagcaagcactgcagctgctgagagttatatgacagaagtattcatagtatagtacagcgcagatgaatattatagtctcttcttccaagggttttgtcgattcgaggaacagattagtcaaattttgtggtgtttagacttctgacctccgtttgtgcatagctcagcttcatccaaaactatctgctgtcacctaaccaagatgttctggtctgtgatgtaagacatgtttatacattttttttaaaaaagaaacaaactgtactttcgtgttcagcagaagctcgataaggttgttcgcgttgcgtctgtttttgtgtgctattccctggtgcatgtcttccagataagata

SEQ ID NO: 47815 - DNA, 2621 bp, Zea Mays
cgaccggaaaaggacattgttcttttctgcgcccctactccacccgccgcctccgctcctcgccgccgcgcggcgcggcgacgtgcaatcttagggttcgtgagagggttcccgaatcctccttgccgtgcaccacaccgtccccctccaccgacgccgctgcttcccatgtcgctccgatccggcggccgccagctatctttcgagcttctcgcgggcgacctcaccgccgacgacccggacgacatctccccgcgctccctgcccgatacatcgtccgatgggcagcgccggcgcaggaggcggtctaagcgcaagcgtgggttccggagccccccgatccaggaggcggtttcggagggggagcagcagccgcgcgtggagggcggcggcaactcggccgcggcgttcagggtcctggatctgaagtcgactgcggagacggtgtgcgagagctcggacgcggaaaggtctgcggcgagctgcgtgacctatgttggcgtggagctgaggcagaggagcgtctccgggggcgggagggtggtggcagcgtccgcggatgatgggaccagcagctgcggaagcagcacgcgggagagcgccgcagctgctgcggctgtggcggatgtggcagccatggcgtggcggcctgaggcaaatggcggcatgaagaagaagctggagaaggagtcgtcgctggactgggagaagtacatgaaggacaataacaaaattctcggagaatttgagcgccttgacaaatcaccattcagatactttcttggggaactatatggtggcaattcactgagaagcacaattgcagtgggcaatgagaagaagcggcagcgggtgtacaacactatgtttcatgtcccatggagatgtgaacggctaattgtcgcaggattcttcgtctgcttggattcctttctgtcattgcttacaattatgcctgcacgaattgtcgttaccatctggcgggtgatgaagaccaggaagttccggcggccaaatgctgctgatttatcagattatggatgttttgtagttctagcccttggagttgcctctttgcaaatgatagatattagcttaatttaccatgtcattcgtggtcagggcacaatcaagctttatgtcgtatacaacgtactagagatctttgacaaactctgtcaatcattcggtgaggatgtgctgcaagttctgttcaactcagctgaggggttgtcagcatgctcgacagataatgtgacatttgaactgatgcggttcattttggatgaggctatagccgttgttgcatttgatatccttttctgcagattgcatcagttaattttcttgctagtcactgtaggttaagttagttgagttctaatctgtcagtagttaatttccctttaaatgttaggtgtaatttgaattagaactagataagatcatagacacctgactgcctaatgataaaggtcacacacagatctggtggtgaatctagtgattgcaatagcaaaattttcaattgaatatacagtggtatggatttgcttgacatcaatgagctctaattacattgtaaaatttaattgtattatcaatactgttgctattataatataaacatcgaattttgaatcccttaataagttatacttgtccattcatttgtcttgttagctcaggcgatcaccctgtcaacatgcattattgcccacaataatgcattattggctctactggtatcaaacaattttgctgagattaaaagtaatgtatttaagcgtgttagcaaagagaatcttcataatttggtatactatgacatcattgagcgatttcacatcatggcctttctgctatttgttcttgctcaaaatatcttggaagcagagggcccatggtttgacagctttcttattattttgaatgacaaacctgatgaccgtcagaaggacctaacattcatcccacttgccccagcttgtgttgtaattcgtgtattgaccccagtatatgctaccctccttcctgctggcccttttatctggagaatattctggattttactttggtcagttctgacctattttatgctcgccatattcaagataatcgtgggattgatactgcgctgccttgcaaattggtatgtaaatctacggctcacaagaaaacaacacgtggattgagtacatggcaccacaattctgctgctatcgttacatctgtgagtagaaattttgctgtggtgcatgaagtgcagcaagcactgcagctgctgagagttatatgacagaagtattcatagtatagtacagcgcagatgaatattatagtctcttcttccaagggttttgtcgattcgaggaacagattagtcaaattttgtggtgtttagacttctgacctccgtttgtgcatagctcagcttcatccaaaactatctgctgtcacctaaccaagatgttctggtctgtgatgtaagacatgtttatacattttttttaaaaaagaaacaaactgtactttcgtgttcagcagaagctcgataaggttgttcgcgttgcgtctgtttttgtgtgctattccctggtgcatgtcttccagataagata

SEQ ID NO: 47816 - DNA, 1663 bp, Zea Mays
tctcactgttcactaatttgagcgccttgacaaatcaccattcagatactttcttggggaactatatggtggcaattcactgagaagcacaattgcagtgggcaatgagaagaagcggcagcgggtgtacaacactatgtttcatgtcccatggagatgtgaacgggattcttcgtctgcttggattcctttctgtcattgcttacaattatgcctgcacgaattgtcgttaccatctggcgggtgatgaagaccaggaagttccggcggccaaatgctgctgatttatcagattatggatgttttgtagttctagcccttggagttgcctctttgcaaatgataggtcccccccccccaaccgttttttgttgaacaagtggccatcctacgtatttgttaatcggcctacgattgtttttttttggtgtcagatattagcttaatttaccatgtcattcgtggtcagggcacaatcaagctttatgtcgtatacaacgtactagagatctttgacaaactctgtcaatcattcggtgaggatgtgctgcaagttctgttcaactcagctgaggggttgtcagcatgctcgacagataatgtgacatttgaactgatgcggttcattttggatgaggctatagccgttgttgcatttgttgtccattcatttgtcttgttagctcaggcgatcaccctgtcaacatgcattattgcccacaataatgcattattggctctactggtatcaaacaattttgctgagattaaaagtaatgtatttaagcgtgttagcaaagagaatcttcataatttggtatactatgacatcattgagcgatttcacatcatggcctttctgctatttgttcttgctcaaaatatcttggaagcagagggcccatggtttgacagctttcttattccagttgcatattcagaatttttggaagatctttgcaagcagattttgaatgacaaacctgatgaccgtcagaaggacctaacattcatcccacttgccccagcttgtgttgtaattcgtgtattgaccccagtatatgctaccctccttcctgctggcccttttatctggagaatattctggattttactttggtcagttctgacctattttatgctcgccatattcaagataatcgtgggattgatactgcgctgccttgcaaattggtatgtaaatctacggctcacaagaaaacaacacgtggattgagtacatggcaccacaattctgctgctatcgttacatctgtgagtagaaattttgctgtggtgcatgaagtgcagcaagcactgcagctgctgagagttatatgacagaagtattcatagtatagtacagcgcagatgaatattatagtctcttcttccaagggttttgtcgattcgaggaacagattagtcaaattttgtggtgtttagacttctgacctccgtttgtgcatagctcagcttcatccaaaactatctgctgtcacctaaccaagatgttctggtctgtgatgtaagacatgtttatacattttttttaaaaaagaaacaaactgtactttcgtgttcagcagaagctcgataaggttgttcgcgttgcgtctgtttttgtgtgctattccctggtgcatgtcttccagataagata

SEQ ID NO: 47817 - DNA, 965 bp, Zea Mays
acaaaaactgaaccatcttcaaacagctttgtgtacatttttatcaatacatcattgagcgatttcacatcatggcctttctgctatttgttcttgctcaaaatatcttggaagcagagggcccatggtttgacagctttcttattaatgcgtcattggtttttttgtgtgaagtacttatcgatgctatcaaacattctttccttgcaaaatttaatgagataaagccagttgcatattcagaatttttggaagatctttgcaagcagattttgaatgacaaacctgatgaccgtcagaaggacctaacattcatcccacttgccccagcttgtgttgtaattcgtgtattgaccccagtatatgctaccctccttcctgctggcccttttatctggagaatattctggattttactttggtcagttctgacctattttatgctcgccatattcaagataatcgtgggattgatactgcgctgccttgcaaattggtatgtaaatctacggctcacaagaaaacaacacgtggattgagtacatggcaccacaattctgctgctatcgttacatctgtgagtagaaattttgctgtggtgcatgaagtgcagcaagcactgcagctgctgagagttatatgacagaagtattcatagtatagtacagcgcagatgaatattatagtctcttcttccaagggttttgtcgattcgaggaacagattagtcaaattttgtggtgtttagacttctgacctccgtttgtgcatagctcagcttcatccaaaactatctgctgtcacctaaccaagatgttctggtctgtgatgtaagacatgtttatacattttttttaaaaaagaaacaaactgtactttcgtgttcagcagaagctcgataaggttgttcgcgttgcgtctgtttttgtgtgctattccctggtgcatgtcttccagataagata

SEQ ID NO: 47818 - DNA, 756 bp, Zea Mays
tgataaaataattgatagctaagcaataattaggtagctgttcatcttcaaaaataaaagattttgaatgacaaacctgatgaccgtcagaaggacctaacattcatcccacttgccccagcttgtgttgtaattcgtgtattgaccccagtatatgctaccctccttcctgctggcccttttatctggagaatattctggattttactttggtcagttctgacctattttatgctcgccatattcaagataatcgtgggattgatactgcgctgccttgcaaattggtatgtaaatctacggctcacaagaaaacaacacgtggattgagtacatggcaccacaattctgctgctatcgttacatctgtgagtagaaattttgctgtggtgcatgaagtgcagcaagcactgcagctgctgagagttatatgacagaagtattcatagtatagtacagcgcagatgaatattatagtctcttcttccaagggttttgtcgattcgaggaacagattagtcaaattttgtggtgtttagacttctgacctccgtttgtgcatagctcagcttcatccaaaactatctgctgtcacctaaccaagatgttctggtctgtgatgtaagacatgtttatacattttttttaaaaaagaaacaaactgtactttcgtgttcagcagaagctcgataaggttgttcgcgttgcgtctgtttttgtgtgctattccctggtgcatgtcttccagataagata

SEQ ID NO: 47819 - DNA, 2744 bp, Zea Mays
aggatatgttcccatccctctgaccgaccaccctcccaaggtcgagggctcctgtatctttaccgtctccaatcgatcccatctcctcgccatcgccgccgccatggcgttcctagcgcgggctctccgccagtccaattcgcgtctgtcgtcgtgcccctccgtcgccgcgtcctgccgctggatctcccggaccgccgccgcgggatcgccggaggccggcgcggcggtggcgccggctgacccggagttgcctccaccccgggagcctgttggcggcgcccgcgtggagcttcctcccaacccggaggacgcgctcgaggtgttcgtggatggccacgcggtgcggatccccaaagggttcaccgtgctacaggcctgcgaggtcgccggcgtcgacatcccgcgtttctgctaccatagccgactctccatcgctgggaactgccgtatgtgcctcgttgaggtcgagaagtcgcctaagcccgttgcatcttgtgccatgcccgcgctgccagggatgaaaatcaagacaaacaccccagtggcgaagaaggcgagggagggtgtcatggagttcttgctgatgaaccatccactggactgcccaatctgtgatcagggtggggagtgcgacctccaggatcagtctatggcatttggtgctgaccgcggtcggttcactgagatgaagcggtcagttgtggacaagaatctgggtcccttggttaagacagtgatgactcgttgcatccaatgtacaagatgtgtcaggtttgctactgaggttgctggtgttcaagaccttggtatgttaggtcgtggcagtggtgaagaaattggaacatatgttgagaaacttatgacaagtgaactatctggaaatgttattgatatctgccctgttggggctcttacatccaagccatttgcatttaaagctaggaactgggaactgaaaggcaccgagaccattgatgttactgatgcagtggggtccaacataagagttgacagcagaggacctgaagttatgcgcattgttccacgcctcaatgaggacattaatgaggaatggatttcggacaaaacacggttttgttatgatggtctgaagaggcaaagactaaatgaccctatgatccgtggtcctgatggcaggtttaaggctgtgacgtggcgtgatgctcttgcagttgttgctgaggttttgcaccaagttaaaccagaagaaataactggagttgctggaaagctttctgatgcagaatccatgatggcactgaaagattttgttaacagaatgggttcagataaggtgctgtgtgagggaaatggtcctaatcctccagcagatctgcgatctaactacctaatgaatacgagcattgctgggcttgaaaaggctgatgtcttccttttggttggcactcaggaccacagacccttgttgagattacagagggtcgtcatcctttctgttcagtactgcaatctgccaagaaccctgtcatcattgctggagctggattatttgaacgggaagaccaagatgccctattctcaatgattgagactgtagccaagaggttcaatgtgactagaccagactggaatggccttaatgtcctgttgctccatgctgcacaggctgcagctcttgatcttgggcttgttgctaatcctgccgagagcatcaagtcagcaaagttcttgtatctgatgggagctgatgatataagcctggacaagcttccagacgatgcatttgttgtttatcagggacaccatggagacaaggctgtctatagggccaacgttatcctgccatcttcagcattcagtgagaaggaaggcacctacgagaatactgaaggatgcacccagtggaccattccagccgttcctacggttggtgatgctagggatgactggaagatcatccgtgctctttctgaggttgctggggctctactgccttacgacagtctctcagctgtgagggaccggatcagtacggtcgcacctaatctagtacatgtagacgagagggagccatccacaatctccgtcgaggtgaagccgcctgtaaagcaaaaggtcagctcgacgccattcaaaactgtggtggagaacttctacatgactgatgcaatcactcgagcttcgaagattatggcccaatgcagtgcgacattgctgaagaagtgagatttgcacccttcgagctaatcttcagcaaacaacttcttagttccctccctttttttttttacttgctacgagtttcgccaccgttgcttgttttcttgggaggttttggtgtataatttggactgcctctagattttcttcagagcagcaaaacctgatcagtacatctccgtgctgtgtatgagaagcagagcatactcaataagcttgttgccccaactgaatcatcatacaagtgacacaaacacatgattttgccttcaaatactcgccccttatgtttgtttgtaatgtgcaacttgccaaaagatagcaatctaaatcattgcttggttaggttgttaaaaggatattgcatggttatgttgttagtgcgattcaggcggttaatagtcttggtattgtgtttcctaacaaaaaattcacagctcttagtttcttaccttgttgcaacatctataaagtctgagagaacttaaattttgttaacgagagtttgacagccgagaccgagaccgctcgcagattac

SEQ ID NO: 47820 - DNA, 1291 bp, Zea Mays
ctcgaacacgcaggagaactgcgcatcattatattgaaagagagaaaggtccgaaatggaccaaagtacaaagccatatcaggcaaaaataaatagaaaataaaacagtgcagcctcatgcactaggaaaagctctagcccccctagcaaatgcagccagaagcccaagactctcgagctgcttcgcaccagccatacaccagcactccacctcatccaagaaaagcctctgaatggtgcttaatgacgggttgacaccatcaaatactgccttattgcgatgcagccataaacactaggcccccaggataatgagactatggaaaccttttctgatatgtttggggaccctcctatacaccttgccccaccaatccacaaaagagcccgcctccctagtaggcgtaagatgtcccatcctcaaagctgaaaatataacatgacaaaattgtctagcgaaactgcaagagcacaagaggtgcaagatagtttcctgctcttgatcacatagtggacagaccaccgggtgaggtaatcctttcctctgaagtctatccgcagtccaacatttattccttatcgccagccaaacaaaaaatttgcatttggggggtgcccacgacttccacacccatttccatggctggaaagtaatagctcccataaacaacgccgaataacaagatttggaagagaaaacaccagagctcgagtgcacccacacatgtctgtcttcctcctgattaagcaccactccacttaaagcatcccacagctgcaaatactgatgtaggccaatcaaagataaaggattcgtgatatcgcgaacccattgccaattatagcactggaactcaaaagtgtttggtttgtacatacaaaacacaattttaaatatcataatttacctaaaaccgtggtatttttggagttttcaaaactccactcaggacctcagttctctcctcttctctctctatatactttgtttttccagtggaaccaaacagatctcggttttgagcgatactgtgattttactggtataataatattgtagtatttgtgtcatgtacaattgtaaacaatggtatatcaaaactataatatttcaaaattgcattcccaacaagcccatgatatttttagaatttttagacaataccatggttttttaagataccatgatactttatataatgagatgttttttgtgttacagaatattttgtttgcaaaaccatagtattgtgaataccatggtatttttagagttcaacccaaagttttc

SEQ ID NO: 47821 - DNA, 5334 bp, Zea Mays
cggcagcgacggatccagccgggaagacgcgatccaaccaaagggacggtagatcgagccggaaaggtcgcagcaacgtggatccggccgggaaggccacgacaacgacggatctagcgaaggcgatgaagggggtgggcggcggtgcgggtccagccgggcaggggtctgcaccggacctggcaagggatgttgatggcaccaatgacggaagaagcgtgggcagttaggaggtggtcagcgcgatgaggaggggtggcacgtgcgagggacccagcgaagaggagggtgcacgtgcgagggacccagcgaagaggaggacgccgaccaagggaggcagccatggggaacagggaaccgagcagaggggctgctcgcgccctgccccatctcgacgcgcgggaaatggggctcaggcgtcgagcatcatggatccaagcttggctggcgacctaggagaggtagcagcagtgggaagccagctggagatcgcggccgccatgggggctggaggcagagcgtcgtgcgtccgggggcttgtgcccgctgagcaaggagccagacgaccagagaggaagcagagagaggaagagcagcgactgttgtggaggaaacagggagaagaagatgggggtgtcggcttcttgaggagagggatgacggccaagctctccaccagcgccgacgcctcggcctcggtgcggctctccgcagcagtgcaggcggctgcgatccagccctcctccccacgcttcttctgctcctcgctagccggaactaacccgacctcccccgcatcgccattgcctgaggctgggcgcgagcaggatggggtgggtgaggagggagtgcgcgagcacggcgaaggagagcgggaagacgaggcaggcggtgagcagcgcgaaggggcgcggagccgcgcgccggatcgacgccgagacgcggaccagctccgctgcgcccagcgccgtgaggtcgctcgacgctaggtccatcgccgccggcgggatgctgcttgtgtcggccgacccggttggttcagggggcagaggatgaactccatggctgcgcgcgcggccgccctagccttcgcggcgacggtggcggatctggaccgcggctggggtgtggccgcccctgggagggaaggatgagcctcccggggggcggcggcggctggtggctggtgtgtcgactggcggctaatgtgggttgggaacactaacctagtctgataccatgtaggaatatgaaagtggatgttgtattgataatagatgagatacaatatatatagagactcaaccctaaccctaatgggtcggcagcccaacagtggtgccggccccacgcacactcacacacacagtctaacactgacaatgatagatggaatagctgaatgagaggggagtaagaaagagatgttaccggcgttgttggtgttgaggtcgagacaccaaggtcggtcacccattcagtaatggcagcgggtggattcaaagcagtgttaacataacggtagacgaacggcgaggctctgtttagtgtttagacgtgtttaaacagaattaaacggtctacacggttttctaatatagcaacgtttcaacaagagtagatcagtaaatccacatatatttggtttagcgatattgtgatatatataaccatacatatgtaagcatacaaacatgcatacatatatatatgtatagagagagagagaaacaaaacagcgtaaatgggtatgaattttagtgtaaatcattgatctatttcataacgaaaacatgtatggaaacaaaaaaactgatttaaatgctttattttctccataaatataggatctctccaacatccatgcatcaaggctcgttagaaccagtttatgttatacactgatactaattatactacacggtgaagtaatttatgcactacggtaaactgcgtaaaaaatttgttttctactgcatgtgcacaaatttaggatggcaagaatatgagttgaaaatgaaatggatcggcatacgcgagatttatggaatcgtggcaaatgacctcatttcttagagcgattacctttttctaaatttctattttgttgcgtaaatgtgtgggtcgtaaatatatcttatacatatggcataaatggtaggaactcaatacacactggattaaataaacgagataatgcataaaatcaataaaccgtttgcgtaaaatgtgaacagaaatatcataaacagacaaatagacggaagcggagccatgaactgaaatataggtcgtaaaaacctattgacattagcataaatatgcatacaaaatagcataaaatagaaccaccgccctgcggaactgtcgcctcacatctgggatgcgccaccacttcgtgcctagggaaggctgtcgtcgtcgctcgcgcctagggaagtccgccatcgccgctcccaccttggatggcatcgcagtcgtacgcgctcaaggatcgaccctcgtgcgcgtgcatcccgagttccgtcgcatcagccgctcccacctcgccgtcatgcacgcattaggggtgctgtcgttgctcgcgtgcccccgagatccgtcgtcgcgccgtcgcagccgctcccacctcaccgtcgtgcgcaactcaaggggtcgttgtcgcgtgcacctcaggtagacgttgtcacgctcgtgccccccaggatccaccgtcgtggccgctgccacctcaccgtcgtgcgcacctcatggggccggtgccgcgtgcgtgccctcgggatctgatgccgcagccgctcccacctcgccgtcgtgcgcgcctcaggggggccatcgtcgcgcgttggcctcagggatccgccgccgcgagcgtgtcccccggctccaccgttgcgagcgtgtcccctagatcagcactcgcgcgcttgctcccaggatccgccgccgcgcgcgcctctcgggggagggggtgtaaatgttggcgtcgataaaactgaaccctagcgatctggagcttcttttatagacgcttcgaacctggtgcggttgaaccggttggcaacatcgggtcagggcttatatatataaccattgtttacatatcttactgattgtaacatataaacagtttaatggtacatcacaaattttccatatcaacaaaacggtacattaaaaagtgtaaacagcgtttaaaaccgtttaattcagccgttttggctatttaaaccgtcagttgaccgtctagacgggtcagccatttagagggtcgtctaggccctaaactgtgcagtgttcctccgttcaccgtttaaaccggtttaaacgactgtttaatgtcgtttaggataacactgattcagagtcatagtgttgaaagagttagcaagtgactgttaatcccagctaattgtcttcatgagtcacatccagccacatggcgatgttgtccatccacgggttgtagagagttggctagagagcgttactcctaccatgccatttcttcttggcagatcctgaggtgggattgggctgccctccggtcctagaggagagtagtagagtagagataagagctagggcagctagtgtgggagtggcgatgaaggtggtcggagcagcaacaaggctggtgccagtgatgttgagctcctccagaacaagatcatcctagaccttgaggaaggacttgaatggatgatggccccaacatgctcaaacttcttatttagtccctagaagatgttgaggacgacgatcaggttgttgacggaggtgcccaagccacaaagtcgaccatccccttcaacttgcagcaatagtcgctggcaaggaggtcgccctagacgaaggtgcaaaaggtggtgtcgagttggagggtgcgggtttcacaatcccaagaaactaattctcgagaacaagccaaaggtggcatgttgtgacatctagctccctggcgattcatcgcaactcgggagagatggtgtggagatccaacttccagcagttgatgacgttgttcatccaatcccaacgtgaatttgtggctggcaaagggtgacaagacgtggtcgatgagggcgtatcacttgagagcaagcaacacttgatcacgccagttggcgtaattgtcggaggcggacatgatgacgactgtcaccaatgatcgaatgtctgctcaagggaaagcgacaacggccttctcctgctcgaggagaagggtgactgctgggacgtgaacgagtgcattggcaacctccttttctgcagcctgggccatggtgagcatgacctcaatcttcttgtgaaaggtcacgacctcctattcagcatgggtgtgctcctcgttagtcgatgagatctgcgccacgagtgcaggagcagaggcagccctaaaggggtgacaggaatgagcgaaagtgagattagactcatggtaccatgttagaggaggtactaccacagaattagattgtattacattaaaccctatatgctaattatatatagtgcataggaccaacaccctacgttagcaggcaatgcagtacaattcacgtgcacacaagcgcacgacggggtgagcctagccgattgttataagaccggctaatactgacactcccatcgtggtttttgttgttgctatttgctaataacacagaaaaaacaaataaaaccaggtacaaattctcaagaccctaaatcatgctgctgttcacaagtctagcttgttgagcgttgagattctaacgaaattgagctcctataaacttgtgggatcaagtttcacggtacgctaaaaagcaaccacttcaaggtttcagcactctagtaccaacaataataaataacaagtccaaagtggaaaatatcctgcaacgtctattctcctcagagaaagcgtgacaagaacgtatcgaagccaaagtggagaattaaagggaatgcccgagtacctatccccatgattctggggatccaagcatcgcgttgaaacccggtgaacaacataacacgatagtaccgaggtaaccacccaaattctcaagatatgacactgaacaatgtcatgggtgagtgcaaatctatccacaaacacgagtggcaactgaaacatctaaaccacatgtacaagaaatgatgatgttttctgggaataaaaatgcacaagccacgtccatgaccatgaacacaagccaaccaaacaaaggtgacgaggtcggggtaagtaaactagggctgcacatcgacgtcgattaccggctgcaggtcctcgcgcttgatccagatgttgaccccgaggcggtgggagagcttggaggcgag

SEQ ID NO: 47822 - DNA, 3400 bp, Zea Mays
catccgacgcaccccgcccctaaaccccagccgcatcagcgccaccagcctcattcgtcctcctcgccccatccgcatccgccgccagcagccgaatgcctcacaggccgacctcccgccccatccgcatccgccacatgccacacatgtccaacaccgccagcctcatccgggagccgtgagcaacctcccactccccaccaacgcgccttcgcctcacctcgcgatgcccgagacctgcaatagtcaccgccttcccctgagcggctgagatgcagctccacgcccgtctgcgtccccccaccgcaagagccacgttgtgcctgccgccagccccgacacctccagatgttgcctctatccatcatccgagcttgccgcccccgcccccaaacccagaccccctgcaatcgcgaggaaggggaggacgctgttgcgcgtcgctaagcatcttcgcgcccctcagtgctgctaaggagccctatctatccctgatggcgccccaaccctttgtaatatctccacctcggccatgggcattgcaaccctcgattcaatctctcctcttcgatctcagtatttaagaatttgaatgagatttaggagcaattgaagccattggacattggttgcacaacttgataaagtgaataatctgcttgcgtctgagtttgggagtctataaacatggggaagagcaaatattggtgcctttgtaattggtgaccctgctacaactatttttttctatgaattcacaagggcaatatggtacaccaatgccatacattggacagacaacaataagacttccatataccttcttggttgtatatcttacatatttatcccaaaatgaacttttaaatcatattaatccattatctgcacataagttctcttcacttccctactacccatcaaaaaaagaaaaacgccttgaattgaattagaagttttcacatttgtaccttttgataaatgatattatggtatctccataaaaaagttctcactaatgcatttatttgtttaacatggagtcaccacaaatgtgcttatcttgttgcactttacattataggcatacctttccttgtacagtgagatatctatttcatttttcaggttgaagttgatcttttgaattatggtgtgatagaaggtgatgaatcatgtaaacatttttctgaactaaaagtcttacctccatggatgatcaaagatggcacgaatcttaaaaaggaacaaagaggagagaaaattgagtcacaaaaacttgaaaaatatgaagccagagatgacaagaaacatgactcgaaatatgatcaaagtgtataggaagaatacataaatgcatattatgaggctttgaggaaaaaattggaagaggaagaagcaaaaaagcagaatgtagcatgaaggcaagatttttgtccctgatgctcaaagggaacgccaagttggtaagaaatacaagcacgatgatgatggtgaaggcattgaataggaagagcatcaacctacagttgtagcatttaactcaaaagtttcccttgaaattcaagttgattttgagaagtatgaagggatgattgagttcatggagaaggtggtaatacaattgattctatggagctcactggaggagcactaccttttgttagttgcctgcaagaatgtctttggaatccgatctgcttcatggtgcatcttatcctcgattgagtacatggaagaaggttgtgtcaacatggattgtgtcactctcatcgaggactaccataacaagattgaatttgaactcaataagatctatgatggaatcctcaagctctttgcttcccaccttcccccctcactaacagttccaaagtccaaggtcttctacctcaagatgaagggtgattactacaggtaccttgcggagtttgaaacttgatataggagaaaagatgcagccaagaataccatggtggcacacaaaattgctcggttaatttgcttatccttaaattcacggttctcgtattaaatttgctggctaggacattaacctttttatatgtacaatcgatcatttaattgatgtgtttctaaatgaaccaaacaatgagtggcatgctggcacttgaggggatcagtggcgacaataagaggagggttagcattgccctgcagatactcatgaggcctcgactgctcttcctagacgagcccaccaatggtcttaacaggcaacataacttctggcaagacacctcttaactgggatttaaggtcaagcattgctctagctgcagcccgtggtgttgagtacatccactcaacgagttcaacggcttcccacggtaacatcaagtcatccaatgtcctcctgggcgaatcgtatcaagcacacgtatcagacaatggccttaccgctcttgttggtccatcgtcttcaccgtctcgcgccactggataccgtgcacccgaggttattgatccccggagggtttcccagaaggcagacgtgtacagcttcggtgttctgttgcttgagctggtcacaggcaaggcccccagccaggccgctctcaacgacgagggcgtcaacctgcccagatgggtgcagtcagttagtcgctccgaatggggttcggaggtgttcgatattgagctcatgagacacgaggctggcgaggagccgatggctcagcttgtgctgcttgctctggactgcgtagcgcaagtcccagaggcccggccctcaatggggcatgttgttacgcggatagaggagatcaggaagtcaagcttgaccacaaacatggaggaagaagttgatgatcaatcttccaaggctgaatccgaggtgccgaccaatccgttcgcttcttgatctcagtcgacctaaaagagaatcagctataactctagcctgcatccaatcgatcttagaccgagtcgactctttttttcatcttttagcgtacatgatttaacgggtaacttgattgtcaaaagtagcacgggtgcacggcatccggtgctgctgagtttgaccggtggcggtgtgcttagggaccagttctaaagtgattgctaaattgctgtgctcattctagccttgattagtgctgctgctgctgtcattcagctacccatgtgtaattactgagccccatgtagtgtttggaatttctttttggctggatcagtctctcgtttgatctgctcaagttgcttgccgatatgtttgtcgtggggggcattctttttggggaagtctggtggtctactgtcaacaacgactggtgctacggtggcagctgctcgatggcggcgttgtcatcagtccgcgaaataccttaataccaccttatgagccgtactagcggtggtatgtgaatatgtt

SEQ ID NO: 47823 - DNA, 1924 bp, Zea Mays
cccgcccctaaaccccagccgcatcagcgccaccagcctcattcgtcctcctcgccccatccgcatccgccgccagcagccgaatgcctcacaggccgacctcccgccccatccgcatccgccacatgccacacatgtccaacaccgccagcctcatccgggagccgtgagcaacctcccactccccaccaacgcgccttcgcctcacctcgcgatgcccgagacctgcaatagtcaccgccttcccctgagcggctgagatgcagctccacgcccgtctgcgtccccccaccgcaagagccacgttgtgcctgccgccagccccgacacctccagatgttgcctctatccatcatccgagcttgccgcccccgcccccaaacccagaccccctgcaatcgcgaggaaggggaggacgctgttgcgcgtcgctaagcatcttcgcgcccctcagtgctgctaaggagccctatctatccctgatggcgccccaaccctttgttgaagttgatcttttgaattatggtgtgatagaaggtgatgaatcatgtaaacatttttctgaactaaaagtcttacctccatggatgatcaaagatggcacgaatcttaaaaaggaacaaagaggagagaaaattgagtcacaaaaacttgaaaaatatgaagccagagatgacaagaaacatgactcgaaatatgatcaaagtgtataggaagaatacataaatgcatattatgaggctttgaggaaaaaattggaagaggaagaagcaaaaaagcagaatgtagcatgaaggcaagatttttgtccctgatgctcaaagggaacgccaagttggtaagaaatacaagcacgatgatgatggtgaaggcattgaataggaagagcatcaacctacagttgtagcatttaactcaaaagtttcccttgaaattcaagttgattttgagaagtatgaagggatgattgagttcatggagaaggtggtaatacaattgattctatggagctcactggaggagcactaccttttgttagttgcctgcaagaatgtctttggaatccgatctgcttcatggtgcatcttatcctcgattgagtacatggaagaaggttgtgtcaacatggattgtgtcactctcatcgaggactaccataacaagattgaatttgaactcaataagatctatgatggaatcctcaagctctttgcttcccaccttcccccctcactaacagttccaaagtccaaggtcttctacctcaagatgaagggtgattactacaggtaccttgcggagtttgaaacttgatataggagaaaagatgcagccaagaataccatggtggcacacaaaattgctcggttaatttgcttatccttaaattcacggttctcgtattaaatttgctggctaggacattaacctttttatatgtacaatcgatcatttaattgatgtgtttctaaatgaaccaaacaatgagtggcatgctggcacttgaggggatcagtggcgacaataagaggagggttagcattgccctgcagatactcatgaggcctcgactgctcttcctagacgagcccaccaatggtcttaacaggtacgcgcttgcttctgtttcatgcctatcatatgggtgcgatgcccaagtcacaactgatgcaaccaagaaaacacgcaaaaatgtggagtgcttcggcgttcttcatggcagatgttgcgggggctgtcagctagtaaaattttagagttttatgatcctcatagcctagcatctaaacaaagtattcaaacaataaggtagaccaagcatttgcctctatatggtcaaactaatccacttttccatcaacataggtcctaacgtaaccataacccacaaaaaaaacccttatgacgaacctctacactaaac

SEQ ID NO: 47824 - DNA, 1901 bp, Zea Mays
aaaccccagccgcatcagcgccaccagcctcattcgtcctcctcgccccatccgcatccgccgccagcagccgaatgcctcacaggccgacctcccgccccatccgcatccgccacatgccacacatgtccaacaccgccagcctcatccgggagccgtgagcaacctcccactccccaccaacgcgccttcgcctcacctcgcgatgcccgagacctgcaatagtcaccgccttcccctgagcggctgagatgcagctccacgcccgtctgcgtccccccaccgcaagagccacgttgtgcctgccgccagccccgacacctccagatgttgcctctatccatcatccgagcttgccgcccccgcccccaaacccagaccccctgcaatcgcgaggaaggggaggacgctgttgcgcgtcgctaagcatcttcgcgcccctcagtgctgctaaggagccctatctatccctgatggcgccccaaccctttgttgaagttgatcttttgaattatggtgtgatagaaggtgatgaatcatgtaaacatttttctgaactaaaagtcttacctccatggatgatcaaagatggcacgaatcttaaaaaggaacaaagaggagagaaaattgagtcacaaaaacttgaaaaatatgaagccagagatgacaagaaacatgactcgaaatatgatcaaagtgtataggaagaatacataaatgcatattatgaggctttgaggaaaaaattggaagaggaagaagcaaaaaagcagaatgtagcatgaaggcaagatttttgtccctgatgctcaaagggaacgccaagttggtaagaaatacaagcacgatgatgatggtgaaggcattgaataggaagagcatcaacctacagttgtagttgattttgagaagtatgaagggatgattgagttcatggagaaggtggtaatacaattgattctatggagctcactggaggagcactaccttttgttagttgcctgcaagaatgtctttggaatccgatctgcttcatggtgcatcttatcctcgattgagtacatggaagaaggttgtgtcaacatggattgtgtcactctcatcgaggactaccataacaagattgaatttgaactcaataagatctatgatggaatcctcaagctctttgcttcccaccttcccccctcactaacagttccaaagtccaaggtcttctacctcaagatgaagggtgattactacagttcaattcatgtgtatcaggtaccttgcggagtttgaaacttgatataggagaaaagatgcagccaagaataccatggtggcacacaaaattgctcggttaatttgcttatccttaaattcacggttctcgtattaaatttgctggctaggacattaacctttttatatgtacaatcgatcatttaattgatgtgtttctaaatgaaccaaacaatgagtggcatgctggcacttgaggggatcagtggcgacaataagaggagggttagcattgccctgcagatactcatgaggcctcgactgctcttcctagacgagcccaccaatggtcttaacaggtacgcgcttgcttctgtttcatgcctatcatatgggtgcgatgcccaagtcacaactgatgcaaccaagaaaacacgcaaaaatgtggagtgcttcggcgttcttcatggcagatgttgcgggggctgtcagctagtaaaattttagagttttatgatcctcatagcctagcatctaaacaaagtattcaaacaataaggtagaccaagcatttgcctctatatggtcaaactaatccacttttccatcaacataggtcctaacgtaaccataacccacaaaaaaaacccttatgacgaacctctacactaaac

SEQ ID NO: 47825 - DNA, 1882 bp, Zea Mays
aaaccccagccgcatcagcgccaccagcctcattcgtcctcctcgccccatccgcatccgccgccagcagccgaatgcctcacaggccgacctcccgccccatccgcatccgccacatgccacacatgtccaacaccgccagcctcatccgggagccgtgagcaacctcccactccccaccaacgcgccttcgcctcacctcgcgatgcccgagacctgcaatagtcaccgccttcccctgagcggctgagatgcagctccacgcccgtctgcgtccccccaccgcaagagccacgttgtgcctgccgccagccccgacacctccagatgttgcctctatccatcatccgagcttgccgcccccgcccccaaacccagaccccctgcaatcgcgaggaaggggaggacgctgttgcgcgtcgctaagcatcttcgcgcccctcagtgctgctaaggagccctatctatccctgatggcgccccaaccctttgttgaagttgatcttttgaattatggtgtgatagaaggtgatgaatcatgtaaacatttttctgaactaaaagtcttacctccatggatgatcaaagatggcacgaatcttaaaaaggaacaaagaggagagaaaattgagtcacaaaaacttgaaaaatatgaagccagagatgacaagaaacatgactcgaaatatgatcaaagtgtataggaagaatacataaatgcatattatgaggctttgaggaaaaaattggaagaggaagaagcaaaaaagcagaatgtagcatgaaggcaagatttttgtccctgatgctcaaagggaacgccaagttggtaagaaatacaagcacgatgatgatggtgaaggcattgaataggaagagcatcaacctacagttgtagttgattttgagaagtatgaagggatgattgagttcatggagaaggtggtaatacaattgattctatggagctcactggaggagcactaccttttgttagttgcctgcaagaatgtctttggaatccgatctgcttcatggtgcatcttatcctcgattgagtacatggaagaaggttgtgtcaacatggattgtgtcactctcatcgaggactaccataacaagattgaatttgaactcaataagatctatgatggaatcctcaagctctttgcttcccaccttcccccctcactaacagttccaaagtccaaggtcttctacctcaagatgaagggtgattactacaggtaccttgcggagtttgaaacttgatataggagaaaagatgcagccaagaataccatggtggcacacaaaattgctcggttaatttgcttatccttaaattcacggttctcgtattaaatttgctggctaggacattaacctttttatatgtacaatcgatcatttaattgatgtgtttctaaatgaaccaaacaatgagtggcatgctggcacttgaggggatcagtggcgacaataagaggagggttagcattgccctgcagatactcatgaggcctcgactgctcttcctagacgagcccaccaatggtcttaacaggtacgcgcttgcttctgtttcatgcctatcatatgggtgcgatgcccaagtcacaactgatgcaaccaagaaaacacgcaaaaatgtggagtgcttcggcgttcttcatggcagatgttgcgggggctgtcagctagtaaaattttagagttttatgatcctcatagcctagcatctaaacaaagtattcaaacaataaggtagaccaagcatttgcctctatatggtcaaactaatccacttttccatcaacataggtcctaacgtaaccataacccacaaaaaaaacccttatgacgaacctctacactaaac

SEQ ID NO: 47826 - DNA, 1880 bp, Zea Mays
aaaccccagccgcatcagcgccaccagcctcattcgtcctcctcgccccatccgcatccgccgccagcagccgaatgcctcacaggccgacctcccgccccatccgcatccgccacatgccacacatgtccaacaccgccagcctcatccgggagccgtgagcaacctcccactccccaccaacgcgccttcgcctcacctcgcgatgcccgagacctgcaatagtcaccgccttcccctgagcggctgagatgcagctccacgcccgtctgcgtccccccaccgcaagagccacgttgtgcctgccgccagccccgacacctccagatgttgcctctatccatcatccgagcttgccgcccccgcccccaaacccagaccccctgcaatcgcgaggaaggggaggacgctgttgcgcgtcgctaagcatcttcgcgcccctcagtgctgctaaggagccctatctatccctgatggcgccccaaccctttgttgaagttgatcttttgaattatggtgtgatagaaggtgatgaatcatgtaaacatttttctgaactaaaagtcttacctccatggatgatcaaagatggcacgaatcttaaaaaggaacaaagaggagagaaaattgagtcacaaaaacttgaaaaatatgaagccagagatgacaagaaacatgactcgaaatatgatcaaagtgtataggaagaatacataaatgcatattatgaggctttgaggaaaaaattggaagaggaagaagcaaaaaagcagaatgtagcatgaaggcaagatttttgtccctgatgctcaaagggaacgccaagttggtaagaaatacaagcacgatgatgatggtgaaggcattgaataggaagagcatcaacctacagttgtagggatgattgagttcatggagaaggtggtaatacaattgattctatggagctcactggaggagcactaccttttgttagttgcctgcaagaatgtctttggaatccgatctgcttcatggtgcatcttatcctcgattgagtacatggaagaaggttgtgtcaacatggattgtgtcactctcatcgaggactaccataacaagattgaatttgaactcaataagatctatgatggaatcctcaagctctttgcttcccaccttcccccctcactaacagttccaaagtccaaggtcttctacctcaagatgaagggtgattactacagttcaattcatgtgtatcaggtaccttgcggagtttgaaacttgatataggagaaaagatgcagccaagaataccatggtggcacacaaaattgctcggttaatttgcttatccttaaattcacggttctcgtattaaatttgctggctaggacattaacctttttatatgtacaatcgatcatttaattgatgtgtttctaaatgaaccaaacaatgagtggcatgctggcacttgaggggatcagtggcgacaataagaggagggttagcattgccctgcagatactcatgaggcctcgactgctcttcctagacgagcccaccaatggtcttaacaggtacgcgcttgcttctgtttcatgcctatcatatgggtgcgatgcccaagtcacaactgatgcaaccaagaaaacacgcaaaaatgtggagtgcttcggcgttcttcatggcagatgttgcgggggctgtcagctagtaaaattttagagttttatgatcctcatagcctagcatctaaacaaagtattcaaacaataaggtagaccaagcatttgcctctatatggtcaaactaatccacttttccatcaacataggtcctaacgtaaccataacccacaaaaaaaacccttatgacgaacctctacactaaac

SEQ ID NO: 47827 - DNA, 2706 bp, Zea Mays
aaaccccagccgcatcagcgccaccagcctcattcgtcctcctcgccccatccgcatccgccgccagcagccgaatgcctcacaggccgacctcccgccccatccgcatccgccacatgccacacatgtccaacaccgccagcctcatccgggagccgtgagcaacctcccactccccaccaacgcgccttcgcctcacctcgcgatgcccgagacctgcaatagtcaccgccttcccctgagcggctgagatgcagctccacgcccgtctgcgtccccccaccgcaagagccacgttgtgcctgccgccagccccgacacctccagatgttgcctctatccatcatccgagcttgccgcccccgcccccaaacccagaccccctgcaatcgcgaggaaggggaggacgctgttgcgcgtcgctaagcatcttcgcgcccctcagtgctgctaaggagccctatctatccctgatggcgccccaaccctttgttgaagttgatcttttgaattatggtgtgatagaaggtgatgaatcatgtaaacatttttctgaactaaaagtcttacctccatggatgatcaaagatggcacgaatcttaaaaaggaacaaagaggagagaaaattgagtcacaaaaacttgaaaaatatgaagccagagatgacaagaaacatgactcgaaatatgatcaaagtgtataggaagaatacataaatgcatattatgaggctttgaggaaaaaattggaagaggaagaagcaaaaaagcagaatgtagcatgaaggcaagatttttgtccctgatgctcaaagggaacgccaagttggtaagaaatacaagcacgatgatgatggtgaaggcattgaataggaagagcatcaacctacagttgtaggtaattttgcttactcggatcttttaggttcaaccattttagtttctatattctataactgaaatgcacgtgttcataaaatttgaaattctgcgtatgttaagtttttcccaacctatcttcaaactatataagaattattatctaatataaatagtacattgacaataatgtacacagaaatccatgtatttaatgtgtggacatggtatcatcatgtctgactaaccctttttattttaattgaatgaagttcgtacatgtatgtgaggtattttttattttctttctactataagccttgcttagatactgatctaagagcatctccaagggacaaaccaaaaatcctggaggttctcacatgaatacggtttagataagggataaaccgaggaaaaccacataaaggctgcctcgaacctatgatttggtgacccagtgaaacaaacatctctcactactgcactaggcctgaaattgtttacgagcatcccaagggtcttacttaaattcactctctaaattttaatttgcgagccattttcataaaaatatgtttttataggttttttaccttctaacaatttttatgtatcttgtacgcactctagagaaccaacccactctctattctttatttactgtatgttatttaggtctgctaagcaaaaaattgatattcttcctcaatcttttaccatgtttagataattttggggggttttaggataaagtttgtgaagggcttcacttttttgtttgtaattagcatttaactcaaaagtttcccttgaaattcaagttgattttgagaagtatgaagggatgattgagttcatggagaaggtggtaatacaattgattctatggagctcactggaggagcactaccttttgttagttgcctgcaagaatgtctttggaatccgatctgcttcatggtgcatcttatcctcgattgagtacatggaagaaggttgtgtcaacatggattgtgtcactctcatcgaggactaccataacaagattgaatttgaactcaataagatctatgatggaatcctcaagctctttgcttcccaccttcccccctcactaacagttccaaagtccaaggtcttctacctcaagatgaagggtgattactacagttcaattcatgtgtatcaggtaccttgcggagtttgaaacttgatataggagaaaagatgcagccaagaataccatggtggcacacaaaattgctcggttaatttgcttatccttaaattcacggttctcgtattaaatttgctggctaggacattaacctttttatatgtacaatcgatcatttaattgatgtgtttctaaatgaaccaaacaatgagtggcatgctggcacttgaggggatcagtggcgacaataagaggagggttagcattgccctgcagatactcatgaggcctcgactgctcttcctagacgagcccaccaatggtcttaacaggtacgcgcttgcttctgtttcatgcctatcatatgggtgcgatgcccaagtcacaactgatgcaaccaagaaaacacgcaaaaatgtggagtgcttcggcgttcttcatggcagatgttgcgggggctgtcagctagtaaaattttagagttttatgatcctcatagcctagcatctaaacaaagtattcaaacaataaggtagaccaagcatttgcctctatatggtcaaactaatccacttttccatcaacataggtcctaacgtaaccataacccacaaaaaaaacccttatgacgaacctctacactaaac

SEQ ID NO: 47828 - DNA, 1861 bp, Zea Mays
aaaccccagccgcatcagcgccaccagcctcattcgtcctcctcgccccatccgcatccgccgccagcagccgaatgcctcacaggccgacctcccgccccatccgcatccgccacatgccacacatgtccaacaccgccagcctcatccgggagccgtgagcaacctcccactccccaccaacgcgccttcgcctcacctcgcgatgcccgagacctgcaatagtcaccgccttcccctgagcggctgagatgcagctccacgcccgtctgcgtccccccaccgcaagagccacgttgtgcctgccgccagccccgacacctccagatgttgcctctatccatcatccgagcttgccgcccccgcccccaaacccagaccccctgcaatcgcgaggaaggggaggacgctgttgcgcgtcgctaagcatcttcgcgcccctcagtgctgctaaggagccctatctatccctgatggcgccccaaccctttgttgaagttgatcttttgaattatggtgtgatagaaggtgatgaatcatgtaaacatttttctgaactaaaagtcttacctccatggatgatcaaagatggcacgaatcttaaaaaggaacaaagaggagagaaaattgagtcacaaaaacttgaaaaatatgaagccagagatgacaagaaacatgactcgaaatatgatcaaagtgtataggaagaatacataaatgcatattatgaggctttgaggaaaaaattggaagaggaagaagcaaaaaagcagaatgtagcatgaaggcaagatttttgtccctgatgctcaaagggaacgccaagttggtaagaaatacaagcacgatgatgatggtgaaggcattgaataggaagagcatcaacctacagttgtagggatgattgagttcatggagaaggtggtaatacaattgattctatggagctcactggaggagcactaccttttgttagttgcctgcaagaatgtctttggaatccgatctgcttcatggtgcatcttatcctcgattgagtacatggaagaaggttgtgtcaacatggattgtgtcactctcatcgaggactaccataacaagattgaatttgaactcaataagatctatgatggaatcctcaagctctttgcttcccaccttcccccctcactaacagttccaaagtccaaggtcttctacctcaagatgaagggtgattactacaggtaccttgcggagtttgaaacttgatataggagaaaagatgcagccaagaataccatggtggcacacaaaattgctcggttaatttgcttatccttaaattcacggttctcgtattaaatttgctggctaggacattaacctttttatatgtacaatcgatcatttaattgatgtgtttctaaatgaaccaaacaatgagtggcatgctggcacttgaggggatcagtggcgacaataagaggagggttagcattgccctgcagatactcatgaggcctcgactgctcttcctagacgagcccaccaatggtcttaacaggtacgcgcttgcttctgtttcatgcctatcatatgggtgcgatgcccaagtcacaactgatgcaaccaagaaaacacgcaaaaatgtggagtgcttcggcgttcttcatggcagatgttgcgggggctgtcagctagtaaaattttagagttttatgatcctcatagcctagcatctaaacaaagtattcaaacaataaggtagaccaagcatttgcctctatatggtcaaactaatccacttttccatcaacataggtcctaacgtaaccataacccacaaaaaaaacccttatgacgaacctctacactaaac

SEQ ID NO: 47829 - DNA, 3288 bp, Zea Mays
cgccacatgccacacatgtccaacaccgccagcctcatccgggagccgtgagcaacctcccactccccaccaacgcgccttcgcctcacctcgcgatgcccgagacctgcaatagtcaccgccttcccctgagcggctgagatgcagctccacgcccgtctgcgtccccccaccgcaagagccacgttgtgcctgccgccagccccgacacctccagatgttgcctctatccatcatccgagcttgccgcccccgcccccaaacccagaccccctgcaatcgcgaggaaggggaggacgctgttgcgcgtcgctaagcatcttcgcgcccctcagtgctgctaaggagccctatctatccctgatggcgccccaaccctttgtaatatctccacctcggccatgggcattgcaaccctcgattcaatctctcctcttcgatctcagtatttaagaatttgaatgagatttaggagcaattgaagccattggacattggttgcacaacttgataaagtgaataatctgcttgcgtctgagtttgggagtctataaacatggggaagagcaaatattggtgcctttgtaattggtgaccctgctacaactatttttttctatgaattcacaagggcaatatggtacaccaatgccatacattggacagacaacaataagacttccatataccttcttggttgtatatcttacatatttatcccaaaatgaacttttaaatcatattaatccattatctgcacataagttctcttcacttccctactacccatcaaaaaaagaaaaacgccttgaattgaattagaagttttcacatttgtaccttttgataaatgatattatggtatctccataaaaaagttctcactaatgcatttatttgtttaacatggagtcaccacaaatgtgcttatcttgttgcactttacattataggcatacctttccttgtacagtgagatatctatttcatttttcaggttgaagttgatcttttgaattatggtgtgatagaaggtgatgaatcatgtaaacatttttctgaactaaaagtcttacctccatggatgatcaaagatggcacgaatcttaaaaaggaacaaagaggagagaaaattgagtcacaaaaacttgaaaaatatgaagccagagatgacaagaaacatgactcgaaatatgatcaaagtgtataggaagaatacataaatgcatattatgaggctttgaggaaaaaattggaagaggaagaagcaaaaaagcagaatgtagcatgaaggcaagatttttgtccctgatgctcaaagggaacgccaagttggtaagaaatacaagcacgatgatgatggtgaaggcattgaataggaagagcatcaacctacagttgtagcatttaactcaaaagtttcccttgaaattcaagttgattttgagaagtatgaagggatgattgagttcatggagaaggtggtaatacaattgattctatggagctcactggaggagcactaccttttgttagttgcctgcaagaatgtctttggaatccgatctgcttcatggtgcatcttatcctcgattgagtacatggaagaaggttgtgtcaacatggattgtgtcactctcatcgaggactaccataacaagattgaatttgaactcaataagatctatgatggaatcctcaagctctttgcttcccaccttcccccctcactaacagttccaaagtccaaggtcttctacctcaagatgaagggtgattactacagttcaattcatgtgtatcaggtaccttgcggagtttgaaacttgatataggagaaaagatgcagccaagaataccatggtggcacacaaaattgctcggttaatttgcttatccttaaattcacggttctcgtattaaatttgctggctaggacattaacctttttatatgtacaatcgatcatttaattgatgtgtttctaaatgaaccaaacaatgagtggcatgctggcacttgaggggatcagtggcgacaataagaggagggttagcattgccctgcagatactcatgaggcctcgactgctcttcctagacgagcccaccaatggtcttaacaggcaacataacttctggcaagacacctcttaactgggatttaaggtcaagcattgctctagctgcagcccgtggtgttgagtacatccactcaacgagttcaacggcttcccacggtaacatcaagtcatccaatgtcctcctgggcgaatcgtatcaagcacacgtatcagacaatggccttaccgctcttgttggtccatcgtcttcaccgtctcgcgccactggataccgtgcacccgaggttattgatccccggagggtttcccagaaggcagacgtgtacagcttcggtgttctgttgcttgagctggtcacaggcaaggcccccagccaggccgctctcaacgacgagggcgtcaacctgcccagatgggtgcagtcagttagtcgctccgaatggggttcggaggtgttcgatattgagctcatgagacacgaggctggcgaggagccgatggctcagcttgtgctgcttgctctggactgcgtagcgcaagtcccagaggcccggccctcaatggggcatgttgttacgcggatagaggagatcaggaagtcaagcttgaccacaaacatggaggaagaagttgatgatcaatcttccaaggctgaatccgaggtgccgaccaatccgttcgcttcttgatctcagtcgacctaaaagagaatcagctataactctagcctgcatccaatcgatcttagaccgagtcgactctttttttcatcttttagcgtacatgatttaacgggtaacttgattgtcaaaagtagcacgggtgcacggcatccggtgctgctgagtttgaccggtggcggtgtgcttagggaccagttctaaagtgattgctaaattgctgtgctcattctagccttgattagtgctgctgctgctgtcattcagctacccatgtgtaattactgagccccatgtagtgtttggaatttctttttggctggatcagtctctcgtttgatctgctcaagttgcttgccgatatgtttgtcgtggggggcattctttttggggaagtctggtggtctactgtcaacaacgactggtgctacggtggcagctgctcgatggcggcgttgtcatcagtccgcgaaataccttaataccaccttatgagccgtactagcggtggtatgtgaatatgtt

SEQ ID NO: 47830 - DNA, 3137 bp, Zea Mays
cgccacatgccacacatgtccaacaccgccagcctcatccgggagccgtgagcaacctcccactccccaccaacgcgccttcgcctcacctcgcgatgcccgagacctgcaatagtcaccgccttcccctgagcggctgagatgcagctccacgcccgtctgcgtccccccaccgcaagagccacgttgtgcctgccgccagccccgacacctccagatgttgcctctatccatcatccgagcttgccgcccccgcccccaaacccagaccccctgcaatcgcgaggaaggggaggacgctgttgcgcgtcgctaagcatcttcgcgcccctcagtgctgctaaggagccctatctatccctgatggcgccccaaccctttgtaatatctccacctcggccatgggcattgcaaccctcgattcaatctctcctcttcgatctcagtatttaagaatttgaatgagatttaggagcaattgaagccattggacattggttgcacaacttgataaagtgaataatctgcttgcgtctgagtttgggagtctataaacatggggaagagcaaatattggtgcctttgtaattggtgaccctgctacaactatttttttctatgaattcacaagggcaatatggtacaccaatgccatacattggacagacaacaataagacttccatataccttcttggttgtatatcttacatatttatcccaaaatgaacttttaaatcatattaatccattatctgcacataagttctcttcacttccctactacccatcaaaaaaagaaaaacgccttgaattgaattagaagttttcacatttgtaccttttgataaatgatattatggtatctccataaaaaagttctcactaatgcatttatttgtttaacatggagtcaccacaaatgtgcttatcttgttgcactttacattataggcatacctttccttgtacagtgagatatctatttcatttttcaggttgaagttgatcttttgaattatggtgtgatagaaggtgatgaatcatgtaaacatttttctgaactaaaagtcttacctccatggatgatcaaagatggcacgaatcttaaaaaggaacaaagaggagagaaaattgagtcacaaaaacttgaaaaatatgaagccagagatgacaagaaacatgactcgaaatatgatcaaagtgtataggaagaatacataaatgcatattatgaggctttgaggaaaaaattggaagaggaagaagcaaaaaagcagaatgtagcatgaaggcaagatttttgtccctgatgctcaaagggaacgccaagttggtaagaaatacaagcacgatgatgatggtgaaggcattgaataggaagagcatcaacctacagttgtagttgcctgcaagaatgtctttggaatccgatctgcttcatggtgcatcttatcctcgattgagtacatggaagaaggttgtgtcaacatggattgtgtcactctcatcgaggactaccataacaagattgaatttgaactcaataagatctatgatggaatcctcaagctctttgcttcccaccttcccccctcactaacagttccaaagtccaaggtcttctacctcaagatgaagggtgattactacaggtaccttgcggagtttgaaacttgatataggagaaaagatgcagccaagaataccatggtggcacacaaaattgctcggttaatttgcttatccttaaattcacggttctcgtattaaatttgctggctaggacattaacctttttatatgtacaatcgatcatttaattgatgtgtttctaaatgaaccaaacaatgagtggcatgctggcacttgaggggatcagtggcgacaataagaggagggttagcattgccctgcagatactcatgaggcctcgactgctcttcctagacgagcccaccaatggtcttaacaggcaacataacttctggcaagacacctcttaactgggatttaaggtcaagcattgctctagctgcagcccgtggtgttgagtacatccactcaacgagttcaacggcttcccacggtaacatcaagtcatccaatgtcctcctgggcgaatcgtatcaagcacacgtatcagacaatggccttaccgctcttgttggtccatcgtcttcaccgtctcgcgccactggataccgtgcacccgaggttattgatccccggagggtttcccagaaggcagacgtgtacagcttcggtgttctgttgcttgagctggtcacaggcaaggcccccagccaggccgctctcaacgacgagggcgtcaacctgcccagatgggtgcagtcagttagtcgctccgaatggggttcggaggtgttcgatattgagctcatgagacacgaggctggcgaggagccgatggctcagcttgtgctgcttgctctggactgcgtagcgcaagtcccagaggcccggccctcaatggggcatgttgttacgcggatagaggagatcaggaagtcaagcttgaccacaaacatggaggaagaagttgatgatcaatcttccaaggctgaatccgaggtgccgaccaatccgttcgcttcttgatctcagtcgacctaaaagagaatcagctataactctagcctgcatccaatcgatcttagaccgagtcgactctttttttcatcttttagcgtacatgatttaacgggtaacttgattgtcaaaagtagcacgggtgcacggcatccggtgctgctgagtttgaccggtggcggtgtgcttagggaccagttctaaagtgattgctaaattgctgtgctcattctagccttgattagtgctgctgctgctgtcattcagctacccatgtgtaattactgagccccatgtagtgtttggaatttctttttggctggatcagtctctcgtttgatctgctcaagttgcttgccgatatgtttgtcgtggggggcattctttttggggaagtctggtggtctactgtcaacaacgactggtgctacggtggcagctgctcgatggcggcgttgtcatcagtccgcgaaataccttaataccaccttatgagccgtactagcggtggtatgtgaatatgtt

SEQ ID NO: 47831 - DNA, 1933 bp, Zea Mays
aaaaagtcgggttacctgagcttgtggaggtacgcttgctatttgctactcatagtccacccccatcgactttacaaattacacttggtcattgcgatttccagtttcctacacagcagtcccggactcccggttcccccactcgcgcaagtcgcaagctctcctctgcggctctgcctgtctttcgtttgctttgccattgcctgactagtgcttactgcctagccgcctagggacgcgatggtgttcaaggggcgcttcttctcgtcgcgacacaagtcatcggaatcctcgtcaagcccagacggcagcaacagcccgcgcacgcctacctcggcgccggcctcggtatccgcggcgtcgccggcgtcgtcatcgtcttctaaatccgacaagaagaagactaaattggagactcccaaaaagcgcgacaagctctttggttccgcggctaccgcccccaagagcgccgcgtcgtcggccccgtcaagcctggcgggtgacgggaggaaggggcccgtgctgcatcatagggacgcgggcggcggaggcgggggtggcgcatcggcggccgcgctgtcgccgatcctggcgtcctcactggggctcaaccggatcaagacgagatcccggccgctgccgcaggagggccaacgcatggctgccgcgctcgccagcagcaacctctcgcacgggcagggccaagcggaaccgtcggctggctcagccggagacggcgggagaaagggcgtcagctcctcggcggacacgagtagtagcagccgcgggatagtgaaaacgaccgagctggcgatgcgaagtgcacctgggacgaacttcggagcaggagggaagaacgctgtaaaagtgtgtatatgatccgtgtgagacaccaaaggaatccgagtctccgcgctttaaagcaattatgcaggctactagtgcaccaaggaagagactccctgcagatataaaaagtttttcacatgagctgaactctaaaggggtgtgcccatttcctttttggaaacctcggggcatttacaacttaaaggaggtaataaaagttatccagatgagatttgagaaggcaaaggaagaggtaaattcagatttggcagtttttgcaggagacttggttagcgtaatggaaaagtatgcagactctcatcctgagtggaaagaaaccttggaggacatgctaatacttgcacgtacctgctgtgtgatgacacctggggaattctggcttcagtgtgaagttatagtgcaagatttggatgaccatcgtcaggagctctcaatgggtgttctgaagaaactatatactcggatgctttttatccttacaagatgcacaaggttgcttcagttccacaaagaaagtgggtttgctgaggatgaagttgttatccatcagcgtgataagattatacagtctgcagataggcaggttttaactcaaccaggtgcagatggtacaatatccagagccagtaaaagtgaggcaagaaaatcatacagtcaggagcagcataatttgaaatggaagcgcagccaggagataaagcctgttaagcttcttccaccacttgacacagatgttaagaaagatgctgtttctccaagcaaagaacggatatcttcttggaaaccttttccatcgcctaatacaaaggtcccaaaggaatctattcctactaaatcggaatcacctaataagaaaactgatgcacactctacagttagtagccatgttgaattaagcagtcaagttgaatctttaccacaacaacagcttcctgacaagcatcaacataaaacttcatggggacactggtctgaccagccaaatatttctgaagagggttcaataatgtgccgcatatgtgaagaatatgttccgacacactatgtagaagaccattcaaag

SEQ ID NO: 47832 - DNA, 1935 bp, Zea Mays
cgactttacaaattacacttggtcattgcgatttccagtttcctacacagcagtcccggactcccggttcccccactcgcgcaagtcgcaagctctcctctgcggctctgcctgtctttcgtttgctttgccattgcctgactagtgcttactgcctagccgcctagggacgcgatggtgttcaaggggcgcttcttctcgtcgcgacacaagtcatcggaatcctcgtcaagcccagacggcagcaacagcccgcgcacgcctacctcggcgccggcctcggtatccgcggcgtcgccggcgtcgtcatcgtcttctaaatccgacaagaagaagactaaattggagactcccaaaaagcgcgacaagctctttggttccgcggctaccgcccccaagagcgccgcgtcgtcggccccgtcaagcctggcgggtgacgggaggaaggggcccgtgctgcatcatagggacgcgggcggcggaggcgggggtggcgcatcggcggccgcgctgtcgccgatcctggcgtcctcactggggctcaaccggatcaagacgagatcccggccgctgccgcaggagggccaacgcatggctgccgcgctcgccagcagcaacctctcgcacgggcagggccaagcggaaccgtcggctggctcagccggagacggcgggagaaagggcgtcagctcctcggcggacacgagtagtagcagccgcgggatagtgaaaacgaccgagctggcgatgcgaagtgcacctgggacgaacttcggagcaggagggaagaacgctgtaaaagttaaacctagtgcacagcggaaccattctggagatttgaggacacctactcacataccagaggctgcgtgtgtatatgatccgtgtgagacaccaaaggaatccgagtctccgcgctttaaagcaattatgcaggctactagtgcaccaaggaagagactccctgcagatataaaaagtttttcacatgagctgaactctaaaggggtgtgcccatttcctttttggaaacctcggggcatttacaacttaaaggaggtaataaaagttatccagatgagatttgagaaggcaaaggaagaggtaaattcagatttggcagtttttgcaggagacttggttagcgtaatggaaaagtatgcagactctcatcctgagtggaaagaaaccttggaggacatgctaatacttgcacgtacctgctgtgtgatgacacctggggaattctggcttcagtgtgaagttatagtgcaagatttggatgaccatcgtcaggagctctcaatgggtgttctgaagaaactatatactcggatgctttttatccttacaagatgcacaaggttgcttcagttccacaaagaaagtgggtttgctgaggatgaagttgttatccatcagcgtgataagattatacagtctgcagataggcaggttttaactcaaccaggtgcagatggtacaatatccagagccagtaaaagtgaggcaagaaaatcatacagtcaggagcagcataatttgaaatggaagcgcagccaggagataaagcctgttaagcttcttccaccacttgacacagatgttaagaaagatgctgtttctccaagcaaagaacggatatcttcttggaaaccttttccatcgcctaatacaaaggtcccaaaggaatctattcctactaaatcggaatcacctaataagaaaactgatgcacactctacagttagtagccatgttgaattaagcagtcaagttgaatctttaccacaacaacagcttcctgacaagcatcaacataaaacttcatggggacactggtctgaccagccaaatatttctgaagagggttcaataatgtgccgcatatgtgaagaatatgttccgacacactatgtagaagaccattcaaag

SEQ ID NO: 47833 - DNA, 1540 bp, Zea Mays
ctagtgcttactgcctagccgcctagggacgcgatggtgttcaaggggcgcttcttctcgtcgcgacacaagtcatcggaatcctcgtcaagcccagacggcagcaacagcccgcgcacgcctacctcggcgccggcctcggtatccgcggcgtcgccggcgtcgtcatcgtcttctaaatccgacaagaagaagactaaattggagactcccaaaaagcgcgacaagctctttggttccgcggctaccgcccccaagagcgccgcgtcgtcggccccgtcaagcctggcgggtgacgggaggaaggggcccgtgctgcatcatagggacgcgggcggcggaggcgggggtggcgcatcggcggccgcgctgtcgccgatcctggcgtcctcactggggctcaaccggatcaagacgagatcccggccgctgccgcaggagggccaacgcatggctgccgcgctcgccagcagcaacctctcgcacgggcagggccaagcggaaccgtcggctggctcagccggagacggcgggagaaagggcgtcagctcctcggcggacacgagtagtagcagccgcgggatagtgaaaacgaccgagctggcgatgcgaagtgcacctgggacgaacttcggagcaggagggaagaacgctgtaaaaggaggtaataaaagttatccagatgagatttgagaaggcaaaggaagaggtaaattcagatttggcagtttttgcaggagacttggttagcgtaatggaaaagtatgcagactctcatcctgagtggaaagaaaccttggaggacatgctaatacttgcacgtacctgctgtgtgatgacacctggggaattctggcttcagtgtgaagttatagtgcaagatttggatgaccatcgtcaggagctctcaatgggtgttctgaagaaactatatactcggatgctttttatccttacaagatgcacaaggttgcttcagttccacaaagaaagtgggtttgctgaggatgaagttgttatccatcagcgtgataagattatacagtctgcagataggcaggttttaactcaaccaggtgcagatggtacaatatccagagccagtaaaagtgaggcaagaaaatcatacagtcaggagcagcataatttgaaatggaagcgcagccaggagataaagcctgttaagcttcttccaccacttgacacagatgttaagaaagatgctgtttctccaagcaaagaacggatatcttcttggaaaccttttccatcgcctaatacaaaggtcccaaaggaatctattcctactaaatcggaatcacctaataagaaaactgatgcacactctacagttagtagccatgttgaattaagcagtcaagttgaatctttaccacaacaacagcttcctgacaagcatcaacataaaacttcatggggacactggtctgaccagccaaatatttctgaagagggttcaataatgtgccgcatatgtgaagaatatgttccgacacactatgtagaagaccattcaaag

SEQ ID NO: 47834 - DNA, 1470 bp, Zea Mays
atgagggggcagcgcgggcgcaccagggatgggcgtaggcacgggggaggtctagctggacgcgaggaagaggtagatggcgtcgggcatggctgcggtgtcgcaggccgtgcgctggggggaggggtcacccgtggaggagaaagcggttgcactagtggggagacccgtggctcgacaggagggtgggtgtcgagtgtcgacatgccaggagaacgggagtcggcgatgcgaaggtggggaagggagggggtgctggcgtacgcgcggttggggagggagtggcaccgggagcattggagaagggtgctgtggccagggaagggagcaccagcagttaaacctagtgcacagcggaaccattctggagatttgaggacacctactcacataccagaggctgcgtgtgtatatgatccgtgtgagacaccaaaggaatccgagtctccgcgctttaaagcaattatgcaggctactagtgcaccaaggaagagactccctgcagatataaaaagtttttcacatgagctgaactctaaaggggtgtgcccatttcctttttggaaacctcggggcatttacaacttaaaggaggtaataaaagttatccagatgagatttgagaaggcaaaggaagaggtaaattcagatttggcagtttttgcaggagacttggttagcgtaatggaaaagtatgcagactctcatcctgagtggaaagaaaccttggaggacatgctaatacttgcacgtacctgctgtgtgatgacacctggggaattctggcttcagtgtgaagttatagtgcaagatttggatgaccatcgtcaggagctctcaatgggtgttctgaagaaactatatactcggatgctttttatccttacaagatgcacaaggttgcttcagttccacaaagaaagtgggtttgctgaggatgaagttgttatccatcagcgtgataagattatacagtctgcagataggcaggttttaactcaaccaggtgcagatggtacaatatccagagccagtaaaagtgaggcaagaaaatcatacagtcaggagcagcataatttgaaatggaagcgcagccaggagataaagcctgttaagcttcttccaccacttgacacagatgttaagaaagatgctgtttctccaagcaaagaacggatatcttcttggaaaccttttccatcgcctaatacaaaggtcccaaaggaatctattcctactaaatcggaatcacctaataagaaaactgatgcacactctacagttagtagccatgttgaattaagcagtcaagttgaatctttaccacaacaacagcttcctgacaagcatcaacataaaacttcatggggacactggtctgaccagccaaatatttctgaagagggttcaataatgtgccgcatatgtgaagaatatgttccgacacactatgtagaagaccattcaaag

SEQ ID NO: 47835 - DNA, 3829 bp, Zea Mays
ctagagattcgtctatcctcaccaccaccagccgcccatacctcaccaccaccagccgccgcgccatcagccgccgcaacgacctcccacccgccctctccaactctagatgcattcactcggctcaaagagagttttggccgcttcacagagcagtgggatcagttcgttgtgatgttccaccgctacaaggagaagacagagaaggaactccaagcagcggtgcggcttcagacggcagcgcgagggttcctggcacgccgccaggtacagtcccttcgtggggagaagcaccttgctgtggcctccagggccaccccatggccgtcatcacatgagcaggccgtggtgcgcctgcaagccgcagtgcgcggcttccttgttaggcgggcggtgcggaagctgcacttgctgatcagctcatcgctgcaccaactcgcagcctgcgtgcccaaccaccaggtctcatctatactttttgaaccccctgcagaagtagagatctgggtatgcagcccccctgcacggccaaagagggtcgtctccttcattcgggcacctgccttggtgttggacagacccaacataagaacgggctggttcctcctccacctttcatccaacgtcaaggccgcaattcagctctttccttgggatccaggaggacaggaggacatagctgcagttcaaatttatattttagttccacaattattttatattttcgtcttaaataataaaggtaagccgagatgtaaaaggcttaaccttaagtcgtgtcaggtaagtctatggcagctcgaggacaagctggtcctcaagggagggggagatgtcatgggcatcatagggagcggtcactcatgtggggtcgcacttatgtgcgccaaaagcgagaggccgcagggggcgctggcagcagcgcgcgcaaggaaggcacgggcgctggcagcagcgcacgcaaggaaggcatggcaaaggaaagcgcgcacaaggaaggcatggcaaaggaaggcatggcaaaggaaagcgcgcacaaggaaggcatggcaaaggaaagcgcgtgcaaggaaggcatggcaaaggaaggtgactgatttggtggctaaattgatagacctaaatttaggggagatgatttcaattagtcacttgcctaattagtggttgcctagtttgtcaaccggtggcctatatataggcctgtacgcaggagacaaatgaaggaggaatatattatcaaaccaatctctctctctcttgcaatgactctcaagcgcctagggctgctaccctagaaccaagcctgcggcagaggggtataacctcgccggagaagacagctatcctcatggaccgaaggtccatgacagacatgtaagactcgttttggaccaaaatctgatcatggaatggccacttcatctgcgggaagtatgactcctaggtctccaataacaactccaagatcaaatcatatagacatgcttttagccggtaaaaatgcaattaatgagagtgatgatcttccacagattgtcgaacttgctgatattgcacgatgcatagcaaatactcctctggatgaagaaagtgcattatctcaaatggttacctgcatagaagatctccaagaaattgtcaactgcaggaagcatgagtctctcacagtgcagacatttggaacacgaatagaaaaactacacagggagaagtatctgcagctctgtgactcggttgatatggacaaggttgattcagcaagcaccataatggatgaggaagacaacgttgttcgtagcttgcgcgcaagtcctgtccatccaatcaaggatcgcacttcaattgatgactttgaaatcatcaaacctattagccgtggagcatttggacgtgttttcttggccaagaaaagaactacgggagacctttttgctataaaggttcttaggaaggcagatatgattcggaaaaatgctgtcgagagtatattggctgaacgtgatatattgattacagtcaggaacccttttgtggtacggtttttctattcgtttacctcacgggacaatttgtatctggtcatggagtacctgaatggaggggacctttactcattactgaggaatttagggtgcctggatgaagacgttgttcgtgtatatcttgcagaagttgtactagctttggaatatttgcactctatgcacatagtccatagggatctaaagcctgacaacttgttgatagcccatgatggacatattaagttgacagattttgggttgtccaaggttggtttgattaacaacacatatgatctgtctcgtcctgttgttagtggggcttcactgtatggagatgatgagcctcagatgaatgaattcgagcaaatggatcaccgagcacggagacaaaatcgttctgctgttggaactcctgattatttagcaccagaaatccttttggggacaggacatggttgcagtgcagattggtggtccgttggtgtcattctatttgagctcattgttggcatacctccgttcaatgcagaacacccccagacaatttttgacaatattctgaattgcaaaataccttggccgcatgtcccagaagagatgagttttgatgcacaagatttaattgacaaattattgacagaagatcctcatcaacgactaggagcaaatggcgcctcagaggttaaacaacatccatttttcaaagacattagctgggatacccttgctaggcagaaggctgccttcgttccctcctcagatagtgcatttgatactagctacttcaccagtcgctattcttggaatccatcagatggaaacatatatgaagcatacgagtttgaggattccagtgataatggaagccttagtggaagcagtagttgtgtgagcaaccgccaagatgacatgggggaggacagcgatggcctcaatgagtttgaatctagtgcaaatgtcaattattctttcagcaacttctcgttcaagaatctatcacaacttgcttccatcaattatgatatgctcaccaaaggattgaaggatgatccaccgccaagaactgaaacgtagcaatcaatctaaatttggactctcatccgagtaatcaaacagtctacaaggtgttcgcgggatgtaggtcttgtacatatcaaagtgtgaggcatggtctgttccaattgaggctgttcctacatctcgcggagccgagtacagttttgttgttaccttgttttcatgaccaattgacatgccatcatcagtgaatcacccttgaccgaattgggcagagcgctgtctttttgttcccctttgctttttttttaaaaaaaaaatcagtccattatgagccttgggtttggggagattggcccaggttactgtattcagaatacaacccctgaagatgtaggtgggttttaggaaattgtcattctagaatttattctggacacatttagctaactgaacaagccctaagctggtagcccgctggatttcctgcggccagaaatgttcacagcattcttgatggccatgggatacagcattttgctaaatgtgtccagtgtcccacagaatctgggacattataagaataggaaccgattgaggctggtgctgtttgtttcaacagagagtacgggaacggtaatgcaactagcaaacggtgataattgtcaaaggaataaaaacgctctctgtttggttcagctttgggagcgcagcatccaaatagttgccgctgagactgaaagtttggctactgtatttcaaaatattgatgactaggataaaat

SEQ ID NO: 47836 - DNA, 3736 bp, Zea Mays
ctagagattcgtctatcctcaccaccaccagccgcccatacctcaccaccaccagccgccgcgccatcagccgccgcaacgacctcccacccgccctctccaactctagatgcattcactcggctcaaagagagttttggccgcttcacagagcagtgggatcagttcgttgtgatgttccaccgctacaaggagaagacagagaaggaactccaagcagcggtgcggcttcagacggcagcgcgagggttcctggcacgccgccaggtacagtcccttcgtggggagaagcaccttgctgtggcctccagggccaccccatggccgtcatcacatgagcaggccgtggtgcgcctgcaagccgcagtgcgcggcttccttgttaggcgggcggtgcggaagctgcacttgctgatcagctcatcgctgcaccaactcgcagcctgcgtgcccaaccaccaggtctcatctatactttttgaaccccctgcagaagtagagatctgggtatgcagcccccctgcacggccaaagagggtcgtctccttcattcgggcacctgccttggtgttggacagacccaacataagaacgggctggttcctcctccacctttcatccaacgtcaaggccgcaattcagctctttccttgggatccaggaggacaggaggacatagctgcagttcaaatttatattttagttccacaattattttatattttcgtcttaaataataaaggtaagccgagatgtaaaaggcttaaccttaagtcgtgtcaggtaagtctatggcagctcgaggacaagctggtcctcaagggagggggagatgtcatgggcatcatagggagcggtcactcatgtggggtcgcacttatgtgcgccaaaagcgagaggccgcagggggcgctggcagcagcgcgcgcaaggaaggcacgggcgctggcagcagcgcacgcaaggaaggcatggcaaaggaaagcgcgcacaaggaaggcatggcaaaggaaggcatggcaaaggaaagcgcgcacaaggaaggcatggcaaaggaaagcgcgtgcaaggaaggcatggcaaaggaaggtgactgatttggtggctaaattgatagacctaaatttaggggagatgatttcaattagtcacttgcctaattagtggttgcctagtttgtcaaccggtggcctatatataggcctgtacgcaggagacaaatgaaggaggaatatattatcaaaccaatctctctctctcttgcaatgactctcaagcgcctagggctgctaccctagaaccaagcctgcggcagaggggtataacctcgccggagaagacagctatcctcatggaccgaaggtccatgacagacatgtaagactcgttttggaccaaaatctgatcatggaatggccacttcatctgcgggaagtatgactcctaggtctccaataacaactccaagatcaaatcatatagacatgcttttagccggtaaaaatgcaattaatgagagtgatgatcttccacagattgtcgaacttgctgatattgcacgatgcatagcaaatactcctctggatgaagaaagtgcattatctcaaatggttacctgcatagaagatctccaagaaattgtcaactgcaggaagcatgagtctctcacagtgcagacatttggaacacgaatagaaaaactacacagggagaagtatctgcagctctgtgactcggttgatatggacaaggttgattcagcaagcaccataatggatgaggaagacaacgttgttcgtagcttgcgcgcaagtcctgtccatccaatcaaggatcgcacttcaattgatgactttgaaatcatcaaacctattagccgtggagcatttggacgtgttttcttggccaagaaaagaactacgggagacctttttgctataaaggttcttaggaaggcagatatgattcggaaaaatgctgtcgagagtatattggctgaacgtgatatattgattacagtcaggaacccttttgtggtacggtttttctattcgtttacctcacgggacaatttgtatctggtcatggagtacctgaatggaggggacctttactcattactgaggaatttagggtgcctggatgaagacgttgttcgtgtatatcttgcagaagttttgacagattttgggttgtccaaggttggtttgattaacaacacatatgatctgtctcgtcctgttgttagtggggcttcactgtatggagatgatgagcctcagatgaatgaattcgagcaaatggatcaccgagcacggagacaaaatcgttctgctgttggaactcctgattatttagcaccagaaatccttttggggacaggacatggttgcagtgcagattggtggtccgttggtgtcattctatttgagctcattgttggcatacctccgttcaatgcagaacacccccagacaatttttgacaatattctgaattgcaaaataccttggccgcatgtcccagaagagatgagttttgatgcacaagatttaattgacaaattattgacagaagatcctcatcaacgactaggagcaaatggcgcctcagaggttaaacaacatccatttttcaaagacattagctgggatacccttgctaggcagaaggctgccttcgttccctcctcagatagtgcatttgatactagctacttcaccagtcgctattcttggaatccatcagatggaaacatatatgaagcatacgagtttgaggattccagtgataatggaagccttagtggaagcagtagttgtgtgagcaaccgccaagatgacatgggggaggacagcgatggcctcaatgagtttgaatctagtgcaaatgtcaattattctttcagcaacttctcgttcaagaatctatcacaacttgcttccatcaattatgatatgctcaccaaaggattgaaggatgatccaccgccaagaactgaaacgtagcaatcaatctaaatttggactctcatccgagtaatcaaacagtctacaaggtgttcgcgggatgtaggtcttgtacatatcaaagtgtgaggcatggtctgttccaattgaggctgttcctacatctcgcggagccgagtacagttttgttgttaccttgttttcatgaccaattgacatgccatcatcagtgaatcacccttgaccgaattgggcagagcgctgtctttttgttcccctttgctttttttttaaaaaaaaaatcagtccattatgagccttgggtttggggagattggcccaggttactgtattcagaatacaacccctgaagatgtaggtgggttttaggaaattgtcattctagaatttattctggacacatttagctaactgaacaagccctaagctggtagcccgctggatttcctgcggccagaaatgttcacagcattcttgatggccatgggatacagcattttgctaaatgtgtccagtgtcccacagaatctgggacattataagaataggaaccgattgaggctggtgctgtttgtttcaacagagagtacgggaacggtaatgcaactagcaaacggtgataattgtcaaaggaataaaaacgctctctgtttggttcagctttgggagcgcagcatccaaatagttgccgctgagactgaaagtttggctactgtatttcaaaatattgatgactaggataaaat

SEQ ID NO: 47837 - DNA, 3721 bp, Zea Mays
ctagagattcgtctatcctcaccaccaccagccgcccatacctcaccaccaccagccgccgcgccatcagccgccgcaacgacctcccacccgccctctccaactctagatgcattcactcggctcaaagagagttttggccgcttcacagagcagtgggatcagttcgttgtgatgttccaccgctacaaggagaagacagagaaggaactccaagcagcggtgcggcttcagacggcagcgcgagggttcctggcacgccgccaggtacagtcccttcgtggggagaagcaccttgctgtggcctccagggccaccccatggccgtcatcacatgagcaggccgtggtgcgcctgcaagccgcagtgcgcggcttccttgttaggcgggcggtgcggaagctgcacttgctgatcagctcatcgctgcaccaactcgcagcctgcgtgcccaaccaccaggtctcatctatactttttgaaccccctgcagaagtagagatctgggtatgcagcccccctgcacggccaaagagggtcgtctccttcattcgggcacctgccttggtgttggacagacccaacataagaacgggctggttcctcctccacctttcatccaacgtcaaggccgcaattcagctctttccttgggatccaggaggacaggaggacatagctgcagttcaaatttatattttagttccacaattattttatattttcgtcttaaataataaaggtaagccgagatgtaaaaggcttaaccttaagtcgtgtcaggtaagtctatggcagctcgaggacaagctggtcctcaagggagggggagatgtcatgggcatcatagggagcggtcactcatgtggggtcgcacttatgtgcgccaaaagcgagaggccgcagggggcgctggcagcagcgcgcgcaaggaaggcacgggcgctggcagcagcgcacgcaaggaaggcatggcaaaggaaagcgcgcacaaggaaggcatggcaaaggaaggcatggcaaaggaaagcgcgcacaaggaaggcatggcaaaggaaagcgcgtgcaaggaaggcatggcaaaggaaggtgactgatttggtggctaaattgatagacctaaatttaggggagatgatttcaattagtcacttgcctaattagtggttgcctagtttgtcaaccggtggcctatatataggcctgtacgcaggagacaaatgaaggaggaatatattatcaaaccaatctctctctctcttgcaatgactctcaagcgcctagggctgctaccctagaaccaagcctgcggcagaggggtataacctcgccggagaagacagctatcctcatggaccgaaggtccatgacagacatgtaagactcgttttggaccaaaatctgatcatggaatggccacttcatctgcgggaagtatgactcctaggtctccaataacaactccaagatcaaatcatatagacatgcttttagccggtaaaaatgcaattaatgagagtgatgatcttccacagattgtcgaacttgctgatattgcacgatgcatagcaaatactcctctggatgaagaaagtgcattatctcaaatggttacctgcatagaagatctccaagaaattgtcaactgcaggaagcatgagtctctcacagtgcagacatttggaacacgaatagaaaaactacacagggagaagtatctgcagctctgtgactcggttgatatggacaaggttgattcagcaagcaccataatggatgaggaagacaacgttgttcgtagcttgcgcgcaagtcctgtccatccaatcaaggatcgcacttcaattgatgactttgaaatcatcaaacctattagccgtggagcatttggacgtgttttcttggccaagaaaagaactacgggagacctttttgctataaaggttcttaggaaggcagatatgattcggaaaaatgctgtcgagagtatattggctgaacgtgatatattgattacagtcaggaacccttttgtggtacggtttttctattcgtttacctcacgggacaatttgtatctggtcatggagtacctgaatggaggggacctttactcattactgaggaatttagggtgcctggatgaagacgttgttcgtgtatatcttgcagaagttttgacagattttgggttgtccaaggttggtttgattaacaacacatatgatctgtctcgtcctgttgttagtggggcttcactgtatggagatgatgagcctcagatgaatgaattcgagcaaatggatcaccgagcacggagacaaaatcgttctgctgttggaactcctgattatttagcaccagaaatccttttggggacaggacatggttgcagtgcagattggtggtccgttggtgtcattctatttgagctcattgttggcatacctccgttcaatgcagaacacccccagacaatttttgacaatattctgaattgcaaaataccttggccgcatgtcccagaagagatgagttttgatgcacaagatttaattgacaaattattgacagaagatcctcatcaacgactaggagcaaatggcgcctcagaggttaaacaacatccatttttcaaagacattagctgggatacccttgctaggcagaaggctgccttcgttccctcctcagatagtgcatttgatactagctacttcaccagtcgctattcttggaatccatcagatggaaacatatatgaagcatacgagtttgaggattccagtgataatggaagccttagtggaagcagtagttgtgtgagcaaccgccaagatgacatgggggaggacagcgatggcctcaatgagtttgaatctagtgcaaatgtcaattattctttcagcaacttctcgttcaagaatctatcacaacttgcttccatcaattatgatatgctcaccaaaggattgaaggatgatccaccgccaagaactgaaacgtagcaatcaatctaaatttggactctcatccgagtaatcaaacagtctacaaggtgttcgcgggatatcaaagtgtgaggcatggtctgttccaattgaggctgttcctacatctcgcggagccgagtacagttttgttgttaccttgttttcatgaccaattgacatgccatcatcagtgaatcacccttgaccgaattgggcagagcgctgtctttttgttcccctttgctttttttttaaaaaaaaaatcagtccattatgagccttgggtttggggagattggcccaggttactgtattcagaatacaacccctgaagatgtaggtgggttttaggaaattgtcattctagaatttattctggacacatttagctaactgaacaagccctaagctggtagcccgctggatttcctgcggccagaaatgttcacagcattcttgatggccatgggatacagcattttgctaaatgtgtccagtgtcccacagaatctgggacattataagaataggaaccgattgaggctggtgctgtttgtttcaacagagagtacgggaacggtaatgcaactagcaaacggtgataattgtcaaaggaataaaaacgctctctgtttggttcagctttgggagcgcagcatccaaatagttgccgctgagactgaaagtttggctactgtatttcaaaatattgatgactaggataaaat

SEQ ID NO: 47838 - DNA, 3182 bp, Zea Mays
ctagagattcgtctatcctcaccaccaccagccgcccatacctcaccaccaccagccgccgcgccatcagccgccgcaacgacctcccacccgccctctccaactctagatgcattcactcggctcaaagagagttttggccgcttcacagagcagtgggatcagttcgttgtgatgttccaccgctacaaggagaagacagagaaggaactccaagcagcggtgcggcttcagacggcagcgcgagggttcctggcacgccgccaggtacagtcccttcgtggggagaagcaccttgctgtggcctccagggccaccccatggccgtcatcacatgagcaggccgtggtgcgcctgcaagccgcagtgcgcggcttccttgttaggcgggcggtgcggaagctgcacttgctgatcagctcatcgctgcaccaactcgcagcctgcgtgcccaaccaccaggtctcatctatactttttgaaccccctgcagaagtagagatctgggtatgcagcccccctgcacggccaaagagggtcgtctccttcattcgggcacctgccttggtgttggacagacccaacataagaacgggctggttcctcctccacctttcatccaacgtcaaggccgcaattcagctctttccttgggatccaggaggacaggaggacatagctgcagttcaaatttatattttagttccacaattattttatattttcgtcttaaataataaaggtaagccgagatgtaaaaggcttaaccttaagtcgtgtcaggtaagtctatggcagctcgaggacaagctggtcctcaagggagggggagatgtcatgggcatcatagggagcggtcactcatgtggggtcgcacttatgtgcgccaaaagcgagaggccgcagggggcgctggcagcagcgcgcgcaaggaaggcacgggcgctggcagcagcgcacgcaaggaaggcatggcaaaggaaagcgcgcacaaggaaggcatggcaaaggaaggcatggcaaaggaaagcgcgcacaaggaaggcatggcaaaggaaagcgcgtgcaaggaaggcatggcaaaggaaggtgactgatttggtggctaaattgatagacctaaatttaggggagatgatttcaattagtcacttgcctaattagtggttgcctagtttgtcaaccggtggcctatatataggcctgtacgcaggagacaaatgaaggaggaatatattatcaaaccaatctctctctctcttgcaatgactctcaagcgcctagggctgctaccctagaaccaagcctgcggcagaggggtataacctcgccggagaagacagctatcctcatggaccgaaggtccatgacagacatgtaagactcgttttggaccaaaatctgatcatggaatggccacttcatctgcgggaagtatgactcctaggtctccaataacaactccaagatcaaatcatatagacatgcttttagccggtaaaaatgcaattaatgagagtgatgatcttccacagattgtcgaacttgctgatattgcacgatgcatagcaaatactcctctggatgaagaaagtgcattatctcaaatggttacctgcatagaagatctccaagaaattgtcaactgcaggaagcatgagtctctcacagtgcagacatttggaacacgaatagaaaaactacacagggagaagtatctgcagctctgtgactcggttgatatggacaaggttgattcagcaagcaccataatggatgaggaagacaacgttgttcgtagcttgcgcgcaagtcctgtccatccaatcaaggatcgcacttcaattgatgactttgaaatcatcaaacctattagccgtggagcatttggacgtgttttcttggccaagaaaagaactacgggagacctttttgctataaaggttcttaggaaggcagatatgattcggaaaaatgctgtcgagagtatattggctgaacgtgatatattgattacagtcaggaacccttttgtggtacggtttttctattcgtttacctcacgggacaatttgtatctggtcatggagtacctgaatggaggggacctttactcattactgaggaatttagggtgcctggatgaagacgttgttcgtgtatatcttgcagaagttgtactagctttggaatatttgcactctatgcacatagtccatagggatctaaagcctgacaacttgttgatagcccatgatggacatattaagtggggcttcactgtatggagatgatgagcctcagatgaatgaattcgagcaaatggatcaccgagcacggagacaaaatcgttctgctgttggaactcctgattatttagcaccagaaatcattttggggacaggacatggttgcagtgcagattggtggtccgttggtgtcattctatttgagctcattgttggcatacctccgttcaatgcagaacacccccagacaatttttgacaatattctgaattacaaaataccttggccgcatgtcccggaagagatgagttttgatgcacaagatttaattgacaaattattgaccgaagatcctcatcaacgactaggagcaaatggcgcctcagaggttaaacaacatccatttttcaaagacattagctgggatacccttgctaggcagaaggctgcctttgttccctcctcagataatgcatttgatactagctacttcaccagtcgctattcctggaatccatcagatggaaacatatatgaagcatacgagtttgaggattccagtgataatggaagccttagtggaagcagtagttgtctgagcaaccgccaagatgacatgacggaggacagcgatggcctcaatgagtttgaatctagtgcaaatgtcaattattctttcagcaacttctcgttcaagcgtgcagcggttggatcaccgtctaaaagttcagaatgcttgcttgcacgcttgcacctaagacctgcttgcacaatattcgttccctatttgtaaatatcaacatttgcaattgcaatgttatcgcaatagcaattgtagtactgctgtacctgtgagccagatcttgaatgctacaaaggcagtatcctttctttttagtatgatgatatatgcagctcctgcgtgtttgagac

SEQ ID NO: 47839 - DNA, 3706 bp, Zea Mays
ctagagattcgtctatcctcaccaccaccagccgcccatacctcaccaccaccagccgccgcgccatcagccgccgcaacgacctcccacccgccctctccaactctagatgcattcactcggctcaaagagagttttggccgcttcacagagcagtgggatcagttcgttgtgatgttccaccgctacaaggagaagacagagaaggaactccaagcagcggtgcggcttcagacggcagcgcgagggttcctggcacgccgccaggtacagtcccttcgtggggagaagcaccttgctgtggcctccagggccaccccatggccgtcatcacatgagcaggccgtggtgcgcctgcaagccgcagtgcgcggcttccttgttaggcgggcggtgcggaagctgcacttgctgatcagctcatcgctgcaccaactcgcagcctgcgtgcccaaccaccaggtctcatctatactttttgaaccccctgcagaagtagagatctgggtatgcagcccccctgcacggccaaagagggtcgtctccttcattcgggcacctgccttggtgttggacagacccaacataagaacgggctggttcctcctccacctttcatccaacgtcaaggccgcaattcagctctttccttgggatccaggaggacaggaggacatagctgcagttcaaatttatattttagttccacaattattttatattttcgtcttaaataataaaggtaagccgagatgtaaaaggcttaaccttaagtcgtgtcaggtaagtctatggcagctcgaggacaagctggtcctcaagggagggggagatgtcatgggcatcatagggagcggtcactcatgtggggtcgcacttatgtgcgccaaaagcgagaggccgcagggggcgctggcagcagcgcgcgcaaggaaggcacgggcgctggcagcagcgcacgcaaggaaggcatggcaaaggaaagcgcgcacaaggaaggcatggcaaaggaaggcatggcaaaggaaagcgcgcacaaggaaggcatggcaaaggaaagcgcgtgcaaggaaggcatggcaaaggaaggtgactgatttggtggctaaattgatagacctaaatttaggggagatgatttcaattagtcacttgcctaattagtggttgcctagtttgtcaaccggtggcctatatataggcctgtacgcaggagacaaatgaaggaggaatatattatcaaaccaatctctctctctcttgcaatgactctcaagcgcctagggctgctaccctagaaccaagcctgcggcagaggggtataacctcgccggagaagacagctatcctcatggaccgaaggtccatgacagacatgtaagactcgttttggaccaaaatctgatcatggaatggccacttcatctgcgggaagtatgactcctaggtctccaataacaactccaagatcaaatcatatagacatgcttttagccggtaaaaatgcaattaatgagagtgatgatcttccacagattgtcgaacttgctgatattgcacgatgcatagcaaatactcctctggatgaagaaagtgcattatctcaaatggttacctgcatagaagatctccaagaaattgtcaactgcaggaagcatgagtctctcacagtgcagacatttggaacacgaatagaaaaactacacagggagaagtatctgcagctctgtgactcggttgatatggacaaggttgattcagcaagcaccataatggatgaggaagacaacgttgttcgtagcttgcgcgcaagtcctgtccatccaatcaaggatcgcacttcaattgatgactttgaaatcatcaaacctattagccgtggagcatttggacgtgttttcttggccaagaaaagaactacgggagacctttttgctataaaggttcttaggaaggcagatatgattcggaaaaatgctgtcgagagtatattggctgaacgtgatatattgattacagtcaggaacccttttgtggtacggtttttctattcgtttacctcacgggacaatttgtatctggtcatggagtacctgaatggaggggacctttactcattactgaggaatttagggtgcctggatgaagacgttgttcgtgtatatcttgcagaagttgtactagctttggaatatttgcactctatgcacatagtccatagggatctaaagcctgacaacttgttgatagcccatgatggacatattaagtggggcttcactgtatggagatgatgagcctcagatgaatgaattcgagcaaatggatcaccgagcacggagacaaaatcgttctgctgttggaactcctgattatttagcaccagaaatcattttggggacaggacatggttgcagtgcagattggtggtccgttggtgtcattctatttgagctcattgttggcatacctccgttcaatgcagaacacccccagacaatttttgacaatattctgaattacaaaataccttggccgcatgtcccggaagagatgagttttgatgcacaagatttaattgacaaattattgaccgaagatcctcatcaacgactaggagcaaatggcgcctcagaggttaaacaacatccatttttcaaagacattagctgggatacccttgctaggcagaaggctgcctttgttccctcctcagataatgcatttgatactagctacttcaccagtcgctattcctggaatccatcagatggaaacatatatgaagcatacgagtttgaggattccagtgataatggaagccttagtggaagcagtagttgtctgagcaaccgccaagatgacatgacggaggacagcgatggcctcaatgagtttgaatctagtgcaaatgtcaattattctttcagcaacttctcgttcaagaatcatgcttccatcaattatgatatgttcaccaaaggattgaaggatgatccaccgccaagaactgaaacgtagcaatcaatccaaatttggactctcatccgagtaatcaaacagtctacaaggtgctcgcgcgatatcaaagtgtgaggcatggtctgttccaattgaggctgttcctacatctcccggagccgagtacagttttgctgttaccttgttttcatgaccaattgacatgccatcatcagtgaatcacccttgaccgaattgggcagagcgctgtctttttgttcccctttgcttttttttttaaaaaaatcagtccattatgagccttgggtttgcggagattggcccaggttactgtattcagaatacaacccctgaagatgtaggtgggttttaggaaattgccattctggcatttatagttgacgatggtttgttaagctggtagcccgctggatttcctgcggccagaaatgttcacagcattttttatggccatgggatacatcattttgctaaatgtgtccagtgtcccacagaatctgggacattataagaataggaaccgattgaggctggtgctgtttgtttcaacagagagtacgggaacggtaaatgcaactagcaaacggtgataattgttgcaaaggaataaaaacgctctctgtttggttcagctttgggagcgcagcgtccaaatagttgccgctgagactgaaagtttggctactgtatttcaaaatactct

SEQ ID NO: 47840 - DNA, 3801 bp, Zea Mays
ctagagattcgtctatcctcaccaccaccagccgcccatacctcaccaccaccagccgccgcgccatcagccgccgcaacgacctcccacccgccctctccaactctagatgcattcactcggctcaaagagagttttggccgcttcacagagcagtgggatcagttcgttgtgatgttccaccgctacaaggagaagacagagaaggaactccaagcagcggtgcggcttcagacggcagcgcgagggttcctggcacgccgccaggtacagtcccttcgtggggagaagcaccttgctgtggcctccagggccaccccatggccgtcatcacatgagcaggccgtggtgcgcctgcaagccgcagtgcgcggcttccttgttaggcgggcggtgcggaagctgcacttgctgatcagctcatcgctgcaccaactcgcagcctgcgtgcccaaccaccaggtctcatctatactttttgaaccccctgcagaagtagagatctgggtatgcagcccccctgcacggccaaagagggtcgtctccttcattcgggcacctgccttggtgttggacagacccaacataagaacgggctggttcctcctccacctttcatccaacgtcaaggccgcaattcagctctttccttgggatccaggaggacaggaggacatagctgcagttcaaatttatattttagttccacaattattttatattttcgtcttaaataataaaggtaagccgagatgtaaaaggcttaaccttaagtcgtgtcaggtaagtctatggcagctcgaggacaagctggtcctcaagggagggggagatgtcatgggcatcatagggagcggtcactcatgtggggtcgcacttatgtgcgccaaaagcgagaggccgcagggggcgctggcagcagcgcgcgcaaggaaggcacgggcgctggcagcagcgcacgcaaggaaggcatggcaaaggaaagcgcgcacaaggaaggcatggcaaaggaaggcatggcaaaggaaagcgcgcacaaggaaggcatggcaaaggaaagcgcgtgcaaggaaggcatggcaaaggaaggtgactgatttggtggctaaattgatagacctaaatttaggggagatgatttcaattagtcacttgcctaattagtggttgcctagtttgtcaaccggtggcctatatataggcctgtacgcaggagacaaatgaaggaggaatatattatcaaaccaatctctctctctcttgcaatgactctcaagcgcctagggctgctaccctagaaccaagcctgcggcagaggggtataacctcgccggagaagacagctatcctcatggaccgaaggtccatgacagacatgtaagactcgttttggaccaaaatctgatcatggaatggccacttcatctgcgggaagtatgactcctaggtctccaataacaactccaagatcaaatcatatagacatgcttttagccggtaaaaatgcaattaatgagagtgatgatcttccacagattgtcgaacttgctgatattgcacgatgcatagcaaatactcctctggatgaagaaagtgcattatctcaaatggttacctgcatagaagatctccaagaaattgtcaactgcaggaagcatgagtctctcacagtgcagacatttggaacacgaatagaaaaactacacagggagaagtatctgcagctctgtgactcggttgatatggacaaggttgattcagcaagcaccataatggatgaggaagacaacgttgttcgtagcttgcgcgcaagtcctgtccatccaatcaaggatcgcacttcaattgatgactttgaaatcatcaaacctattagccgtggagcatttggacgtgttttcttggccaagaaaagaactacgggagacctttttgctataaaggttcttaggaaggcagatatgattcggaaaaatgctgtcgagagtatattggctgaacgtgatatattgattacagtcaggaacccttttgtggtacggtttttctattcgtttacctcacgggacaatttgtatctggtcatggagtacctgaatggaggggacctttactcattactgaggaatttagggtgcctggatgaagacgttgttcgtgtatatcttgcagaagttgtactagctttggaatatttgcactctatgcacatagtccatagggatctaaagcctgacaacttgttgatagcccatgatggacatattaagttgacagattttgggttgtccaaggttggtttgattaacaacacatatgatctgtctcgtcctgttgttagtggggcttcactgtatggagatgatgagcctcagatgaatgaattcgagcaaatggatcaccgagcacggagacaaaatcgttctgctgttggaactcctgattatttagcaccagaaatccttttggggacaggacatggttgcagtgcagattggtggtccgttggtgtcattctatttgagctcattgttggcatacctccgttcaatgcagaacacccccagacaatttttgacaatattctgaattgcaaaataccttggccgcatgtcccagaagagatgagttttgatgcacaagatttaattgacaaattattgacagaagatcctcatcaacgactaggagcaaatggcgcctcagaggttaaacaacatccatttttcaaagacattagctgggatacccttgctaggcagaaggctgccttcgttccctcctcagatagtgcatttgatactagctacttcaccagtcgctattcttggaatccatcagatggaaacatatatgaagcatacgagtttgaggattccagtgataatggaagccttagtggaagcagtagttgtgtgagcaaccgccaagatgacatgggggaggacagcgatggcctcaatgagtttgaatctagtgcaaatgtcaattattctttcagcaacttctcgttcaagaatctatcacaacttgcttccatcaattatgatatgctcaccaaaggattgaaggatgatccaccgccaagaactgaaacgtagcaatcaatctaaatttggactctcatccgagtaatcaaacagtctacaaggtgttcgcgggatgtaggtcttgtacatatcaaagtgtgaggcatggtctgttccaattgaggctgttcctacatctcccggagccgagtacagttttgctgttaccttgttttcatgaccaattgacatgccatcatcagtgaatcacccttgaccgaattgggcagagcgctgtctttttgttcccctttgcttttttttttaaaaaaatcagtccattatgagccttgggtttgcggagattggcccaggttactgtattcagaatacaacccctgaagatgtaggtgggttttaggaaattgccattctggcatttatagttgacgatggtttgttaagctggtagcccgctggatttcctgcggccagaaatgttcacagcattttttatggccatgggatacatcattttgctaaatgtgtccagtgtcccacagaatctgggacattataagaataggaaccgattgaggctggtgctgtttgtttcaacagagagtacgggaacggtaaatgcaactagcaaacggtgataattgttgcaaaggaataaaaacgctctctgtttggttcagctttgggagcgcagcgtccaaatagttgccgctgagactgaaagtttggctactgtatttcaaaatactct

SEQ ID NO: 47841 - DNA, 2383 bp, Zea Mays
tactgtattaaagtggcgtgtcgacaaatatttggtagaactgatggaagcagtgaaattgaaaatttcggaagttcacagaattcaggacagaattatttgaaattgtcgaacttgctgatattgcacgatgcatagcaaatactcctctggatgaagaaagtgcattatctcaaatggttacctgcatagaagatctccaagaaattgtcaactgcaggaagcatgagtctctcacagtgcagacatttggaacacgaatagaaaaactacacagggagaagtatctgcagctctgtgactcggttgatatggacaaggttgattcagcaagcaccataatggatgaggaagacaacgttgttcgtagcttgcgcgcaagtcctgtccatccaatcaaggatcgcacttcaattgatgactttgaaatcatcaaacctattagccgtggagcatttggacgtgttttcttggccaagaaaagaactacgggagacctttttgctataaaggttcttaggaaggcagatatgattcggaaaaatgctgtcgagagtatattggctgaacgtgatatattgattacagtcaggaacccttttgtggtacggtttttctattcgtttacctcacgggacaatttgtatctggtcatggagtacctgaatggaggggacctttactcattactgaggaatttagggtgcctggatgaagacgttgttcgtgtatatcttgcagaagttgtactagctttggaatatttgcactctatgcacatagtccatagggatctaaagcctgacaacttgttgatagcccatgatggacatattaagttgacagattttgggttgtccaaggttggtttgattaacaacacatatgatctgtctcgtcctgttgttagtggggcttcactgtatggagatgatgagcctcagatgaatgaattcgagcaaatggatcaccgagcacggagacaaaatcgttctgctgttggaactcctgattatttagcaccagaaatccttttggggacaggacatggttgcagtgcagattggtggtccgttggtgtcattctatttgagctcattgttggcatacctccgttcaatgcagaacacccccagacaatttttgacaatattctgaattgcaaaataccttggccgcatgtcccagaagagatgagttttgatgcacaagatttaattgacaaattattgacagaagatcctcatcaacgactaggagcaaatggcgcctcagaggttaaacaacatccatttttcaaagacattagctgggatacccttgctaggcagaaggctgccttcgttccctcctcagatagtgcatttgatactagctacttcaccagtcgctattcttggaatccatcagatggaaacatatatgaagcatacgagtttgaggattccagtgataatggaagccttagtggaagcagtagttgtgtgagcaaccgccaagatgacatgggggaggacagcgatggcctcaatgagtttgaatctagtgcaaatgtcaattattctttcagcaacttctcgttcaagaatctatcacaacttgcttccatcaattatgatatgctcaccaaaggattgaaggatgatccaccgccaagaactgaaacgtagcaatcaatctaaatttggactctcatccgagtaatcaaacagtctacaaggtgttcgcgggatatcaaagtgtgaggcatggtctgttccaattgaggctgttcctacatctcgcggagccgagtacagttttgttgttaccttgttttcatgaccaattgacatgccatcatcagtgaatcacccttgaccgaattgggcagagcgctgtctttttgttcccctttgctttttttttaaaaaaaaaatcagtccattatgagccttgggtttggggagattggcccaggttactgtattcagaatacaacccctgaagatgtaggtgggttttaggaaattgtcattctagaatttattctggacacatttagctaactgaacaagccctaagctggtagcccgctggatttcctgcggccagaaatgttcacagcattcttgatggccatgggatacagcattttgctaaatgtgtccagtgtcccacagaatctgggacattataagaataggaaccgattgaggctggtgctgtttgtttcaacagagagtacgggaacggtaatgcaactagcaaacggtgataattgtcaaaggaataaaaacgctctctgtttggttcagctttgggagcgcagcatccaaatagttgccgctgagactgaaagtttggctactgtatttcaaaatattgatgactaggataaaat

SEQ ID NO: 47842 - DNA, 1194 bp, Zea Mays
gtgaaattgaaaatttcggaagttcacagaattcaggacagaattatttgaaattgtcgaacttgctgatattgcacgatgcatagcaaatactcctctggatgaagaaagtgcattatctcaaatggttacctgcatagaagatctccaagaaattgtcaactgcaggaagcatgagtctctcacagtgcagacatttggaacacgaatagaaaaactacacagggagaagtatctgcagctctgtgactcggttgatatggacaaggttgattcagcaagcaccataatggatgaggaagacaacgttgttcgtagcttgcgcgcaagtcctgtccatccaatcaaggatcgcacttcaattgatgactttgaaatcatcaaacctattagccgtggagcatttggacgtgttttcttggccaagaaaagaactacgggagacctttttgctataaaggttcttaggaaggcagatatgattcggaaaaatgctgtcgagagtatattggctgaacgtgatatattgattacagtcaggaacccttttgtggtacggtttttctattcgtttacctcacgggacaatttgtatctggtcatggagtacctgaatggaggggacctttactcattactgaggaatttagggtgcctggatgaagacgttgttcgtgtatatcttgcagaagttgtactagctttggaatatttgcactctatgcacatagtccatagggatctaaagcctgacaacttgttgatagcccatgatggacatattaagttgacagattttgggttgtccaaggttggtttgattaacaacacatatgatctgtctcgtcctgttgttagtggggcttcactgtatggagatgatgagcctcagatgaatgaattcgagcaaatggatcaccgagcacggagacaaaatcgttctgctgttggaactcctgattatttagcaccagaaatccttttggggacaggacatggttgcagtgcagattggtggtccgttggtgtcattctatttgagctcattgttggcatacctccgttcaatgcagaacacccccagacaatttttgacaatattctgaattgcaaaataccttggccgcatgtcccagaagagatgagttttgatgcacaagatttaattgacaaactgttggcctcacaaacttt

SEQ ID NO: 47843 - DNA, 2070 bp, Zea Mays
cagaattcaggacagaattatttgaaattgtcgaacttgctgatattgcacgatgcatagcaaatactcctctggatgaagaaagtgcattatctcaaatggttacctgcatagaagatctccaagaaattgtcaactgcaggaagcatgagtctctcacagtgcagacatttggaacacgaatagaaaaactacacaggttcttaggaaggcagatatgattcggaaaaatgctgtcgagagtatattggctgaacgtgatatattgattacagtcaggaacccttttgtggtacggtttttctattcgtttacctcacgggacaatttgtatctggtcatggagtacctgaatggaggggacctttactcattactgaggaatttagggtgcctggatgaagacgttgttcgtgtatatcttgcagaagttgtactagctttggaatatttgcactctatgcacatagtccatagggatctaaagcctgacaacttgttgatagcccatgatggacatattaagttgacagattttgggttgtccaaggttggtttgattaacaacacatatgatctgtctcgtcctgttgttagtggggcttcactgtatggagatgatgagcctcagatgaatgaattcgagcaaatggatcaccgagcacggagacaaaatcgttctgctgttggaactcctgattatttagcaccagaaatccttttggggacaggacatggttgcagtgcagattggtggtccgttggtgtcattctatttgagctcattgttggcatacctccgttcaatgcagaacacccccagacaatttttgacaatattctgaattgcaaaataccttggccgcatgtcccagaagagatgagttttgatgcacaagatttaattgacaaattattgacagaagatcctcatcaacgactaggagcaaatggcgcctcagaggttaaacaacatccatttttcaaagacattagctgggatacccttgctaggcagaaggctgccttcgttccctcctcagatagtgcatttgatactagctacttcaccagtcgctattcttggaatccatcagatggaaacatatatgaagcatacgagtttgaggattccagtgataatggaagccttagtggaagcagtagttgtgtgagcaaccgccaagatgacatgggggaggacagcgatggcctcaatgagtttgaatctagtgcaaatgtcaattattctttcagcaacttctcgttcaagaatctatcacaacttgcttccatcaattatgatatgctcaccaaaggattgaaggatgatccaccgccaagaactgaaacgtagcaatcaatctaaatttggactctcatccgagtaatcaaacagtctacaaggtgttcgcgggatatcaaagtgtgaggcatggtctgttccaattgaggctgttcctacatctcgcggagccgagtacagttttgttgttaccttgttttcatgaccaattgacatgccatcatcagtgaatcacccttgaccgaattgggcagagcgctgtctttttgttcccctttgctttttttttaaaaaaaaaatcagtccattatgagccttgggtttggggagattggcccaggttactgtattcagaatacaacccctgaagatgtaggtgggttttaggaaattgtcattctagaatttattctggacacatttagctaactgaacaagccctaagctggtagcccgctggatttcctgcggccagaaatgttcacagcattcttgatggccatgggatacagcattttgctaaatgtgtccagtgtcccacagaatctgggacattataagaataggaaccgattgaggctggtgctgtttgtttcaacagagagtacgggaacggtaatgcaactagcaaacggtgataattgtcaaaggaataaaaacgctctctgtttggttcagctttgggagcgcagcatccaaatagttgccgctgagactgaaagtttggctactgtatttcaaaatattgatgactaggataaaat

SEQ ID NO: 47844 - DNA, 2333 bp, Zea Mays
cacattcttgtgttcacattattctttgtttgcctgtaaggaaaacaaattcagattgtcgaacttgctgatattgcacgatgcatagcaaatactcctctggatgaagaaagtgcattatctcaaatggttacctgcatagaagatctccaagaaattgtcaactgcaggaagcatgagtctctcacagtgcagacatttggaacacgaatagaaaaactacacagggagaagtatctgcagctctgtgactcggttgatatggacaaggttgattcagcaagcaccataatggatgaggaagacaacgttgttcgtagcttgcgcgcaagtcctgtccatccaatcaaggatcgcacttcaattgatgactttgaaatcatcaaacctattagccgtggagcatttggacgtgttttcttggccaagaaaagaactacgggagacctttttgctataaaggttcttaggaaggcagatatgattcggaaaaatgctgtcgagagtatattggctgaacgtgatatattgattacagtcaggaacccttttgtggtacggtttttctattcgtttacctcacgggacaatttgtatctggtcatggagtacctgaatggaggggacctttactcattactgaggaatttagggtgcctggatgaagacgttgttcgtgtatatcttgcagaagttgtactagctttggaatatttgcactctatgcacatagtccatagggatctaaagcctgacaacttgttgatagcccatgatggacatattaagttgacagattttgggttgtccaaggttggtttgattaacaacacatatgatctgtctcgtcctgttgttagtggggcttcactgtatggagatgatgagcctcagatgaatgaattcgagcaaatggatcaccgagcacggagacaaaatcgttctgctgttggaactcctgattatttagcaccagaaatccttttggggacaggacatggttgcagtgcagattggtggtccgttggtgtcattctatttgagctcattgttggcatacctccgttcaatgcagaacacccccagacaatttttgacaatattctgaattgcaaaataccttggccgcatgtcccagaagagatgagttttgatgcacaagatttaattgacaaattattgacagaagatcctcatcaacgactaggagcaaatggcgcctcagaggttaaacaacatccatttttcaaagacattagctgggatacccttgctaggcagaaggctgccttcgttccctcctcagatagtgcatttgatactagctacttcaccagtcgctattcttggaatccatcagatggaaacatatatgaagcatacgagtttgaggattccagtgataatggaagccttagtggaagcagtagttgtgtgagcaaccgccaagatgacatgggggaggacagcgatggcctcaatgagtttgaatctagtgcaaatgtcaattattctttcagcaacttctcgttcaagaatctatcacaacttgcttccatcaattatgatatgctcaccaaaggattgaaggatgatccaccgccaagaactgaaacgtagcaatcaatctaaatttggactctcatccgagtaatcaaacagtctacaaggtgttcgcgggatatcaaagtgtgaggcatggtctgttccaattgaggctgttcctacatctcgcggagccgagtacagttttgttgttaccttgttttcatgaccaattgacatgccatcatcagtgaatcacccttgaccgaattgggcagagcgctgtctttttgttcccctttgctttttttttaaaaaaaaaatcagtccattatgagccttgggtttggggagattggcccaggttactgtattcagaatacaacccctgaagatgtaggtgggttttaggaaattgtcattctagaatttattctggacacatttagctaactgaacaagccctaagctggtagcccgctggatttcctgcggccagaaatgttcacagcattcttgatggccatgggatacagcattttgctaaatgtgtccagtgtcccacagaatctgggacattataagaataggaaccgattgaggctggtgctgtttgtttcaacagagagtacgggaacggtaatgcaactagcaaacggtgataattgtcaaaggaataaaaacgctctctgtttggttcagctttgggagcgcagcatccaaatagttgccgctgagactgaaagtttggctactgtatttcaaaatattgatgactaggataaaat

SEQ ID NO: 47845 - DNA, 2961 bp, Zea Mays
agattccttgtcgaaactgtacttgcattccatgaggcccgcctcagcggcagcgcccttcccagtctcagatccgcgtcgtcgcggcccctccccctctcccgtgcgctgcgtcccccaattcccgctccccacgcacccagacacgccgagcgggagaggaagcgacagccagcagccgaggcggccagcgccagcgctggcatgaccactcccactcccagtggcgacggctcgcccccgggctcctccgacctcgtgcccccttcctaccccgagatgatcgtcgccgcgatcaccgccctcgccgaggagaacggctccagccaggccgccatcgcgcgccgcatcgaggcgcaggcccgcggcgacctgccggcctcgcacccggcgctcgtcgccgcccacctctcgcgcatgtccgccgcaggggagctcgtcgccgtcgcgggggggaagtacgcgctgcccccgccgccggcgcagccggcgccggagtcaccggctgacgacggcgaagacgatgactgcgctgacgaggtggacgaggaagaggaggcgccggagcctctgcccgtgcctgtgccgcagccgcccgccaagcgcgggcgtgggaggcccccgaagccgcggaccgcggacttacgatgcatagcaaatactcctctggatgaagaaagtgcattatctcaaatggttacctgcatagaagatctccaagaaattgtcaactgcaggaagcatgagtctctcacagtgcagacatttggaacacgaatagaaaaactacacagggagaagtatctgcagctctgtgactcggttgatatggacaaggttgattcaacaagcaccataatggatgaggaagacgacgttgttcgtagcttgcgcgcaagtcctgtccatccaatcaaggatcgcacttcaattgatgactttgaaatcatcaaacctattagccgtggagcatttggacgtgttttcttggccaagaaaagaactacgggagacctttttgctataaaggttcttaggaaggcagatatgattcggaaaaatgctgtcgagagtatattggctgaacgtgatatattgattacagtcaggaacccttttgtggtacggtttttctattcgtttacctcacgggataatttgtatctggtcatggagtacctgaatggaggggacctttactcattactgaggaatttagggtgcctggatgaagacgttgttcgtgtgtatcttgcagaagttgtactagctttggaatatttgcactctatgcacatagtccatagggatctaaagcctgacaacttgttgatagcccatgatggacatattaaggttttgggttgtccaaggttggtttgattaacaacacatatgatctgtctcgccctgttgttagtggggcttcactgtatggagatgatgagcctcagatgaatgaattcgagcaaatggatcaccgagcacggagacaaaatcgttctgctgttggaactcctgattatttagcaccagaaatcattttggggacaggacatggttgcagtgcagattggtggtccgttggtgtcattctatttgagctcattgttggcatacctccgttcaatgcagaacacccccagacaatttttgacaatattctgaattacaaaataccttggccgcatgtcccggaagagatgagttttgatgcacaagatttaattgacaaattattgaccgaagatcctcatcaacgactaggagcaaatggcgcctcagaggttaaacaacatccatttttcaaagacattagctgggatacccttgctaggcagaaggctgcctttgttccctcctcagataatgcatttgatactagctacttcaccagtcgctattcctggaatccatcagatggaaacatatatgaagcatacgagtttgaggattccagtgataatggaagccttagtggaagcagtagttgtctgagcaaccgccaagatgacatgacggaggacagcgatggcctcaatgagtttgaatctagtgcaaatgtcaattattctttcagcaacttctcgttcaagaatcatgcttccatcaattatgatatgttcaccaaaggattgaaggatgatccaccgccaagaactgaaacgtagcaatcaatccaaatttggactctcatccgagtaatcaaacagtctacaaggtgctcgcgcgatgtaggtcttgtacatgtaactaggcattttcactcttatatcacctcttctattggcacctggttatctataacaatgttatagttgttactgtcacttgtgcagatcaaagtgtgaggcatggtctgttccaattgaggctgttcctacatctcccggagccgagtacagttttgctgttaccttgttttcatgaccaattgacatgccatcatcagtgaatcacccttgaccgaattgggcagagcgctgtctttttgttcccctttgcttttttttttaaaaaaatcagtccattatgagccttgggtttgcggagattggcccaggttactgtattcagaatacaacccctgaagatgtaggtgggttttaggaaattgccattctggcatttatagttgacgatggtttgttaagctggtagcccgctggatttcctgcggccagaaatgttcacagcattttttatggccatgggatacatcattttgctaaatgtgtccagtgtcccacagaatctgggacattataagaataggaaccgattgaggctggtgctgtttgtttcaacagagagtacgggaacggtaaatgcaactagcaaacggtgataattgttgcaaaggaataaaaacgctctctgtttggttcagctttgggagcgcagcgtccaaatagttgccgctgagactgaaagtttggctactgtatttcaaaatactct

SEQ ID NO: 47846 - DNA, 2871 bp, Zea Mays
agattccttgtcgaaactgtacttgcattccatgaggcccgcctcagcggcagcgcccttcccagtctcagatccgcgtcgtcgcggcccctccccctctcccgtgcgctgcgtcccccaattcccgctccccacgcacccagacacgccgagcgggagaggaagcgacagccagcagccgaggcggccagcgccagcgctggcatgaccactcccactcccagtggcgacggctcgcccccgggctcctccgacctcgtgcccccttcctaccccgagatgatcgtcgccgcgatcaccgccctcgccgaggagaacggctccagccaggccgccatcgcgcgccgcatcgaggcgcaggcccgcggcgacctgccggcctcgcacccggcgctcgtcgccgcccacctctcgcgcatgtccgccgcaggggagctcgtcgccgtcgcgggggggaagtacgcgctgcccccgccgccggcgcagccggcgccggagtcaccggctgacgacggcgaagacgatgactgcgctgacgaggtggacgaggaagaggaggcgccggagcctctgcccgtgcctgtgccgcagccgcccgccaagcgcgggcgtgggaggcccccgaagccgcggaccgcggacttacgatgcatagcaaatactcctctggatgaagaaagtgcattatctcaaatggttacctgcatagaagatctccaagaaattgtcaactgcaggaagcatgagtctctcacagtgcagacatttggaacacgaatagaaaaactacacagggagaagtatctgcagctctgtgactcggttgatatggacaaggttgattcaacaagcaccataatggatgaggaagacgacgttgttcgtagcttgcgcgcaagtcctgtccatccaatcaaggatcgcacttcaattgatgactttgaaatcatcaaacctattagccgtggagcatttggacgtgttttcttggccaagaaaagaactacgggagacctttttgctataaaggttcttaggaaggcagatatgattcggaaaaatgctgtcgagagtatattggctgaacgtgatatattgattacagtcaggaacccttttgtggtacggtttttctattcgtttacctcacgggataatttgtatctggtcatggagtacctgaatggaggggacctttactcattactgaggaatttagggtgcctggatgaagacgttgttcgtgtgtatcttgcagaagttgtactagctttggaatatttgcactctatgcacatagtccatagggatctaaagcctgacaacttgttgatagcccatgatggacatattaagttgacaggttttgggttgtccaaggttggtttgattaacaacacatatgatctgtctcgccctgttgttagtggggcttcactgtatggagatgatgagcctcagatgaatgaattcgagcaaatggatcaccgagcacggagacaaaatcgttctgctgttggaactcctgattatttagcaccagaaatcattttggggacaggacatggttgcagtgcagattggtggtccgttggtgtcattctatttgagctcattgttggcatacctccgttcaatgcagaacacccccagacaatttttgacaatattctgaattacaaaataccttggccgcatgtcccggaagagatgagttttgatgcacaagatttaattgacaaattattgaccgaagatcctcatcaacgactaggagcaaatggcgcctcagaggttaaacaacatccatttttcaaagacattagctgggatacccttgctaggcagaaggctgcctttgttccctcctcagataatgcatttgatactagctacttcaccagtcgctattcctggaatccatcagatggaaacatatatgaagcatacgagtttgaggattccagtgataatggaagccttagtggaagcagtagttgtctgagcaaccgccaagatgacatgacggaggacagcgatggcctcaatgagtttgaatctagtgcaaatgtcaattattctttcagcaacttctcgttcaagaatcatgcttccatcaattatgatatgttcaccaaaggattgaaggatgatccaccgccaagaactgaaacgtagcaatcaatccaaatttggactctcatccgagtaatcaaacagtctacaagttgttactgtcacttgtgcagatcaaagtgtgaggcatggtctgttccaattgaggctgttcctacatctcccggagccgagtacagttttgctgttaccttgttttcatgaccaattgacatgccatcatcagtgaatcacccttgaccgaattgggcagagcgctgtctttttgttcccctttgcttttttttttaaaaaaatcagtccattatgagccttgggtttgcggagattggcccaggttactgtattcagaatacaacccctgaagatgtaggtgggttttaggaaattgccattctggcatttatagttgacgatggtttgttaagctggtagcccgctggatttcctgcggccagaaatgttcacagcattttttatggccatgggatacatcattttgctaaatgtgtccagtgtcccacagaatctgggacattataagaataggaaccgattgaggctggtgctgtttgtttcaacagagagtacgggaacggtaaatgcaactagcaaacggtgataattgttgcaaaggaataaaaacgctctctgtttggttcagctttgggagcgcagcgtccaaatagttgccgctgagactgaaagtttggctactgtatttcaaaatactct

SEQ ID NO: 47847 - DNA, 3180 bp, Zea Mays
agattccttgtcgaaactgtacttgcattccatgaggcccgcctcagcggcagcgcccttcccagtctcagatccgcgtcgtcgcggcccctccccctctcccgtgcgctgcgtcccccaattcccgctccccacgcacccagacacgccgagcgggagaggaagcgacagccagcagccgaggcggccagcgccagcgctggcatgaccactcccactcccagtggcgacggctcgcccccgggctcctccgacctcgtgcccccttcctaccccgagatgatcgtcgccgcgatcaccgccctcgccgaggagaacggctccagccaggccgccatcgcgcgccgcatcgaggcgcaggcccgcggcgacctgccggcctcgcacccggcgctcgtcgccgcccacctctcgcgcatgtccgccgcaggggagctcgtcgccgtcgcgggggggaagtacgcgctgcccccgccgccggcgcagccggcgccggagtcaccggctgacgacggcgaagacgatgactgcgctgacgaggtggacgaggaagaggaggcgccggagcctctgcccgtgcctgtgccgcagccgcccgccaagcgcgggcgtgggaggcccccgaagccgcggaccgcggacttacgatgcatagcaaatactcctctggatgaagaaagtgcattatctcaaatggttacctgcatagaagatctccaagaaattgtcaactgcaggaagcatgagtctctcacagtgcagacatttggaacacgaatagaaaaactacacagggagaagtatctgcagctctgtgactcggttgatatggacaaggttgattcaacaagcaccataatggatgaggaagacgacgttgttcgtagcttgcgcgcaagtcctgtccatccaatcaaggatcgcacttcaattgatgactttgaaatcatcaaacctattagccgtggagcatttggacgtgttttcttggccaagaaaagaactacgggagacctttttgctataaaggttcttaggaaggcagatatgattcggaaaaatgctgtcgagagtatattggctgaacgtgatatattgattacagtcaggaacccttttgtggtacggtttttctattcgtttacctcacgggataatttgtatctggtcatggagtacctgaatggaggggacctttactcattactgaggaatttagggtgcctggatgaagacgttgttcgtgtgtatcttgcagaagttgtactagctttggaatatttgcactctatgcacatagtccatagggatctaaagcctgacaacttgttgatagcccatgatggacatattaagttgacaggttttgggttgtccaaggttggtttgattaacaacacatatgatctgtctcgccctgttgttagtggggcttcactgtatggagatgatgagcctcagatgaatgaattcgagcaaatggatcaccgagcacggagacaaaatcgttctgctgttggaactcctgattatttagcaccagaaatcattttggggacaggacatggttgcagtgcagattggtggtccgttggtgtcattctatttgagctcattgttggcatacctccgttcaatgcagaacacccccagacaatttttgacaatattctgaattacaaaataccttggccgcatgtcccggaagagatgagttttgatgcacaagatttaattgacaaattattgaccgaagatcctcatcaacgactaggagcaaatggcgcctcagaggttaaacaacatccatttttcaaagacattagctgggatacccttgctaggcagaaggctgcctttgttccctcctcagataatgcatttgatactagctacttcaccagtcgctattcctggaatccatcagatggaaacatatatgaagcatacgagtttgaggattccagtgataatggaagccttagtggaagcagtagttgtctgagcaaccgccaagatgacatgacggaggacagcgatggcctcaatgagtttgaatctagtgcaaatgtcaattattctttcagcaacttctcgttcaagcgtgcagcggttggatcaccgtctaaaagttcagaatgcttgcttgcacgcttgcacctaagacctgcttgcacaatattcgttccctatttgtaaatatcaacatttgcaattgcaatgttatcgcaatagcaattgtagtactgctgtacctgtgagccagatcttgaatgctacaaaggcagtatcctttctttttagtatgatgatatatgcagctcctgcgtgtttgagacaaaaaaaaaatgttgccatccattgataacttccctagaaaattgtaccacaacattcctctgacatcatcttcggtgcagaatcatgcttccatcaattatgatatgttcaccaaaggattgaaggatgatccaccgccaagaactgaaacgtagcaatcaatccaaatttggactctcatccgagtaatcaaacagtctacaaggtgctcgcgcgatatcaaagtgtgaggcatggtctgttccaattgaggctgttcctacatctcccggagccgagtacagttttgctgttaccttgttttcatgaccaattgacatgccatcatcagtgaatcacccttgaccgaattgggcagagcgctgtctttttgttcccctttgcttttttttttaaaaaaatcagtccattatgagccttgggtttgcggagattggcccaggttactgtattcagaatacaacccctgaagatgtaggtgggttttaggaaattgccattctggcatttatagttgacgatggtttgttaagctggtagcccgctggatttcctgcggccagaaatgttcacagcattttttatggccatgggatacatcattttgctaaatgtgtccagtgtcccacagaatctgggacattataagaataggaaccgattgaggctggtgctgtttgtttcaacagagagtacgggaacggtaaatgcaactagcaaacggtgataattgttgcaaaggaataaaaacgctctctgtttggttcagctttgggagcgcagcgtccaaatagttgccgctgagactgaaagtttggctactgtatttcaaaatactct

SEQ ID NO: 47848 - DNA, 3167 bp, Zea Mays
agattccttgtcgaaactgtacttgcattccatgaggcccgcctcagcggcagcgcccttcccagtctcagatccgcgtcgtcgcggcccctccccctctcccgtgcgctgcgtcccccaattcccgctccccacgcacccagacacgccgagcgggagaggaagcgacagccagcagccgaggcggccagcgccagcgctggcatgaccactcccactcccagtggcgacggctcgcccccgggctcctccgacctcgtgcccccttcctaccccgagatgatcgtcgccgcgatcaccgccctcgccgaggagaacggctccagccaggccgccatcgcgcgccgcatcgaggcgcaggcccgcggcgacctgccggcctcgcacccggcgctcgtcgccgcccacctctcgcgcatgtccgccgcaggggagctcgtcgccgtcgcgggggggaagtacgcgctgcccccgccgccggcgcagccggcgccggagtcaccggctgacgacggcgaagacgatgactgcgctgacgaggtggacgaggaagaggaggcgccggagcctctgcccgtgcctgtgccgcagccgcccgccaagcgcgggcgtgggaggcccccgaagccgcggaccgcggacttacgatgcatagcaaatactcctctggatgaagaaagtgcattatctcaaatggttacctgcatagaagatctccaagaaattgtcaactgcaggaagcatgagtctctcacagtgcagacatttggaacacgaatagaaaaactacacagggagaagtatctgcagctctgtgactcggttgatatggacaaggttgattcaacaagcaccataatggatgaggaagacgacgttgttcgtagcttgcgcgcaagtcctgtccatccaatcaaggatcgcacttcaattgatgactttgaaatcatcaaacctattagccgtggagcatttggacgtgttttcttggccaagaaaagaactacgggagacctttttgctataaaggttcttaggaaggcagatatgattcggaaaaatgctgtcgagagtatattggctgaacgtgatatattgattacagtcaggaacccttttgtggtacggtttttctattcgtttacctcacgggataatttgtatctggtcatggagtacctgaatggaggggacctttactcattactgaggaatttagggtgcctggatgaagacgttgttcgtgtgtatcttgcagaagttgtactagctttggaatatttgcactctatgcacatagtccatagggatctaaagcctgacaacttgttgatagcccatgatggacatattaagttgacaggttttgggttgtccaaggttggtttgattaacaacacatatgatctgtctcgccctgttgttagtggggcttcactgtatggagatgatgagcctcagatgaatgaattcgagcaaatggatcaccgagcacggagacaaaatcgttctgctgttggaactcctgattatttagcaccagaaatcattttggggacaggacatggttgcagtgcagattggtggtccgttggtgtcattctatttgagctcattgttggcatacctccgttcaatgcagaacacccccagacaatttttgacaatattctgaattacaaaataccttggccgcatgtcccggaagagatgagttttgatgcacaagatttaattgacaaattattgaccgaagatcctcatcaacgactaggagcaaatggcgcctcagaggttaaacaacatccatttttcaaagacattagctgggatacccttgctaggcagaaggctgcctttgttccctcctcagataatgcatttgatactagctacttcaccagtcgctattcctggaatccatcagatggaaacatatatgaagcatacgagtttgaggattccagtgataatggaagccttagtggaagcagtagttgtctgagcaaccgccaagatgacatgacggaggacagcgatggcctcaatgagtttgaatctagtgcaaatgtcaattattctttcagcaacttctcgttcaagcgtgcagcggttggatcaccgtctaaaagttcagaatgcttgcttgcacgcttgcacctaagacctgcttgcacaatattcgttccctatttgtaaatatcaacatttgcaattgcaatgttatcgcaatagcaattgtagtactgctgtacctgtgagccagatcttgaatgctacaaaggcagtatcctttctttttagtatgatgatatatgcagctcctgcgtgtttgagacaaaaaaaaaatgttgccatccattgataacttccctagaaaattgtaccacaacattcctctgacatcatcttcggtgcagaatcatgcttccatcaattatgatatgttcaccaaaggattgaaggatgatccaccgccaagaactgaaacgtagcaatcaatccaaatttggactctcatccgagtaatcaaacagtctacaagatcaaagtgtgaggcatggtctgttccaattgaggctgttcctacatctcccggagccgagtacagttttgctgttaccttgttttcatgaccaattgacatgccatcatcagtgaatcacccttgaccgaattgggcagagcgctgtctttttgttcccctttgcttttttttttaaaaaaatcagtccattatgagccttgggtttgcggagattggcccaggttactgtattcagaatacaacccctgaagatgtaggtgggttttaggaaattgccattctggcatttatagttgacgatggtttgttaagctggtagcccgctggatttcctgcggccagaaatgttcacagcattttttatggccatgggatacatcattttgctaaatgtgtccagtgtcccacagaatctgggacattataagaataggaaccgattgaggctggtgctgtttgtttcaacagagagtacgggaacggtaaatgcaactagcaaacggtgataattgttgcaaaggaataaaaacgctctctgtttggttcagctttgggagcgcagcgtccaaatagttgccgctgagactgaaagtttggctactgtatttcaaaatactct

SEQ ID NO: 47849 - DNA, 2879 bp, Zea Mays
agattccttgtcgaaactgtacttgcattccatgaggcccgcctcagcggcagcgcccttcccagtctcagatccgcgtcgtcgcggcccctccccctctcccgtgcgctgcgtcccccaattcccgctccccacgcacccagacacgccgagcgggagaggaagcgacagccagcagccgaggcggccagcgccagcgctggcatgaccactcccactcccagtggcgacggctcgcccccgggctcctccgacctcgtgcccccttcctaccccgagatgatcgtcgccgcgatcaccgccctcgccgaggagaacggctccagccaggccgccatcgcgcgccgcatcgaggcgcaggcccgcggcgacctgccggcctcgcacccggcgctcgtcgccgcccacctctcgcgcatgtccgccgcaggggagctcgtcgccgtcgcgggggggaagtacgcgctgcccccgccgccggcgcagccggcgccggagtcaccggctgacgacggcgaagacgatgactgcgctgacgaggtggacgaggaagaggaggcgccggagcctctgcccgtgcctgtgccgcagccgcccgccaagcgcgggcgtgggaggcccccgaagccgcggaccgcggacttacgatgcatagcaaatactcctctggatgaagaaagtgcattatctcaaatggttacctgcatagaagatctccaagaaattgtcaactgcaggaagcatgagtctctcacagtgcagacatttggaacacgaatagaaaaactacacagggagaagtatctgcagctctgtgactcggttgatatggacaaggttgattcaacaagcaccataatggatgaggaagacgacgttgttcgtagcttgcgcgcaagtcctgtccatccaatcaaggatcgcacttcaattgatgactttgaaatcatcaaacctattagccgtggagcatttggacgtgttttcttggccaagaaaagaactacgggagacctttttgctataaaggttcttaggaaggcagatatgattcggaaaaatgctgtcgagagtatattggctgaacgtgatatattgattacagtcaggaacccttttgtggtacggtttttctattcgtttacctcacgggataatttgtatctggtcatggagtacctgaatggaggggacctttactcattactgaggaatttagggtgcctggatgaagacgttgttcgtgtgtatcttgcagaagttgtactagctttggaatatttgcactctatgcacatagtccatagggatctaaagcctgacaacttgttgatagcccatgatggacatattaagttgacaggttttgggttgtccaaggttggtttgattaacaacacatatgatctgtctcgccctgttgttagtggggcttcactgtatggagatgatgagcctcagatgaatgaattcgagcaaatggatcaccgagcacggagacaaaatcgttctgctgttggaactcctgattatttagcaccagaaatcattttggggacaggacatggttgcagtgcagattggtggtccgttggtgtcattctatttgagctcattgttggcatacctccgttcaatgcagaacacccccagattattgaccgaagatcctcatcaacgactaggagcaaatggcgcctcagaggttaaacaacatccatttttcaaagacattagctgggatacccttgctaggcagaaggctgcctttgttccctcctcagataatgcatttgatactagctacttcaccagtcgctattcctggaatccatcagatggaaacatatatgaagcatacgagtttgaggattccagtgataatggaagccttagtggaagcagtagttgtctgagcaaccgccaagatgacatgacggaggacagcgatggcctcaatgagtttgaatctagtgcaaatgtcaattattctttcagcaacttctcgttcaagaatcatgcttccatcaattatgatatgttcaccaaaggattgaaggatgatccaccgccaagaactgaaacgtagcaatcaatccaaatttggactctcatccgagtaatcaaacagtctacaaggtgctcgcgcgatgtaggtcttgtacatgtaactaggcattttcactcttatatcacctcttctattggcacctggttatctataacaatgttatagttgttactgtcacttgtgcagatcaaagtgtgaggcatggtctgttccaattgaggctgttcctacatctcccggagccgagtacagttttgctgttaccttgttttcatgaccaattgacatgccatcatcagtgaatcacccttgaccgaattgggcagagcgctgtctttttgttcccctttgcttttttttttaaaaaaatcagtccattatgagccttgggtttgcggagattggcccaggttactgtattcagaatacaacccctgaagatgtaggtgggttttaggaaattgccattctggcatttatagttgacgatggtttgttaagctggtagcccgctggatttcctgcggccagaaatgttcacagcattttttatggccatgggatacatcattttgctaaatgtgtccagtgtcccacagaatctgggacattataagaataggaaccgattgaggctggtgctgtttgtttcaacagagagtacgggaacggtaaatgcaactagcaaacggtgataattgttgcaaaggaataaaaacgctctctgtttggttcagctttgggagcgcagcgtccaaatagttgccgctgagactgaaagtttggctactgtatttcaaaatactct

SEQ ID NO: 47850 - DNA, 2884 bp, Zea Mays
agattccttgtcgaaactgtacttgcattccatgaggcccgcctcagcggcagcgcccttcccagtctcagatccgcgtcgtcgcggcccctccccctctcccgtgcgctgcgtcccccaattcccgctccccacgcacccagacacgccgagcgggagaggaagcgacagccagcagccgaggcggccagcgccagcgctggcatgaccactcccactcccagtggcgacggctcgcccccgggctcctccgacctcgtgcccccttcctaccccgagatgatcgtcgccgcgatcaccgccctcgccgaggagaacggctccagccaggccgccatcgcgcgccgcatcgaggcgcaggcccgcggcgacctgccggcctcgcacccggcgctcgtcgccgcccacctctcgcgcatgtccgccgcaggggagctcgtcgccgtcgcgggggggaagtacgcgctgcccccgccgccggcgcagccggcgccggagtcaccggctgacgacggcgaagacgatgactgcgctgacgaggtggacgaggaagaggaggcgccggagcctctgcccgtgcctgtgccgcagccgcccgccaagcgcgggcgtgggaggcccccgaagccgcggaccgcggacttacgatgcatagcaaatactcctctggatgaagaaagtgcattatctcaaatggttacctgcatagaagatctccaagaaattgtcaactgcaggaagcatgagtctctcacagtgcagacatttggaacacgaatagaaaaactacacagggagaagtatctgcagctctgtgactcggttgatatggacaaggttgattcaacaagcaccataatggatgaggaagacgacgttgttcgtagcttgcgcgcaagtcctgtccatccaatcaaggatcgcacttcaattgatgactttgaaatcatcaaacctattagccgtggagcatttggacgtgttttcttggccaagaaaagaactacgggagacctttttgctataaaggttcttaggaaggcagatatgattcggaaaaatgctgtcgagagtatattggctgaacgtgatatattgattacagtcaggaacccttttgtggtacggtttttctattcgtttacctcacgggataatttgtatctggtcatggagtacctgaatggaggggacctttactcattactgaggaatttagggtgcctggatgaagacgttgttcgtgtgtatcttgcagaagttgtactagctttggaatatttgcactctatgcacatagtccatagggatctaaagcctgacaacttgttgatagcccatgatggacatattaagttgacaggttttgggttgtccaaggttggtttgattaacaacacatatgatctgtctcgccctgttgttagtggggcttcactgtatggagatgatgagcctcagatgaatgaattcgagcaaatggatcaccgagcacggagacaaaatcgttctgctgttggaactcctgattatttagcaccagaaatcattttggggacaggacatggttgcagtgcagattggtggtccgttggtgtcattctatttgagctcattgttggcatacctccgttcaatgcagaacacccccagacaatttttgacaatattctgaattacaaaataccttggccgcatgtcccggaagagatgagttttgatgcacaagatttaattgacaaattattgaccgaagatcctcatcaacgactaggagcaaatggcgcctcagaggttaaacaacatccatttttcaaagacattagctgggatacccttgctaggcagaaggctgcctttgttccctcctcagataatgcatttgatactagctacttcaccagtcgctattcctggaatccatcagatggaaacatatatgaagcatacgagtttgaggattccagtgataatggaagccttagtggaagcagtagttgtctgagcaaccgccaagatgacatgacggaggacagcgatggcctcaatgagtttgaatctagtgcaaatgtcaattattctttcagcaacttctcgttcaagaatcatgcttccatcaattatgatatgttcaccaaaggattgaaggatgatccaccgccaagaactgaaacgtagcaatcaatccaaatttggactctcatccgagtaatcaaacagtctacaaggtgctcgcgcgatttgttactgtcacttgtgcagatcaaagtgtgaggcatggtctgttccaattgaggctgttcctacatctcccggagccgagtacagttttgctgttaccttgttttcatgaccaattgacatgccatcatcagtgaatcacccttgaccgaattgggcagagcgctgtctttttgttcccctttgcttttttttttaaaaaaatcagtccattatgagccttgggtttgcggagattggcccaggttactgtattcagaatacaacccctgaagatgtaggtgggttttaggaaattgccattctggcatttatagttgacgatggtttgttaagctggtagcccgctggatttcctgcggccagaaatgttcacagcattttttatggccatgggatacatcattttgctaaatgtgtccagtgtcccacagaatctgggacattataagaataggaaccgattgaggctggtgctgtttgtttcaacagagagtacgggaacggtaaatgcaactagcaaacggtgataattgttgcaaaggaataaaaacgctctctgtttggttcagctttgggagcgcagcgtccaaatagttgccgctgagactgaaagtttggctactgtatttcaaaatactct

SEQ ID NO: 47851 - DNA, 909 bp, Zea Mays
ggaaaaaaaatatttgtttggtgagccacgctcccatccggatccgcgggggaggacggcgatttcgtccccagcctcatgaggtcgggaaggggttcccgcacccacatttgtgaacctcgccggcgcccatcccctgccttcacgaacccgccgccgcccgtcccctactcttcctcgtgcacccaccacgacgacgacgacgacgactgcgccgacgaggtggacgaggaagaggaggcgccggagcctctgctcgtgcccgtgcctgtgccgcagccgcccgccaagcgcgggcgtgggaggcccccgaagccgcggcccgctggcttccccatcggcgtccccggagccgctgcgtcccccgccgccgcgccgcgacggcgcggccgccctcccaagccgcgtgacccgcacgcgccgcccaagatcccgcgcccgcgcggccggccgcgcaagaacccgctcccggaggggatggccccgcgcccgcgccccggcgcgccggcgtcggccaaggcagcgcgcccgcagttcgccgaggtcggattcgtgtgacgcgaggggctctcacccgccgcggcgagctggcgcaagctaacattctgcccctgtttcagctcttgtctgtctgatgtgggtctcgtctcagttcgtgtgttgctgtctaatccggggagggtaggggggcaggaatatgaatggaggcaacttcgtcggtgtgttggtgtctgtgtagtctctacgttagtattggtgggtggtggccggagtggtgtggctccggcggtgtatcccgtgtctcctcgccgcgttcgcgcaatccaatgcagttgtctgatcgtttcatttgcctgccttgtcttgtgattcagccaaaatcgcagtgatctcgcagctctcttggcc

SEQ ID NO: 47852 - DNA, 6339 bp, Zea Mays
cgcaactgccatcgtcctctgctcgtcgcgtcgttctcctctcgaccgcatcgcgcccgtggcggggaacgagccatcgacgccgcgtcgcgtgcctttcttcttcgtcccccccctgcctgcctagctgtctcaggctgccgcccgcccagccccaaaacattcggcagccgagtcaaccgagaacacgagccatccacccaccctgtcccttccccggctttcccccgtcctcggctccaccaattgctctcgcgtcagtggaaggaaaaaccaagggcgagggagggaggagcgcatctccgccccgcccgcgttcccgtaccccgatccgccacatgatctgacaccgcattgccgccgaggtgacccctcccgcccccagaatggaggcgctcaacgagctctgcgacctggtggccgcgcacccggatctcctcctcgccgacaagcttgcatggctctcctcccgctgcgccgccgccccgggtgccgccgccccgcagcgtgcgtcgagggcgcaccttcattcgctcctcgcgttggcgcgcctcctcccggcgggtggcgccggtgccggtgccgaaggcgatgcggcgcccccggccccactcctattcttcctcgcgtcccacgccttcctctcgccggccttctggccccagtctttcgccccggcgccgtttctcgctaggctcctcccgctcctcgccgcggccccatcctcccccgccctttcttccgcgctctccgccgccctcctcgcggcgctcgacgtcgccgacccgacctccgcgccgctcgcccgcgcgtttctctccgccgccgctgccgcggcgcccctgccgctcctccccgcggatgccgcgcccatcgctgcccggctgctcctcgagtttcttggctccgaggaggagccgatcagggccaaggggaagggagaggacaccttgggcgaggaaaacggtggggcaaaggaggtagtgcggaggttcgaggaggaggaggtcgatgagctggagcggaaggaagtcgcattcagactgaccgtgcatatgcttgggggcgagggtgggctagagaccgagcagattgggaaggtcaggaatgctgctgcgcgacaggtccgatcactcacggattttctcaagattagaaagcgggactggagggagcagggtacacagctcagggcaaggataaacaccaaattgatgtgttgtcaagctgcagtgggggtgctggtgcgaagcgtttccaccatggatactgatatcaaatcttcgaaggatatgctccagcagactctagcttggttcatcgaggccaccaagtcgtgcatcctgtcatcctggcggaaactgaagatatgcgaggagctattttgcacactgctcaatgggatcagccagataactgtctcacgtgggggccaacttctgccggtgcttttgattcccttaaaaccgcttgttgtgagcacatgttcgcaggctgacatggcaggcagtagtcctggggctctatttgaagcagttgtgaagttgagctgtgagatcatagagtttggctggacaaaggatagggcccttgttgacacatttgttatgcgtctagctgcttatgttcgtgagcggaatgattacgaggaggaggatggcaaaggaaaagaggcagttccagttattcgacttaatgtcatacgccttttggctgagttatgtgtttgcttgaaaaaatgggaagttgtggacatgattttaccccttttcattgaacatctagaagagggtgatgcttcatctccaagttcattgcgtttacgattattagatgcaatatctcgtgttgcgtgcttgggttttgaaaaatcatatcgtgagagtattgtcttgatgacaagaagctatcttgacaaagttaaagctctaggggcttcagaaaacaatacagttccatcagaagcaacaactgagcgaacagaaactcttcctgcaggctttctgcttgttgcttccaaccttacaagcacaaaactcaggtctgattatcgtcataggttactgtctctgtgctcagatgtggggctagttgctgaatctaaaagtgggaggagtggtgctgatttgatgggtccgttacttcctgcagttgctgatatatgttctgattttgatccagtgtccactgttgagccatcattattgaaactattccgaaacctttggttctacgttgtattgtttgggctagctccacccatacagaataatgaggcacctacaaaaccggtttccacttcattaggtacagcagaaagcagcagtgctatagcccttcaagctgtagctggaccatacatgtggaacagccaatggtctgtagcagtgcaacgtattgcgcaaggaacacctcctctggttgttagttctgtaaaatggcttgaagatgagctagagttaaacactctacacaacccaggtagtcgtggtggtaatggtaatgaaaattctgctgttgggcagagagctgcactttctgctgctttgggaggtcgagttgaggtagcagcaatgaacactatttcaggggtaaaagctacgtacctacttgcagttgctttcctggagatactacgttttagttgcaatggtggcatactctcggctacatctacattgaatagatcaaacagtgctttcagttgtgtatttgaatacctgctcactccaaatttgacaccagcagtaactcagtgtttgacggcagttgcacatagagcttttgaaacagtgctgtcgtggctggatgatcgcatatctgacataggtgaaggagctgatgttagagaatcggttctttctgttcatgcttgctttctgataaaaagcatgtcccagagagacgagcatgttcgtgatgtgagtgttaagcttttaacgcagctgaaggaaaagttcccacaggaaaatttttgcaagccaagtggagtacaaagaacacaacatacagcagatgttgtttcacttttatctgagatacgtatttgtagtggaaagaatgattggaacggtattaggacggccaatgttcctgcagttatggactcagcagcagcagcatcgggagccaaaaaagaagcacctgacttcactttggaagtactctctactgcagtagtgagtgcaactgtgaagtgcaatcatgctggtgagattgctggtatgagaaggctgtttagtactatgggaggcataaacatgggcatgtctcctcctgggacacaatctttgcacccccatcagtcatttgatgaagtttttgtctccaagtttgtcagtcttcttcagaactttgttgttgcagctgagaaacaaccaatagataattcacaatttcgtgaaacatgttctcaagctacagcattacttcttgatcatatggtgtctgattctagagcaaacctggaagggttttctcagcttatacggcttctatgttggtgtcctgcttatatttctacccctgatgcaatggaaactggaatctacatctggacatggctagtatcggctgcgccttctttaggtcctcttgtgcttgcggaacttgttgatgcatggctgtggaccatagatacaaagcgtggattgtttgcatcagatatgaattactgtggcccagatgcaaaattgaggccgcatcttatcgctggtgagcctgaggcaccaccagaaaaggacccagtagaagcaataatagcccatagactctggcttggcttcttcattgatcggtttgaggtggttcggcatgacagcattgaacaacttctacttctaggtcgaatgttacaaggaacaatgaagtctccagctcatttttctcaccatcctgctgctactggcactttctttactgcgatgctccttggattgaagttttgctcatgccagtctcaatctaacttgcagaagtgtaatatggggcttcagttgttagaggacagggtataccgtgctgctttgggatggttttcttatgcgcctgagtggtatgaatctccaaacaaaacttatgctcagagagaagctcaatctgtgtcagtatttgttcattttctacaaaatgagcgcaccagtggtcctgtcgattcggtttcaaagttacagggacgtgaaggtgaacctagcatggcagatcacattcatcctgtttggggctgtgttgacaactacacaaatgcaagggaaaagcgtaaacagttacttctgacactttctcagaatgaggcagacagacttgaagtctgggcacaaccaatacatacaaaagatacaacgacttttcgcggtaaaatcagctcggataaatggattgatcatgtcagaactgcttttgctgttgatcctcgaattgctctttctatgcctttgaggtttccaacgaatgctacaatgcaatctgagattactcagttggtacagacacgattactggagcttcgtacaattcctgaagcattaccctttttcattactccaaaagcagtagatgaaaattcagtgctgttacagcaactaccacactgggctccatgttctgttacacaggcattggagtttcttactcctccttataaaggacatccacgtgttatggcctatgtccttcgtgtcttggagacttacccccctgagactgttaccttttttatgccacaattggtacaatctctcagatatgatgaagggaaactggttgaagggtacttgcttggagctactcgaagaagtaatatatttgctcatatcttgatatggcatctgcagggagaatatgttgatgaatctgagaaagatgcagctgctctgaagggcagtgcattccagtccttgctcccagctgttaaggacaaaattatagagagttttactccagaggctcgtgacatgtttgaaagagaatttgatttctttgacaaagtcacatctatttctggtgttcttttccctctccccaaggacgagcggagagcgggtataagaagggaactggagaagatttctattccaggtgatgacctctacctacctactgcaacaaacaagctagtacggggtatacagttggacagcggtattcctctccagtctgctgcaaaagttccaataatgattacttttaacgttgttgaccgtgacggggacccaaatgatgtaaaaccacaggcttgtatttttaaggttggtgatgactgtagacaagatgtgctggcgctgcaagtgattgctctattaagggatgtatttcaagctgtcggattaaacctgtatctttttccatatggtgttttgcctactggaccaggccgaggcataattgaggtggtcccagatactcgaagtagaaatcaaatgggtgaaacaactgatggtggtttattagagatatttcagcaagattatggtcctgtaggttcaccttcttttgaaactgctcgagaaatgtttatgatcagtagtgctggatatgctgttgctagcttactccttcaaccgaaggatcggcataatggcaatcttctctttgatagccatgggagattagttcacattgattttggttttattttggagatttcacctggaggtaacatggggtttgagagtgcacatttcaagctaagccacgagatgactcaattgctggatccatctggaactatgaagagtgatacatggaaccaatttctcaggttgtgtgtcaaaggatacctagcagcaaggaggcatatgaatgggattttaagtacagtcaacctaatggtggacagtggccttccttgctttagcaggggagatcctatcaataatcttcggaagcggtttcatccagagatgaatgaacgtgaggccgctaacttcatggtacgaacatgtgctgatgcttacaacaagtggactaccgcagggtatgacttgattcagtacttgcagcagggtattgagaaatagtttgtttctcgttttttaagtggcgttcgtgtacatcaattgtatgtagccactatctttttatgtagaatttattttttgagttgtatcatcgggcaaggatggaattcatgtgattaacgtaggatgcttggtgcaaagaggcaattctttttttttcttgcactgtaaaactgccaagaaagtagctagtaagttgatcaagattctgtattgctgtcgcagaatgcattttcgtttactagacatgtatgattcgcatttttatcatgtgatttcattttttccctcgtcaccagatacgagtggctcattgttagac

SEQ ID NO: 47853 - DNA, 6557 bp, Zea Mays
cgcaactgccatcgtcctctgctcgtcgcgtcgttctcctctcgaccgcatcgcgcccgtggcggggaacgagccatcgacgccgcgtcgcgtgcctttcttcttcgtcccccccctgcctgcctagctgtctcaggctgccgcccgcccagccccaaaacattcggcagccgagtcaaccgagaacacgagccatccacccaccctgtcccttccccggctttcccccgtcctcggctccaccaattgctctcgcgtcagtggaaggaaaaaccaagggcgagggagggaggagcgcatctccgccccgcccgcgttcccgtaccccgatccgccacatgatctgacaccgcattgccgccgaggtgacccctcccgcccccagaatggaggcgctcaacgagctctgcgacctggtggccgcgcacccggatctcctcctcgccgacaagcttgcatggctctcctcccgctgcgccgccgccccgggtgccgccgccccgcagcgtgcgtcgagggcgcaccttcattcgctcctcgcgttggcgcgcctcctcccggcgggtggcgccggtgccggtgccgaaggcgatgcggcgcccccggccccactcctattcttcctcgcgtcccacgccttcctctcgccggccttctggccccagtctttcgccccggcgccgtttctcgctaggctcctcccgctcctcgccgcggccccatcctcccccgccctttcttccgcgctctccgccgccctcctcgcggcgctcgacgtcgccgacccgacctccgcgccgctcgcccgcgcgtttctctccgccgccgctgccgcggcgcccctgccgctcctccccgcggatgccgcgcccatcgctgcccggctgctcctcgagtttcttggctccgaggaggagccgatcagggccaaggggaagggagaggacaccttgggcgaggaaaacggtggggcaaaggaggtagtgcggaggttcgaggaggaggaggtcgatgagctggagcggaaggaagtcgcattcagactgaccgtgcatatgcttgggggcgagggtgggctagagaccgagcagattgggaaggtcaggaatgctgctgcgcgacaggtccgatcactcacggattttctcaagattagaaagcgggactggagggagcagggtacacagctcagggcaaggataaacaccaaattgatgtgttgtcaagctgcagtgggggtgctggtgcgaagcgtttccaccatggatactgatatcaaatcttcgaaggatatgctccagcagactctagcttggttcatcgaggccaccaagtcgtgcatcctgtcatcctggcggaaactgaagatatgcgaggagctattttgcacactgctcaatgggatcagccagataactgtctcacgtgggggccaacttctgccggtgcttttgattcccttaaaaccgcttgttgtgagcacatgttcgcaggctgacatggcaggcagtagtcctggggctctatttgaagcagttgtgaagttgagctgtgagatcatagagtttggctggacaaaggatagggcccttgttgacacatttgttatgcgtctagctgcttatgttcgtgagcggaatgattacgaggaggagattgcaagcacaccgattcagattgttaaattgattatggttgaggatggcaaaggaaaagaggcagttccagttattcgacttaatgtcatacgccttttggctgagttatgtgtttgcttgaaaaaatgggaagttgtggacatgattttaccccttttcattgaacatctagaagagggtgatgcttcatctccaagttcattgcgtttacgattattagatgcaatatctcgtgttgcgtgcttgggttttgaaaaatcatatcgtgagagtattgtcttgatgacaagaagctatcttgacaaagttaaagctctaggggcttcagaaaacaatacagttccatcagaagcaacaactgagcgaacagaaactcttcctgcaggctttctgcttgttgcttccaaccttacaagcacaaaactcaggtctgattatcgtcataggttactgtctctgtgctcagatgtggggctagttgctgaatctaaaagtgggaggagtggtgctgatttgatgggtccgttacttcctgcagttgctgatatatgttctgattttgatccagtgtccactgttgagccatcattattgaaactattccgaaacctttggttctacgttgtattgtttgggctagctccacccatacagaataatgaggcacctacaaaaccggtttccacttcattaggtacagcagaaagcagcagtgctatagcccttcaagctgtagctggaccatacatgtggaacagccaatggtctgtagcagtgcaacgtattgcgcaaggaacacctcctctggttgttagttctgtaaaatggcttgaagatgagctagagttaaacactctacacaacccaggtagtcgtggtggtaatggtaatgaaaattctgctgttgggcagagagctgcactttctgctgctttgggaggtcgagttgaggtagcagcaatgaacactatttcaggggtaaaagctacgtacctacttgcagttgctttcctggagatactacgttttagttgcaatggtggcatactctcggctacatctacattgaatagatcaaacagtgctttcagttgtgtatttgaatacctgctcactccaaatttgacaccagcagtaactcagtgtttgacggcagttgcacatagagcttttgaaacagtgctgtcgtggctggatgatcgcatatctgacataggtgaaggagctgatgttagagaatcggttctttctgttcatgcttgctttctgataaaaagcatgtcccagagagacgagcatgttcgtgatgtgagtgttaagcttttaacgcagctgaaggaaaagttcccacaggtcctctggaactcttcatgcttggatttacttcttatttctgttcacaatgagttgacttctggtccagtcagtgatcctgcttgggttgcaactgtacgctcactgtatcaaaagatcgctagggaatggttaacaagtgctctttcatatgctccatgtaccacacaaggccttatacaggaaaatttttgcaagccaagtggagtacaaagaacacaacatacagcagatgttgtttcacttttatctgagatacgtatttgtagtggaaagaatgattggaacggtattaggacggccaatgttcctgcagttatggactcagcagcagcagcatcgggagccaaaaaagaagcacctgacttcactttggaagtactctctactgcagtagtgagtgcaactgtgaagtgcaatcatgctggtgagattgctggtatgagaaggctgtttagtactatgggaggcataaacatgggcatgtctcctcctgggacacaatctttgcacccccatcagtcatttgatgaagtttttgtctccaagtttgtcagtcttcttcagaactttgttgttgcagctgagaaacaaccaatagataattcacaatttcgtgaaacatgttctcaagctacagcattacttcttgatcatatggtgtctgattctagagcaaacctggaagggttttctcagcttatacggcttctatgttggtgtcctgcttatatttctacccctgatgcaatggaaactggaatctacatctggacatggctagtatcggctgcgccttctttaggtcctcttgtgcttgcggaacttgttgatgcatggctgtggaccatagatacaaagcgtggattgtttgcatcagatatgaattactgtggcccagatgcaaaattgaggccgcatcttatcgctggtgagcctgaggcaccaccagaaaaggacccagtagaagcaataatagcccatagactctggcttggcttcttcattgatcggtttgaggtggttcggcatgacagcattgaacaacttctacttctaggtcgaatgttacaaggaacaatgaagtctccagctcatttttctcaccatcctgctgctactggcactttctttactgcgatgctccttggattgaagttttgctcatgccagtctcaatctaacttgcagaagtgtaatatggggcttcagttgttagaggacagggtataccgtgctgctttgggatggttttcttatgcgcctgagtggtatgaatctccaaacaaaacttatgctcagagagaagctcaatctgtgtcagtatttgttcattttctacaaaatgagcgcaccagtggtcctgtcgattcggtttcaaagttacagggacgtgaaggtgaacctagcatggcagatcacattcatcctgtttggggctgtgttgacaactacacaaatgcaagggaaaagcgtaaacagttacttctgacactttctcagaatgaggcagacagacttgaagtctgggcacaaccaatacatacaaaagatacaacgacttttcgcggtaaaatcagctcggataaatggattgatcatgtcagaactgcttttgctgttgatcctcgaattgctctttctatgcctttgaggtttccaacgaatgctacaatgcaatctgagattactcagttggtacagacacgattactggagcttcgtacaattcctgaagcattaccctttttcattactccaaaagcagtagatgaaaattcagtgctgttacagcaactaccacactgggctccatgttctgttacacaggcattggagtttcttactcctccttataaaggacatccacgtgttatggcctatgtccttcgtgtcttggagacttacccccctgagactgttaccttttttatgccacaattggtacaatctctcagatatgatgaagggaaactggttgaagggtacttgcttggagctactcgaagaagtaatatatttgctcatatcttgatatggcatctgcagggagaatatgttgatgaatctgagaaagatgcagctgctctgaagggcagtgcattccagtccttgctcccagctgttaaggacaaaattatagagagttttactccagaggctcgtgacatgtttgaaagagaatttgatttctttgacaaagtcacatctatttctggtgttcttttccctctccccaaggacgagcggagagcgggtataagaagggaactggagaagatttctattccaggtgatgacctctacctacctactgcaacaaacaagctagtacggggtatacagttggacagcggtattcctctccagtctgctgcaaaagttccaataatgattacttttaacgttgttgaccgtgacggggacccaaatgatgtaaaaccacaggcttgtatttttaaggttggtgatgactgtagacaagatgtgctggcgctgcaagtgattgctctattaagggatgtatttcaagctgtcggattaaacctgtatctttttccatatggtgttttgcctactggaccaggccgaggcataattgagatactcgaagtagaaatcaaatgggtgaaacaactgatggtggtttattagagatatttcagcaagattatggtcctgtaggttcaccttcttttgaaactgctcgagaaatgtttatgatcagtagtgctggatatgctgttgctagcttactccttcaaccgaaggatcggcataatggcaatcttctctttgatagccatgggagattagttcacattgattttggttttattttggagatttcacctggaggtaacatggggtttgagagtgcacatttcaagctaagccacgagatgactcaattgctggatccatctggaactatgaagagtgatacatggaaccaatttctcaggttgtgtgtcaaaggatacctagcagcaaggaggcatatgaatgggattttaagtacagtcaacctaatggtggacagtggccttccttgctttagcaggggagatcctatcaataatcttcggaagcggtttcatccagagatgaatgaacgtgaggccgctaacttcatggtacgaacatgtgctgatgcttacaacaagtggactaccgcagggtatgacttgattcagtacttgcagcagggtattgagaaatagtttgtttctcgttttttaagtggcgttcgtgtacatcaattgtatgtagccactatctttttatgtagaatttattttttgagttgtatcatcgggcaaggatggaattcatgtgattaacgtaggatgcttggtgcaaagaggcaattctttttttttcttgcactgtaaaactgccaagaaagtagctagtaagttgatcaagattctgtattgctgtcgcagaatgcattttcgtttactagacatgtatgattcgcatttttatcatgtgatttcattttttccctcgtcaccagatacgagtggctcattgttagac

SEQ ID NO: 47854 - DNA, 6567 bp, Zea Mays
cgcaactgccatcgtcctctgctcgtcgcgtcgttctcctctcgaccgcatcgcgcccgtggcggggaacgagccatcgacgccgcgtcgcgtgcctttcttcttcgtcccccccctgcctgcctagctgtctcaggctgccgcccgcccagccccaaaacattcggcagccgagtcaaccgagaacacgagccatccacccaccctgtcccttccccggctttcccccgtcctcggctccaccaattgctctcgcgtcagtggaaggaaaaaccaagggcgagggagggaggagcgcatctccgccccgcccgcgttcccgtaccccgatccgccacatgatctgacaccgcattgccgccgaggtgacccctcccgcccccagaatggaggcgctcaacgagctctgcgacctggtggccgcgcacccggatctcctcctcgccgacaagcttgcatggctctcctcccgctgcgccgccgccccgggtgccgccgccccgcagcgtgcgtcgagggcgcaccttcattcgctcctcgcgttggcgcgcctcctcccggcgggtggcgccggtgccggtgccgaaggcgatgcggcgcccccggccccactcctattcttcctcgcgtcccacgccttcctctcgccggccttctggccccagtctttcgccccggcgccgtttctcgctaggctcctcccgctcctcgccgcggccccatcctcccccgccctttcttccgcgctctccgccgccctcctcgcggcgctcgacgtcgccgacccgacctccgcgccgctcgcccgcgcgtttctctccgccgccgctgccgcggcgcccctgccgctcctccccgcggatgccgcgcccatcgctgcccggctgctcctcgagtttcttggctccgaggaggagccgatcagggccaaggggaagggagaggacaccttgggcgaggaaaacggtggggcaaaggaggtagtgcggaggttcgaggaggaggaggtcgatgagctggagcggaaggaagtcgcattcagactgaccgtgcatatgcttgggggcgagggtgggctagagaccgagcagattgggaaggtcaggaatgctgctgcgcgacaggtccgatcactcacggattttctcaagattagaaagcgggactggagggagcagggtacacagctcagggcaaggataaacaccaaattgatgtgttgtcaagctgcagtgggggtgctggtgcgaagcgtttccaccatggatactgatatcaaatcttcgaaggatatgctccagcagactctagcttggttcatcgaggccaccaagtcgtgcatcctgtcatcctggcggaaactgaagatatgcgaggagctattttgcacactgctcaatgggatcagccagataactgtctcacgtgggggccaacttctgccggtgcttttgattcccttaaaaccgcttgttgtgagcacatgttcgcaggctgacatggcaggcagtagtcctggggctctatttgaagcagttgtgaagttgagctgtgagatcatagagtttggctggacaaaggatagggcccttgttgacacatttgttatgcgtctagctgcttatgttcgtgagcggaatgattacgaggaggagattgcaagcacaccgattcagattgttaaattgattatggttgaggatggcaaaggaaaagaggcagttccagttattcgacttaatgtcatacgccttttggctgagttatgtgtttgcttgaaaaaatgggaagttgtggacatgattttaccccttttcattgaacatctagaagagggtgatgcttcatctccaagttcattgcgtttacgattattagatgcaatatctcgtgttgcgtgcttgggttttgaaaaatcatatcgtgagagtattgtcttgatgacaagaagctatcttgacaaagttaaagctctaggggcttcagaaaacaatacagttccatcagaagcaacaactgagcgaacagaaactcttcctgcaggctttctgcttgttgcttccaaccttacaagcacaaaactcaggtctgattatcgtcataggttactgtctctgtgctcagatgtggggctagttgctgaatctaaaagtgggaggagtggtgctgatttgatgggtccgttacttcctgcagttgctgatatatgttctgattttgatccagtgtccactgttgagccatcattattgaaactattccgaaacctttggttctacgttgtattgtttgggctagctccacccatacagaataatgaggcacctacaaaaccggtttccacttcattaggtacagcagaaagcagcagtgctatagcccttcaagctgtagctggaccatacatgtggaacagccaatggtctgtagcagtgcaacgtattgcgcaaggaacacctcctctggttgttagttctgtaaaatggcttgaagatgagctagagttaaacactctacacaacccaggtagtcgtggtggtaatggtaatgaaaattctgctgttgggcagagagctgcactttctgctgctttgggaggtcgagttgaggtagcagcaatgaacactatttcaggggtaaaagctacgtacctacttgcagttgctttcctggagatactacgttttagttgcaatggtggcatactctcggctacatctacattgaatagatcaaacagtgctttcagttgtgtatttgaatacctgctcactccaaatttgacaccagcagtaactcagtgtttgacggcagttgcacatagagcttttgaaacagtgctgtcgtggctggatgatcgcatatctgacataggtgaaggagctgatgttagagaatcggttctttctgttcatgcttgctttctgataaaaagcatgtcccagagagacgagcatgttcgtgatgtgagtgttaagcttttaacgcagctgaaggaaaagttcccacaggtcctctggaactcttcatgcttggatttacttcttatttctgttcacaatgagttgacttctggtccagtcagtgatcctgcttgggttgcaactgtacgctcactgtatcaaaagatcgctagggaatggttaacaagtgctctttcatatgctccatgtaccacacaaggccttatacaggaaaatttttgcaagccaagtggagtacaaagaacacaacatacagcagatgttgtttcacttttatctgagatacgtatttgtagtggaaagaatgattggaacggtattaggacggccaatgttcctgcagttatggactcagcagcagcagcatcgggagccaaaaaagaagcacctgacttcactttggaagtactctctactgcagtagtgagtgcaactgtgaagtgcaatcatgctggtgagattgctggtatgagaaggctgtttagtactatgggaggcataaacatgggcatgtctcctcctgggacacaatctttgcacccccatcagtcatttgatgaagtttttgtctccaagtttgtcagtcttcttcagaactttgttgttgcagctgagaaacaaccaatagataattcacaatttcgtgaaacatgttctcaagctacagcattacttcttgatcatatggtgtctgattctagagcaaacctggaagggttttctcagcttatacggcttctatgttggtgtcctgcttatatttctacccctgatgcaatggaaactggaatctacatctggacatggctagtatcggctgcgccttctttaggtcctcttgtgcttgcggaacttgttgatgcatggctgtggaccatagatacaaagcgtggattgtttgcatcagatatgaattactgtggcccagatgcaaaattgaggccgcatcttatcgctggtgagcctgaggcaccaccagaaaaggacccagtagaagcaataatagcccatagactctggcttggcttcttcattgatcggtttgaggtggttcggcatgacagcattgaacaacttctacttctaggtcgaatgttacaaggaacaatgaagtctccagctcatttttctcaccatcctgctgctactggcactttctttactgcgatgctccttggattgaagttttgctcatgccagtctcaatctaacttgcagaagtgtaatatggggcttcagttgttagaggacagggtataccgtgctgctttgggatggttttcttatgcgcctgagtggtatgaatctccaaacaaaacttatgctcagagagaagctcaatctgtgtcagtatttgttcattttctacaaaatgagcgcaccagtggtcctgtcgattcggtttcaaagttacagggacgtgaaggtgaacctagcatggcagatcacattcatcctgtttggggctgtgttgacaactacacaaatgcaagggaaaagcgtaaacagttacttctgacactttctcagaatgaggcagacagacttgaagtctgggcacaaccaatacatacaaaagatacaacgacttttcgcggtaaaatcagctcggataaatggattgatcatgtcagaactgcttttgctgttgatcctcgaattgctctttctatgcctttgaggtttccaacgaatgctacaatgcaatctgagattactcagttggtacagacacgattactggagcttcgtacaattcctgaagcattaccctttttcattactccaaaagcagtagatgaaaattcagtgctgttacagcaactaccacactgggctccatgttctgttacacaggcattggagtttcttactcctccttataaaggacatccacgtgttatggcctatgtccttcgtgtcttggagacttacccccctgagactgttaccttttttatgccacaattggtacaatctctcagatatgatgaagggaaactggttgaagggtacttgcttggagctactcgaagaagtaatatatttgctcatatcttgatatggcatctgcagggagaatatgttgatgaatctgagaaagatgcagctgctctgaagggcagtgcattccagtccttgctcccagctgttaaggacaaaattatagagagttttactccagaggctcgtgacatgtttgaaagagaatttgatttctttgacaaagtcacatctatttctggtgttcttttccctctccccaaggacgagcggagagcgggtataagaagggaactggagaagatttctattccaggtgatgacctctacctacctactgcaacaaacaagctagtacggggtatacagttggacagcggtattcctctccagtctgctgcaaaagttccaataatgattacttttaacgttgttgaccgtgacggggacccaaatgatgtaaaaccacaggcttgtatttttaaggttggtgatgactgtagacaagatgtgctggcgctgcaagtgattgctctattaagggatgtatttcaagctgtcggattaaacctgtatctttttccatatggtgttttgcctactggaccaggccgaggcataattgaggtggtcccagatactcgaagtagaaatcaaatgggtgaaacaactgatggtggtttattagagatatttcagcaagattatggtcctgtaggttcaccttcttttgaaactgctcgagaaatgtttatgatcagtagtgctggatatgctgttgctagcttactccttcaaccgaaggatcggcataatggcaatcttctctttgatagccatgggagattagttcacattgattttggttttattttggagatttcacctggaggtaacatggggtttgagagtgcacatttcaagctaagccacgagatgactcaattgctggatccatctggaactatgaagagtgatacatggaaccaatttctcaggttgtgtgtcaaaggatacctagcagcaaggaggcatatgaatgggattttaagtacagtcaacctaatggtggacagtggccttccttgctttagcaggggagatcctatcaataatcttcggaagcggtttcatccagagatgaatgaacgtgaggccgctaacttcatggtacgaacatgtgctgatgcttacaacaagtggactaccgcagggtatgacttgattcagtacttgcagcagggtattgagaaatagtttgtttctcgttttttaagtggcgttcgtgtacatcaattgtatgtagccactatctttttatgtagaatttattttttgagttgtatcatcgggcaaggatggaattcatgtgattaacgtaggatgcttggtgcaaagaggcaattctttttttttcttgcactgtaaaactgccaagaaagtagctagtaagttgatcaagattctgtattgctgtcgcagaatgcattttcgtttactagacatgtatgattcgcatttttatcatgtgatttcattttttccctcgtcaccagatacgagtggctcattgttagac

SEQ ID NO: 47855 - DNA, 6522 bp, Zea Mays
cgcaactgccatcgtcctctgctcgtcgcgtcgttctcctctcgaccgcatcgcgcccgtggcggggaacgagccatcgacgccgcgtcgcgtgcctttcttcttcgtcccccccctgcctgcctagctgtctcaggctgccgcccgcccagccccaaaacattcggcagccgagtcaaccgagaacacgagccatccacccaccctgtcccttccccggctttcccccgtcctcggctccaccaattgctctcgcgtcagtggaaggaaaaaccaagggcgagggagggaggagcgcatctccgccccgcccgcgttcccgtaccccgatccgccacatgatctgacaccgcattgccgccgaggtgacccctcccgcccccagaatggaggcgctcaacgagctctgcgacctggtggccgcgcacccggatctcctcctcgccgacaagcttgcatggctctcctcccgctgcgccgccgccccgggtgccgccgccccgcagcgtgcgtcgagggcgcaccttcattcgctcctcgcgttggcgcgcctcctcccggcgggtggcgccggtgccggtgccgaaggcgatgcggcgcccccggccccactcctattcttcctcgcgtcccacgccttcctctcgccggccttctggccccagtctttcgccccggcgccgtttctcgctaggctcctcccgctcctcgccgcggccccatcctcccccgccctttcttccgcgctctccgccgccctcctcgcggcgctcgacgtcgccgacccgacctccgcgccgctcgcccgcgcgtttctctccgccgccgctgccgcggcgcccctgccgctcctccccgcggatgccgcgcccatcgctgcccggctgctcctcgagtttcttggctccgaggaggagccgatcagggccaaggggaagggagaggacaccttgggcgaggaaaacggtggggcaaaggaggtagtgcggaggttcgaggaggaggaggtcgatgagctggagcggaaggaagtcgcattcagactgaccgtgcatatgcttgggggcgagggtgggctagagaccgagcagattgggaaggtcaggaatgctgctgcgcgacaggtccgatcactcacggattttctcaagattagaaagcgggactggagggagcagggtacacagctcagggcaaggataaacaccaaattgatgtgttgtcaagctgcagtgggggtgctggtgcgaagcgtttccaccatggatactgatatcaaatcttcgaaggatatgctccagcagactctagcttggttcatcgaggccaccaagtcgtgcatcctgtcatcctggcggaaactgaagatatgcgaggagctattttgcacactgctcaatgggatcagccagataactgtctcacgtgggggccaacttctgccggtgcttttgattcccttaaaaccgcttgttgtgagcacatgttcgcaggctgacatggcaggcagtagtcctggggctctatttgaagcagttgtgaagttgagctgtgagatcatagagtttggctggacaaaggatagggcccttgttgacacatttgttatgcgtctagctgcttatgttcgtgagcggaatgattacgaggaggaggatggcaaaggaaaagaggcagttccagttattcgacttaatgtcatacgccttttggctgagttatgtgtttgcttgaaaaaatgggaagttgtggacatgattttaccccttttcattgaacatctagaagagggtgatgcttcatctccaagttcattgcgtttacgattattagatgcaatatctcgtgttgcgtgcttgggttttgaaaaatcatatcgtgagagtattgtcttgatgacaagaagctatcttgacaaagttaaagctctaggggcttcagaaaacaatacagttccatcagaagcaacaactgagcgaacagaaactcttcctgcaggctttctgcttgttgcttccaaccttacaagcacaaaactcaggtctgattatcgtcataggttactgtctctgtgctcagatgtggggctagttgctgaatctaaaagtgggaggagtggtgctgatttgatgggtccgttacttcctgcagttgctgatatatgttctgattttgatccagtgtccactgttgagccatcattattgaaactattccgaaacctttggttctacgttgtattgtttgggctagctccacccatacagaataatgaggcacctacaaaaccggtttccacttcattaggtacagcagaaagcagcagtgctatagcccttcaagctgtagctggaccatacatgtggaacagccaatggtctgtagcagtgcaacgtattgcgcaaggaacacctcctctggttgttagttctgtaaaatggcttgaagatgagctagagttaaacactctacacaacccaggtagtcgtggtggtaatggtaatgaaaattctgctgttgggcagagagctgcactttctgctgctttgggaggtcgagttgaggtagcagcaatgaacactatttcaggggtaaaagctacgtacctacttgcagttgctttcctggagatactacgttttagttgcaatggtggcatactctcggctacatctacattgaatagatcaaacagtgctttcagttgtgtatttgaatacctgctcactccaaatttgacaccagcagtaactcagtgtttgacggcagttgcacatagagcttttgaaacagtgctgtcgtggctggatgatcgcatatctgacataggtgaaggagctgatgttagagaatcggttctttctgttcatgcttgctttctgataaaaagcatgtcccagagagacgagcatgttcgtgatgtgagtgttaagcttttaacgcagctgaaggaaaagttcccacaggtcctctggaactcttcatgcttggatttacttcttatttctgttcacaatgagttgacttctggtccagtcagtgatcctgcttgggttgcaactgtacgctcactgtatcaaaagatcgctagggaatggttaacaagtgctctttcatatgctccatgtaccacacaaggccttatacaggaaaatttttgcaagccaagtggagtacaaagaacacaacatacagcagatgttgtttcacttttatctgagatacgtatttgtagtggaaagaatgattggaacggtattaggacggccaatgttcctgcagttatggactcagcagcagcagcatcgggagccaaaaaagaagcacctgacttcactttggaagtactctctactgcagtagtgagtgcaactgtgaagtgcaatcatgctggtgagattgctggtatgagaaggctgtttagtactatgggaggcataaacatgggcatgtctcctcctgggacacaatctttgcacccccatcagtcatttgatgaagtttttgtctccaagtttgtcagtcttcttcagaactttgttgttgcagctgagaaacaaccaatagataattcacaatttcgtgaaacatgttctcaagctacagcattacttcttgatcatatggtgtctgattctagagcaaacctggaagggttttctcagcttatacggcttctatgttggtgtcctgcttatatttctacccctgatgcaatggaaactggaatctacatctggacatggctagtatcggctgcgccttctttaggtcctcttgtgcttgcggaacttgttgatgcatggctgtggaccatagatacaaagcgtggattgtttgcatcagatatgaattactgtggcccagatgcaaaattgaggccgcatcttatcgctggtgagcctgaggcaccaccagaaaaggacccagtagaagcaataatagcccatagactctggcttggcttcttcattgatcggtttgaggtggttcggcatgacagcattgaacaacttctacttctaggtcgaatgttacaaggaacaatgaagtctccagctcatttttctcaccatcctgctgctactggcactttctttactgcgatgctccttggattgaagttttgctcatgccagtctcaatctaacttgcagaagtgtaatatggggcttcagttgttagaggacagggtataccgtgctgctttgggatggttttcttatgcgcctgagtggtatgaatctccaaacaaaacttatgctcagagagaagctcaatctgtgtcagtatttgttcattttctacaaaatgagcgcaccagtggtcctgtcgattcggtttcaaagttacagggacgtgaaggtgaacctagcatggcagatcacattcatcctgtttggggctgtgttgacaactacacaaatgcaagggaaaagcgtaaacagttacttctgacactttctcagaatgaggcagacagacttgaagtctgggcacaaccaatacatacaaaagatacaacgacttttcgcggtaaaatcagctcggataaatggattgatcatgtcagaactgcttttgctgttgatcctcgaattgctctttctatgcctttgaggtttccaacgaatgctacaatgcaatctgagattactcagttggtacagacacgattactggagcttcgtacaattcctgaagcattaccctttttcattactccaaaagcagtagatgaaaattcagtgctgttacagcaactaccacactgggctccatgttctgttacacaggcattggagtttcttactcctccttataaaggacatccacgtgttatggcctatgtccttcgtgtcttggagacttacccccctgagactgttaccttttttatgccacaattggtacaatctctcagatatgatgaagggaaactggttgaagggtacttgcttggagctactcgaagaagtaatatatttgctcatatcttgatatggcatctgcagggagaatatgttgatgaatctgagaaagatgcagctgctctgaagggcagtgcattccagtccttgctcccagctgttaaggacaaaattatagagagttttactccagaggctcgtgacatgtttgaaagagaatttgatttctttgacaaagtcacatctatttctggtgttcttttccctctccccaaggacgagcggagagcgggtataagaagggaactggagaagatttctattccaggtgatgacctctacctacctactgcaacaaacaagctagtacggggtatacagttggacagcggtattcctctccagtctgctgcaaaagttccaataatgattacttttaacgttgttgaccgtgacggggacccaaatgatgtaaaaccacaggcttgtatttttaaggttggtgatgactgtagacaagatgtgctggcgctgcaagtgattgctctattaagggatgtatttcaagctgtcggattaaacctgtatctttttccatatggtgttttgcctactggaccaggccgaggcataattgaggtggtcccagatactcgaagtagaaatcaaatgggtgaaacaactgatggtggtttattagagatatttcagcaagattatggtcctgtaggttcaccttcttttgaaactgctcgagaaatgtttatgatcagtagtgctggatatgctgttgctagcttactccttcaaccgaaggatcggcataatggcaatcttctctttgatagccatgggagattagttcacattgattttggttttattttggagatttcacctggaggtaacatggggtttgagagtgcacatttcaagctaagccacgagatgactcaattgctggatccatctggaactatgaagagtgatacatggaaccaatttctcaggttgtgtgtcaaaggatacctagcagcaaggaggcatatgaatgggattttaagtacagtcaacctaatggtggacagtggccttccttgctttagcaggggagatcctatcaataatcttcggaagcggtttcatccagagatgaatgaacgtgaggccgctaacttcatggtacgaacatgtgctgatgcttacaacaagtggactaccgcagggtatgacttgattcagtacttgcagcagggtattgagaaatagtttgtttctcgttttttaagtggcgttcgtgtacatcaattgtatgtagccactatctttttatgtagaatttattttttgagttgtatcatcgggcaaggatggaattcatgtgattaacgtaggatgcttggtgcaaagaggcaattctttttttttcttgcactgtaaaactgccaagaaagtagctagtaagttgatcaagattctgtattgctgtcgcagaatgcattttcgtttactagacatgtatgattcgcatttttatcatgtgatttcattttttccctcgtcaccagatacgagtggctcattgttagac

SEQ ID NO: 47856 - DNA, 6474 bp, Zea Mays
cgcaactgccatcgtcctctgctcgtcgcgtcgttctcctctcgaccgcatcgcgcccgtggcggggaacgagccatcgacgccgcgtcgcgtgcctttcttcttcgtcccccccctgcctgcctagctgtctcaggctgccgcccgcccagccccaaaacattcggcagccgagtcaaccgagaacacgagccatccacccaccctgtcccttccccggctttcccccgtcctcggctccaccaattgctctcgcgtcagtggaaggaaaaaccaagggcgagggagggaggagcgcatctccgccccgcccgcgttcccgtaccccgatccgccacatgatctgacaccgcattgccgccgaggtgacccctcccgcccccagaatggaggcgctcaacgagctctgcgacctggtggccgcgcacccggatctcctcctcgccgacaagcttgcatggctctcctcccgctgcgccgccgccccgggtgccgccgccccgcagcgtgcgtcgagggcgcaccttcattcgctcctcgcgttggcgcgcctcctcccggcgggtggcgccggtgccggtgccgaaggcgatgcggcgcccccggccccactcctattcttcctcgcgtcccacgccttcctctcgccggccttctggccccagtctttcgccccggcgccgtttctcgctaggctcctcccgctcctcgccgcggccccatcctcccccgccctttcttccgcgctctccgccgccctcctcgcggcgctcgacgtcgccgacccgacctccgcgccgctcgcccgcgcgtttctctccgccgccgctgccgcggcgcccctgccgctcctccccgcggatgccgcgcccatcgctgcccggctgctcctcgagtttcttggctccgaggaggagccgatcagggccaaggggaagggagaggacaccttgggcgaggaaaacggtggggcaaaggaggtagtgcggaggttcgaggaggaggaggtcgatgagctggagcggaaggaagtcgcattcagactgaccgtgcatatgcttgggggcgagggtgggctagagaccgagcagattgggaaggtcaggaatgctgctgcgcgacaggtccgatcactcacggattttctcaagattagaaagcgggactggagggagcagggtacacagctcagggcaaggataaacaccaaattgatgtgttgtcaagctgcagtgggggtgctggtgcgaagcgtttccaccatggatactgatatcaaatcttcgaaggatatgctccagcagactctagcttggttcatcgaggccaccaagtcgtgcatcctgtcatcctggcggaaactgaagatatgcgaggagctattttgcacactgctcaatgggatcagccagataactgtctcacgtgggggccaacttctgccggctgacatggcaggcagtagtcctggggctctatttgaagcagttgtgaagttgagctgtgagatcatagagtttggctggacaaaggatagggcccttgttgacacatttgttatgcgtctagctgcttatgttcgtgagcggaatgattacgaggaggaggatggcaaaggaaaagaggcagttccagttattcgacttaatgtcatacgccttttggctgagttatgtgtttgcttgaaaaaatgggaagttgtggacatgattttaccccttttcattgaacatctagaagagggtgatgcttcatctccaagttcattgcgtttacgattattagatgcaatatctcgtgttgcgtgcttgggttttgaaaaatcatatcgtgagagtattgtcttgatgacaagaagctatcttgacaaagttaaagctctaggggcttcagaaaacaatacagttccatcagaagcaacaactgagcgaacagaaactcttcctgcaggctttctgcttgttgcttccaaccttacaagcacaaaactcaggtctgattatcgtcataggttactgtctctgtgctcagatgtggggctagttgctgaatctaaaagtgggaggagtggtgctgatttgatgggtccgttacttcctgcagttgctgatatatgttctgattttgatccagtgtccactgttgagccatcattattgaaactattccgaaacctttggttctacgttgtattgtttgggctagctccacccatacagaataatgaggcacctacaaaaccggtttccacttcattaggtacagcagaaagcagcagtgctatagcccttcaagctgtagctggaccatacatgtggaacagccaatggtctgtagcagtgcaacgtattgcgcaaggaacacctcctctggttgttagttctgtaaaatggcttgaagatgagctagagttaaacactctacacaacccaggtagtcgtggtggtaatggtaatgaaaattctgctgttgggcagagagctgcactttctgctgctttgggaggtcgagttgaggtagcagcaatgaacactatttcaggggtaaaagctacgtacctacttgcagttgctttcctggagatactacgttttagttgcaatggtggcatactctcggctacatctacattgaatagatcaaacagtgctttcagttgtgtatttgaatacctgctcactccaaatttgacaccagcagtaactcagtgtttgacggcagttgcacatagagcttttgaaacagtgctgtcgtggctggatgatcgcatatctgacataggtgaaggagctgatgttagagaatcggttctttctgttcatgcttgctttctgataaaaagcatgtcccagagagacgagcatgttcgtgatgtgagtgttaagcttttaacgcagctgaaggaaaagttcccacaggtcctctggaactcttcatgcttggatttacttcttatttctgttcacaatgagttgacttctggtccagtcagtgatcctgcttgggttgcaactgtacgctcactgtatcaaaagatcgctagggaatggttaacaagtgctctttcatatgctccatgtaccacacaaggccttatacaggaaaatttttgcaagccaagtggagtacaaagaacacaacatacagcagatgttgtttcacttttatctgagatacgtatttgtagtggaaagaatgattggaacggtattaggacggccaatgttcctgcagttatggactcagcagcagcagcatcgggagccaaaaaagaagcacctgacttcactttggaagtactctctactgcagtagtgagtgcaactgtgaagtgcaatcatgctggtgagattgctggtatgagaaggctgtttagtactatgggaggcataaacatgggcatgtctcctcctgggacacaatctttgcacccccatcagtcatttgatgaagtttttgtctccaagtttgtcagtcttcttcagaactttgttgttgcagctgagaaacaaccaatagataattcacaatttcgtgaaacatgttctcaagctacagcattacttcttgatcatatggtgtctgattctagagcaaacctggaagggttttctcagcttatacggcttctatgttggtgtcctgcttatatttctacccctgatgcaatggaaactggaatctacatctggacatggctagtatcggctgcgccttctttaggtcctcttgtgcttgcggaacttgttgatgcatggctgtggaccatagatacaaagcgtggattgtttgcatcagatatgaattactgtggcccagatgcaaaattgaggccgcatcttatcgctggtgagcctgaggcaccaccagaaaaggacccagtagaagcaataatagcccatagactctggcttggcttcttcattgatcggtttgaggtggttcggcatgacagcattgaacaacttctacttctaggtcgaatgttacaaggaacaatgaagtctccagctcatttttctcaccatcctgctgctactggcactttctttactgcgatgctccttggattgaagttttgctcatgccagtctcaatctaacttgcagaagtgtaatatggggcttcagttgttagaggacagggtataccgtgctgctttgggatggttttcttatgcgcctgagtggtatgaatctccaaacaaaacttatgctcagagagaagctcaatctgtgtcagtatttgttcattttctacaaaatgagcgcaccagtggtcctgtcgattcggtttcaaagttacagggacgtgaaggtgaacctagcatggcagatcacattcatcctgtttggggctgtgttgacaactacacaaatgcaagggaaaagcgtaaacagttacttctgacactttctcagaatgaggcagacagacttgaagtctgggcacaaccaatacatacaaaagatacaacgacttttcgcggtaaaatcagctcggataaatggattgatcatgtcagaactgcttttgctgttgatcctcgaattgctctttctatgcctttgaggtttccaacgaatgctacaatgcaatctgagattactcagttggtacagacacgattactggagcttcgtacaattcctgaagcattaccctttttcattactccaaaagcagtagatgaaaattcagtgctgttacagcaactaccacactgggctccatgttctgttacacaggcattggagtttcttactcctccttataaaggacatccacgtgttatggcctatgtccttcgtgtcttggagacttacccccctgagactgttaccttttttatgccacaattggtacaatctctcagatatgatgaagggaaactggttgaagggtacttgcttggagctactcgaagaagtaatatatttgctcatatcttgatatggcatctgcagggagaatatgttgatgaatctgagaaagatgcagctgctctgaagggcagtgcattccagtccttgctcccagctgttaaggacaaaattatagagagttttactccagaggctcgtgacatgtttgaaagagaatttgatttctttgacaaagtcacatctatttctggtgttcttttccctctccccaaggacgagcggagagcgggtataagaagggaactggagaagatttctattccaggtgatgacctctacctacctactgcaacaaacaagctagtacggggtatacagttggacagcggtattcctctccagtctgctgcaaaagttccaataatgattacttttaacgttgttgaccgtgacggggacccaaatgatgtaaaaccacaggcttgtatttttaaggttggtgatgactgtagacaagatgtgctggcgctgcaagtgattgctctattaagggatgtatttcaagctgtcggattaaacctgtatctttttccatatggtgttttgcctactggaccaggccgaggcataattgaggtggtcccagatactcgaagtagaaatcaaatgggtgaaacaactgatggtggtttattagagatatttcagcaagattatggtcctgtaggttcaccttcttttgaaactgctcgagaaatgtttatgatcagtagtgctggatatgctgttgctagcttactccttcaaccgaaggatcggcataatggcaatcttctctttgatagccatgggagattagttcacattgattttggttttattttggagatttcacctggaggtaacatggggtttgagagtgcacatttcaagctaagccacgagatgactcaattgctggatccatctggaactatgaagagtgatacatggaaccaatttctcaggttgtgtgtcaaaggatacctagcagcaaggaggcatatgaatgggattttaagtacagtcaacctaatggtggacagtggccttccttgctttagcaggggagatcctatcaataatcttcggaagcggtttcatccagagatgaatgaacgtgaggccgctaacttcatggtacgaacatgtgctgatgcttacaacaagtggactaccgcagggtatgacttgattcagtacttgcagcagggtattgagaaatagtttgtttctcgttttttaagtggcgttcgtgtacatcaattgtatgtagccactatctttttatgtagaatttattttttgagttgtatcatcgggcaaggatggaattcatgtgattaacgtaggatgcttggtgcaaagaggcaattctttttttttcttgcactgtaaaactgccaagaaagtagctagtaagttgatcaagattctgtattgctgtcgcagaatgcattttcgtttactagacatgtatgattcgcatttttatcatgtgatttcattttttccctcgtcaccagatacgagtggctcattgttagac

SEQ ID NO: 47857 - DNA, 6451 bp, Zea Mays
cgcaactgccatcgtcctctgctcgtcgcgtcgttctcctctcgaccgcatcgcgcccgtggcggggaacgagccatcgacgccgcgtcgcgtgcctttcttcttcgtcccccccctgcctgcctagctgtctcaggctgccgcccgcccagccccaaaacattcggcagccgagtcaaccgagaacacgagccatccacccaccctgtcccttccccggctttcccccgtcctcggctccaccaattgctctcgcgtcagtggaaggaaaaaccaagggcgagggagggaggagcgcatctccgccccgcccgcgttcccgtaccccgatccgccacatgatctgacaccgcattgccgccgaggtgacccctcccgcccccagaatggaggcgctcaacgagctctgcgacctggtggccgcgcacccggatctcctcctcgccgacaagcttgcatggctctcctcccgctgcgccgccgccccgggtgccgccgccccgcagcgtgcgtcgagggcgcaccttcattcgctcctcgcgttggcgcgcctcctcccggcgggtggcgccggtgccggtgccgaaggcgatgcggcgcccccggccccactcctattcttcctcgcgtcccacgccttcctctcgccggccttctggccccagtctttcgccccggcgccgtttctcgctaggctcctcccgctcctcgccgcggccccatcctcccccgccctttcttccgcgctctccgccgccctcctcgcggcgctcgacgtcgccgacccgacctccgcgccgctcgcccgcgcgtttctctccgccgccgctgccgcggcgcccctgccgctcctccccgcggatgccgcgcccatcgctgcccggctgctcctcgagtttcttggctccgaggaggagccgatcagggccaaggggaagggagaggacaccttgggcgaggaaaacggtggggcaaaggaggtagtgcggaggttcgaggaggaggaggtcgatgagctggagcggaaggaagtcgcattcagactgaccgtgcatatgcttgggggcgagggtgggctagagaccgagcagattgggaaggtcaggaatgctgctgcgcgacaggtccgatcactcacggattttctcaagattagaaagcgggactggagggagcagggtacacagctcagggcaaggataaacaccaaattgatgtgttgtcaagctgcagtgggggtgctggtgcgaagcgtttccaccatggatactgatatcaaatcttcgaaggatatgctccagcagactctagcttggttcatcgaggccaccaagtcgtgcatcctgtcatcctggcggaaactgaagatatgcgaggagctattttgcacactgctcaatgggatcagccagataactgtctcacgtgggggccaacttctgccggctgacatggcaggcagtagtcctggggctctatttgaagcagttgtgaagttgagctgtgagatcatagagtttggctggacaaaggatagggcccttgttgacacatttgttatgcgtctagctgcttatgttcgtgagcggaatgattacgaggaggaggatggcaaaggaaaagaggcagttccagttattcgacttaatgtcatacgccttttggctgagttatgtgtttgcttgaaaaaatgggaagttgtggacatgattttaccccttttcattgaacatctagaagagggtgatgcttcatctccaagttcattgcgtttacgattattagatgcaatatctcgtgttgcgtgcttgggttttgaaaaatcatatcgtgagagtattgtcttgatgacaagaagctatcttgacaaagttaaagctctaggggcttcagaaaacaatacagttccatcagaagcaacaactgagcgaacagaaactcttcctgcaggctttctgcttgttgcttccaaccttacaagcacaaaactcaggtctgattatcgtcataggttactgtctctgtgctcagatgtggggctagttgctgaatctaaaagtgggaggagtggtgctgatttgatgggtccgttacttcctgcagttgctgatatatgttctgattttgatccagtgtccactgttgagccatcattattgaaactattccgaaacctttggttctacgttgtattgtttgggctagctccacccatacagaataatgaggcacctacaaaaccggtttccacttcattaggtacagcagaaagcagcagtgctatagcccttcaagctgtagctggaccatacatgtggaacagccaatggtctgtagcagtgcaacgtattgcgcaaggaacacctcctctggttgttagttctgtaaaatggcttgaagatgagctagagttaaacactctacacaacccaggtagtcgtggtggtaatggtaatgaaaattctgctgttgggcagagagctgcactttctgctgctttgggaggtcgagttgaggtagcagcaatgaacactatttcaggggtaaaagctacgtacctacttgcagttgctttcctggagatactacgttttagttgcaatggtggcatactctcggctacatctacattgaatagatcaaacagtgctttcagttgtgtatttgaatacctgctcactccaaatttgacaccagcagtaactcagtgtttgacggcagttgcacatagagcttttgaaacagtgctgtcgtggctggatgatcgcatatctgacataggtgaaggagctgatgttagagaatcggttctttctgttcatgcttgctttctgataaaaagcatgtcccagagagacgagcatgttcgtgatgtgagtgttaagcttttaacgcagctgaaggaaaagttcccacaggtcctctggaactcttcatgcttggatttacttcttatttctgttcacaatgagttgacttctggtccagtcagtgatcctgcttgggttgcaactgtacgctcactgtatcaaaagatcgctagggaatggttaacaagtgctctttcatatgctccatgaaaatttttgcaagccaagtggagtacaaagaacacaacatacagcagatgttgtttcacttttatctgagatacgtatttgtagtggaaagaatgattggaacggtattaggacggccaatgttcctgcagttatggactcagcagcagcagcatcgggagccaaaaaagaagcacctgacttcactttggaagtactctctactgcagtagtgagtgcaactgtgaagtgcaatcatgctggtgagattgctggtatgagaaggctgtttagtactatgggaggcataaacatgggcatgtctcctcctgggacacaatctttgcacccccatcagtcatttgatgaagtttttgtctccaagtttgtcagtcttcttcagaactttgttgttgcagctgagaaacaaccaatagataattcacaatttcgtgaaacatgttctcaagctacagcattacttcttgatcatatggtgtctgattctagagcaaacctggaagggttttctcagcttatacggcttctatgttggtgtcctgcttatatttctacccctgatgcaatggaaactggaatctacatctggacatggctagtatcggctgcgccttctttaggtcctcttgtgcttgcggaacttgttgatgcatggctgtggaccatagatacaaagcgtggattgtttgcatcagatatgaattactgtggcccagatgcaaaattgaggccgcatcttatcgctggtgagcctgaggcaccaccagaaaaggacccagtagaagcaataatagcccatagactctggcttggcttcttcattgatcggtttgaggtggttcggcatgacagcattgaacaacttctacttctaggtcgaatgttacaaggaacaatgaagtctccagctcatttttctcaccatcctgctgctactggcactttctttactgcgatgctccttggattgaagttttgctcatgccagtctcaatctaacttgcagaagtgtaatatggggcttcagttgttagaggacagggtataccgtgctgctttgggatggttttcttatgcgcctgagtggtatgaatctccaaacaaaacttatgctcagagagaagctcaatctgtgtcagtatttgttcattttctacaaaatgagcgcaccagtggtcctgtcgattcggtttcaaagttacagggacgtgaaggtgaacctagcatggcagatcacattcatcctgtttggggctgtgttgacaactacacaaatgcaagggaaaagcgtaaacagttacttctgacactttctcagaatgaggcagacagacttgaagtctgggcacaaccaatacatacaaaagatacaacgacttttcgcggtaaaatcagctcggataaatggattgatcatgtcagaactgcttttgctgttgatcctcgaattgctctttctatgcctttgaggtttccaacgaatgctacaatgcaatctgagattactcagttggtacagacacgattactggagcttcgtacaattcctgaagcattaccctttttcattactccaaaagcagtagatgaaaattcagtgctgttacagcaactaccacactgggctccatgttctgttacacaggcattggagtttcttactcctccttataaaggacatccacgtgttatggcctatgtccttcgtgtcttggagacttacccccctgagactgttaccttttttatgccacaattggtacaatctctcagatatgatgaagggaaactggttgaagggtacttgcttggagctactcgaagaagtaatatatttgctcatatcttgatatggcatctgcagggagaatatgttgatgaatctgagaaagatgcagctgctctgaagggcagtgcattccagtccttgctcccagctgttaaggacaaaattatagagagttttactccagaggctcgtgacatgtttgaaagagaatttgatttctttgacaaagtcacatctatttctggtgttcttttccctctccccaaggacgagcggagagcgggtataagaagggaactggagaagatttctattccaggtgatgacctctacctacctactgcaacaaacaagctagtacggggtatacagttggacagcggtattcctctccagtctgctgcaaaagttccaataatgattacttttaacgttgttgaccgtgacggggacccaaatgatgtaaaaccacaggcttgtatttttaaggttggtgatgactgtagacaagatgtgctggcgctgcaagtgattgctctattaagggatgtatttcaagctgtcggattaaacctgtatctttttccatatggtgttttgcctactggaccaggccgaggcataattgaggtggtcccagatactcgaagtagaaatcaaatgggtgaaacaactgatggtggtttattagagatatttcagcaagattatggtcctgtaggttcaccttcttttgaaactgctcgagaaatgtttatgatcagtagtgctggatatgctgttgctagcttactccttcaaccgaaggatcggcataatggcaatcttctctttgatagccatgggagattagttcacattgattttggttttattttggagatttcacctggaggtaacatggggtttgagagtgcacatttcaagctaagccacgagatgactcaattgctggatccatctggaactatgaagagtgatacatggaaccaatttctcaggttgtgtgtcaaaggatacctagcagcaaggaggcatatgaatgggattttaagtacagtcaacctaatggtggacagtggccttccttgctttagcaggggagatcctatcaataatcttcggaagcggtttcatccagagatgaatgaacgtgaggccgctaacttcatggtacgaacatgtgctgatgcttacaacaagtggactaccgcagggtatgacttgattcagtacttgcagcagggtattgagaaatagtttgtttctcgttttttaagtggcgttcgtgtacatcaattgtatgtagccactatctttttatgtagaatttattttttgagttgtatcatcgggcaaggatggaattcatgtgattaacgtaggatgcttggtgcaaagaggcaattctttttttttcttgcactgtaaaactgccaagaaagtagctagtaagttgatcaagattctgtattgctgtcgcagaatgcattttcgtttactagacatgtatgattcgcatttttatcatgtgatttcattttttccctcgtcaccagatacgagtggctcattgttagac

SEQ ID NO: 47858 - DNA, 6509 bp, Zea Mays
cgcaactgccatcgtcctctgctcgtcgcgtcgttctcctctcgaccgcatcgcgcccgtggcggggaacgagccatcgacgccgcgtcgcgtgcctttcttcttcgtcccccccctgcctgcctagctgtctcaggctgccgcccgcccagccccaaaacattcggcagccgagtcaaccgagaacacgagccatccacccaccctgtcccttccccggctttcccccgtcctcggctccaccaattgctctcgcgtcagtggaaggaaaaaccaagggcgagggagggaggagcgcatctccgccccgcccgcgttcccgtaccccgatccgccacatgatctgacaccgcattgccgccgaggtgacccctcccgcccccagaatggaggcgctcaacgagctctgcgacctggtggccgcgcacccggatctcctcctcgccgacaagcttgcatggctctcctcccgctgcgccgccgccccgggtgccgccgccccgcagcgtgcgtcgagggcgcaccttcattcgctcctcgcgttggcgcgcctcctcccggcgggtggcgccggtgccggtgccgaaggcgatgcggcgcccccggccccactcctattcttcctcgcgtcccacgccttcctctcgccggccttctggccccagtctttcgccccggcgccgtttctcgctaggctcctcccgctcctcgccgcggccccatcctcccccgccctttcttccgcgctctccgccgccctcctcgcggcgctcgacgtcgccgacccgacctccgcgccgctcgcccgcgcgtttctctccgccgccgctgccgcggcgcccctgccgctcctccccgcggatgccgcgcccatcgctgcccggctgctcctcgagtttcttggctccgaggaggagccgatcagggccaaggggaagggagaggacaccttgggcgaggaaaacggtggggcaaaggaggtagtgcggaggttcgaggaggaggaggtcgatgagctggagcggaaggaagtcgcattcagactgaccgtgcatatgcttgggggcgagggtgggctagagaccgagcagattgggaaggtcaggaatgctgctgcgcgacaggtccgatcactcacggattttctcaagattagaaagcgggactggagggagcagggtacacagctcagggcaaggataaacaccaaattgatgtgttgtcaagctgcagtgggggtgctggtgcgaagcgtttccaccatggatactgatatcaaatcttcgaaggatatgctccagcagactctagcttggttcatcgaggccaccaagtcgtgcatcctgtcatcctggcggaaactgaagatatgcgaggagctattttgcacactgctcaatgggatcagccagataactgtctcacgtgggggccaacttctgccggtgcttttgattcccttaaaaccgcttgttgtgagcacatgttcgcaggctgacatggcaggcagtagtcctggggctctatttgaagcagttgtgaagttgagctgtgagatcatagagtttggctggacaaaggatagggcccttgttgacacatttgttatgcgtctagctgcttatgttcgtgagcggaatgattacgaggaggaggatggcaaaggaaaagaggcagttccagttattcgacttaatgtcatacgccttttggctgagttatgtgtttgcttgaaaaaatgggaagttgtggacatgattttaccccttttcattgaacatctagaagagggtgatgcttcatctccaagttcattgcgtttacgattattagatgcaatatctcgtgttgcgtgcttgggttttgaaaaatcatatcgtgagagtattgtcttgatgacaagaagctatcttgacaaagttaaagctctaggggcttcagaaaacaatacagttccatcagaagcaacaactgagcgaacagaagctttctgcttgttgcttccaaccttacaagcacaaaactcaggtctgattatcgtcataggttactgtctctgtgctcagatgtggggctagttgctgaatctaaaagtgggaggagtggtgctgatttgatgggtccgttacttcctgcagttgctgatatatgttctgattttgatccagtgtccactgttgagccatcattattgaaactattccgaaacctttggttctacgttgtattgtttgggctagctccacccatacagaataatgaggcacctacaaaaccggtttccacttcattaggtacagcagaaagcagcagtgctatagcccttcaagctgtagctggaccatacatgtggaacagccaatggtctgtagcagtgcaacgtattgcgcaaggaacacctcctctggttgttagttctgtaaaatggcttgaagatgagctagagttaaacactctacacaacccaggtagtcgtggtggtaatggtaatgaaaattctgctgttgggcagagagctgcactttctgctgctttgggaggtcgagttgaggtagcagcaatgaacactatttcaggggtaaaagctacgtacctacttgcagttgctttcctggagatactacgttttagttgcaatggtggcatactctcggctacatctacattgaatagatcaaacagtgctttcagttgtgtatttgaatacctgctcactccaaatttgacaccagcagtaactcagtgtttgacggcagttgcacatagagcttttgaaacagtgctgtcgtggctggatgatcgcatatctgacataggtgaaggagctgatgttagagaatcggttctttctgttcatgcttgctttctgataaaaagcatgtcccagagagacgagcatgttcgtgatgtgagtgttaagcttttaacgcagctgaaggaaaagttcccacaggtcctctggaactcttcatgcttggatttacttcttatttctgttcacaatgagttgacttctggtccagtcagtgatcctgcttgggttgcaactgtacgctcactgtatcaaaagatcgctagggaatggttaacaagtgctctttcatatgctccatgtaccacacaaggccttatacaggaaaatttttgcaagccaagtggagtacaaagaacacaacatacagcagatgttgtttcacttttatctgagatacgtatttgtagtggaaagaatgattggaacggtattaggacggccaatgttcctgcagttatggactcagcagcagcagcatcgggagccaaaaaagaagcacctgacttcactttggaagtactctctactgcagtagtgagtgcaactgtgaagtgcaatcatgctggtgagattgctggtatgagaaggctgtttagtactatgggaggcataaacatgggcatgtctcctcctgggacacaatctttgcacccccatcagtcatttgatgaagtttttgtctccaagtttgtcagtcttcttcagaactttgttgttgcagctgagaaacaaccaatagataattcacaatttcgtgaaacatgttctcaagctacagcattacttcttgatcatatggtgtctgattctagagcaaacctggaagggttttctcagcttatacggcttctatgttggtgtcctgcttatatttctacccctgatgcaatggaaactggaatctacatctggacatggctagtatcggctgcgccttctttaggtcctcttgtgcttgcggaacttgttgatgcatggctgtggaccatagatacaaagcgtggattgtttgcatcagatatgaattactgtggcccagatgcaaaattgaggccgcatcttatcgctggtgagcctgaggcaccaccagaaaaggacccagtagaagcaataatagcccatagactctggcttggcttcttcattgatcggtttgaggtggttcggcatgacagcattgaacaacttctacttctaggtcgaatgttacaaggaacaatgaagtctccagctcatttttctcaccatcctgctgctactggcactttctttactgcgatgctccttggattgaagttttgctcatgccagtctcaatctaacttgcagaagtgtaatatggggcttcagttgttagaggacagggtataccgtgctgctttgggatggttttcttatgcgcctgagtggtatgaatctccaaacaaaacttatgctcagagagaagctcaatctgtgtcagtatttgttcattttctacaaaatgagcgcaccagtggtcctgtcgattcggtttcaaagttacagggacgtgaaggtgaacctagcatggcagatcacattcatcctgtttggggctgtgttgacaactacacaaatgcaagggaaaagcgtaaacagttacttctgacactttctcagaatgaggcagacagacttgaagtctgggcacaaccaatacatacaaaagatacaacgacttttcgcggtaaaatcagctcggataaatggattgatcatgtcagaactgcttttgctgttgatcctcgaattgctctttctatgcctttgaggtttccaacgaatgctacaatgcaatctgagattactcagttggtacagacacgattactggagcttcgtacaattcctgaagcattaccctttttcattactccaaaagcagtagatgaaaattcagtgctgttacagcaactaccacactgggctccatgttctgttacacaggcattggagtttcttactcctccttataaaggacatccacgtgttatggcctatgtccttcgtgtcttggagacttacccccctgagactgttaccttttttatgccacaattggtacaatctctcagatatgatgaagggaaactggttgaagggtacttgcttggagctactcgaagaagtaatatatttgctcatatcttgatatggcatctgcagggagaatatgttgatgaatctgagaaagatgcagctgctctgaagggcagtgcattccagtccttgctcccagctgttaaggacaaaattatagagagttttactccagaggctcgtgacatgtttgaaagagaatttgatttctttgacaaagtcacatctatttctggtgttcttttccctctccccaaggacgagcggagagcgggtataagaagggaactggagaagatttctattccaggtgatgacctctacctacctactgcaacaaacaagctagtacggggtatacagttggacagcggtattcctctccagtctgctgcaaaagttccaataatgattacttttaacgttgttgaccgtgacggggacccaaatgatgtaaaaccacaggcttgtatttttaaggttggtgatgactgtagacaagatgtgctggcgctgcaagtgattgctctattaagggatgtatttcaagctgtcggattaaacctgtatctttttccatatggtgttttgcctactggaccaggccgaggcataattgaggtggtcccagatactcgaagtagaaatcaaatgggtgaaacaactgatggtggtttattagagatatttcagcaagattatggtcctgtaggttcaccttcttttgaaactgctcgagaaatgtttatgatcagtagtgctggatatgctgttgctagcttactccttcaaccgaaggatcggcataatggcaatcttctctttgatagccatgggagattagttcacattgattttggttttattttggagatttcacctggaggtaacatggggtttgagagtgcacatttcaagctaagccacgagatgactcaattgctggatccatctggaactatgaagagtgatacatggaaccaatttctcaggttgtgtgtcaaaggatacctagcagcaaggaggcatatgaatgggattttaagtacagtcaacctaatggtggacagtggccttccttgctttagcaggggagatcctatcaataatcttcggaagcggtttcatccagagatgaatgaacgtgaggccgctaacttcatggtacgaacatgtgctgatgcttacaacaagtggactaccgcagggtatgacttgattcagtacttgcagcagggtattgagaaatagtttgtttctcgttttttaagtggcgttcgtgtacatcaattgtatgtagccactatctttttatgtagaatttattttttgagttgtatcatcgggcaaggatggaattcatgtgattaacgtaggatgcttggtgcaaagaggcaattctttttttttcttgcactgtaaaactgccaagaaagtagctagtaagttgatcaagattctgtattgctgtcgcagaatgcattttcgtttactagacatgtatgattcgcatttttatcatgtgatttcattttttccctcgtcaccagatacgagtggctcattgttagac

SEQ ID NO: 47859 - DNA, 6454 bp, Zea Mays
cgcaactgccatcgtcctctgctcgtcgcgtcgttctcctctcgaccgcatcgcgcccgtggcggggaacgagccatcgacgccgcgtcgcgtgcctttcttcttcgtcccccccctgcctgcctagctgtctcaggctgccgcccgcccagccccaaaacattcggcagccgagtcaaccgagaacacgagccatccacccaccctgtcccttccccggctttcccccgtcctcggctccaccaattgctctcgcgtcagtggaaggaaaaaccaagggcgagggagggaggagcgcatctccgccccgcccgcgttcccgtaccccgatccgccacatgatctgacaccgcattgccgccgaggtgacccctcccgcccccagaatggaggcgctcaacgagctctgcgacctggtggccgcgcacccggatctcctcctcgccgacaagcttgcatggctctcctcccgctgcgccgccgccccgggtgccgccgccccgcagcgtgcgtcgagggcgcaccttcattcgctcctcgcgttggcgcgcctcctcccggcgggtggcgccggtgccggtgccgaaggcgatgcggcgcccccggccccactcctattcttcctcgcgtcccacgccttcctctcgccggccttctggccccagtctttcgccccggcgccgtttctcgctaggctcctcccgctcctcgccgcggccccatcctcccccgccctttcttccgcgctctccgccgccctcctcgcggcgctcgacgtcgccgacccgacctccgcgccgctcgcccgcgcgtttctctccgccgccgctgccgcggcgcccctgccgctcctccccgcggatgccgcgcccatcgctgcccggctgctcctcgagtttcttggctccgaggaggagccgatcagggccaaggggaagggagaggacaccttgggcgaggaaaacggtggggcaaaggaggtagtgcggaggttcgaggaggaggaggtcgatgagctggagcggaaggaagtcgcattcagactgaccgtgcatatgcttgggggcgagggtgggctagagaccgagcagattgggaaggtcaggaatgctgctgcgcgacaggtccgatcactcacggattttctcaagattagaaagcgggactggagggagcagggtacacagctcagggcaaggataaacaccaaattgatgtgttgtcaagctgcagtgggggtgctggtgcgaagcgtttccaccatggatactgatatcaaatcttcgaaggatatgctccagcagactctagcttggttcatcgaggccaccaagtcgtgcatcctgtcatcctggcggaaactgaagatatgcgaggagctattttgcacactgctcaatgggatcagccagataactgtctcacgtgggggccaacttctgccggtgcttttgattcccttaaaaccgcttgttgtgagcacatgttcgcaggctgacatggcaggcagtagtcctggggctctatttgaagcagttgtgaagttgagctgtgagatcatagagtttggctggacaaaggatagggcccttgttgacacatttgttatgcgtctagctgcttatgttcgtgagcggaatgattacgaggaggaggatggcaaaggaaaagaggcagttccagttattcgacttaatgtcatacgccttttggctgagttatgtgtttgcttgaaaaaatgggaagttgtggacatgattttaccccttttcattgaacatctagaagagggtgatgcttcatctccaagttcattgcgtttacgattattagatgcaatatctcgtgttgcgtgcttgggttttgaaaaatcatatcgtgagagtattgtcttgatgacaagaagctatcttgacaaagttaaagctctaggggcttcagaaaacaatacagttccatcagaagcaacaactgagcgaacagaaactcttcctgcaggctttctgcttgttgcttccaaccttacaagcacaaaactcaggtctgattatcgtcataggttactgtctctgtgctcagatgtggggctagttgctgaatctaaaagtgggagtgtccactgttgagccatcattattgaaactattccgaaacctttggttctacgttgtattgtttgggctagctccacccatacagaataatgaggcacctacaaaaccggtttccacttcattaggtacagcagaaagcagcagtgctatagcccttcaagctgtagctggaccatacatgtggaacagccaatggtctgtagcagtgcaacgtattgcgcaaggaacacctcctctggttgttagttctgtaaaatggcttgaagatgagctagagttaaacactctacacaacccaggtagtcgtggtggtaatggtaatgaaaattctgctgttgggcagagagctgcactttctgctgctttgggaggtcgagttgaggtagcagcaatgaacactatttcaggggtaaaagctacgtacctacttgcagttgctttcctggagatactacgttttagttgcaatggtggcatactctcggctacatctacattgaatagatcaaacagtgctttcagttgtgtatttgaatacctgctcactccaaatttgacaccagcagtaactcagtgtttgacggcagttgcacatagagcttttgaaacagtgctgtcgtggctggatgatcgcatatctgacataggtgaaggagctgatgttagagaatcggttctttctgttcatgcttgctttctgataaaaagcatgtcccagagagacgagcatgttcgtgatgtgagtgttaagcttttaacgcagctgaaggaaaagttcccacaggtcctctggaactcttcatgcttggatttacttcttatttctgttcacaatgagttgacttctggtccagtcagtgatcctgcttgggttgcaactgtacgctcactgtatcaaaagatcgctagggaatggttaacaagtgctctttcatatgctccatgtaccacacaaggccttatacaggaaaatttttgcaagccaagtggagtacaaagaacacaacatacagcagatgttgtttcacttttatctgagatacgtatttgtagtggaaagaatgattggaacggtattaggacggccaatgttcctgcagttatggactcagcagcagcagcatcgggagccaaaaaagaagcacctgacttcactttggaagtactctctactgcagtagtgagtgcaactgtgaagtgcaatcatgctggtgagattgctggtatgagaaggctgtttagtactatgggaggcataaacatgggcatgtctcctcctgggacacaatctttgcacccccatcagtcatttgatgaagtttttgtctccaagtttgtcagtcttcttcagaactttgttgttgcagctgagaaacaaccaatagataattcacaatttcgtgaaacatgttctcaagctacagcattacttcttgatcatatggtgtctgattctagagcaaacctggaagggttttctcagcttatacggcttctatgttggtgtcctgcttatatttctacccctgatgcaatggaaactggaatctacatctggacatggctagtatcggctgcgccttctttaggtcctcttgtgcttgcggaacttgttgatgcatggctgtggaccatagatacaaagcgtggattgtttgcatcagatatgaattactgtggcccagatgcaaaattgaggccgcatcttatcgctggtgagcctgaggcaccaccagaaaaggacccagtagaagcaataatagcccatagactctggcttggcttcttcattgatcggtttgaggtggttcggcatgacagcattgaacaacttctacttctaggtcgaatgttacaaggaacaatgaagtctccagctcatttttctcaccatcctgctgctactggcactttctttactgcgatgctccttggattgaagttttgctcatgccagtctcaatctaacttgcagaagtgtaatatggggcttcagttgttagaggacagggtataccgtgctgctttgggatggttttcttatgcgcctgagtggtatgaatctccaaacaaaacttatgctcagagagaagctcaatctgtgtcagtatttgttcattttctacaaaatgagcgcaccagtggtcctgtcgattcggtttcaaagttacagggacgtgaaggtgaacctagcatggcagatcacattcatcctgtttggggctgtgttgacaactacacaaatgcaagggaaaagcgtaaacagttacttctgacactttctcagaatgaggcagacagacttgaagtctgggcacaaccaatacatacaaaagatacaacgacttttcgcggtaaaatcagctcggataaatggattgatcatgtcagaactgcttttgctgttgatcctcgaattgctctttctatgcctttgaggtttccaacgaatgctacaatgcaatctgagattactcagttggtacagacacgattactggagcttcgtacaattcctgaagcattaccctttttcattactccaaaagcagtagatgaaaattcagtgctgttacagcaactaccacactgggctccatgttctgttacacaggcattggagtttcttactcctccttataaaggacatccacgtgttatggcctatgtccttcgtgtcttggagacttacccccctgagactgttaccttttttatgccacaattggtacaatctctcagatatgatgaagggaaactggttgaagggtacttgcttggagctactcgaagaagtaatatatttgctcatatcttgatatggcatctgcagggagaatatgttgatgaatctgagaaagatgcagctgctctgaagggcagtgcattccagtccttgctcccagctgttaaggacaaaattatagagagttttactccagaggctcgtgacatgtttgaaagagaatttgatttctttgacaaagtcacatctatttctggtgttcttttccctctccccaaggacgagcggagagcgggtataagaagggaactggagaagatttctattccaggtgatgacctctacctacctactgcaacaaacaagctagtacggggtatacagttggacagcggtattcctctccagtctgctgcaaaagttccaataatgattacttttaacgttgttgaccgtgacggggacccaaatgatgtaaaaccacaggcttgtatttttaaggttggtgatgactgtagacaagatgtgctggcgctgcaagtgattgctctattaagggatgtatttcaagctgtcggattaaacctgtatctttttccatatggtgttttgcctactggaccaggccgaggcataattgaggtggtcccagatactcgaagtagaaatcaaatgggtgaaacaactgatggtggtttattagagatatttcagcaagattatggtcctgtaggttcaccttcttttgaaactgctcgagaaatgtttatgatcagtagtgctggatatgctgttgctagcttactccttcaaccgaaggatcggcataatggcaatcttctctttgatagccatgggagattagttcacattgattttggttttattttggagatttcacctggaggtaacatggggtttgagagtgcacatttcaagctaagccacgagatgactcaattgctggatccatctggaactatgaagagtgatacatggaaccaatttctcaggttgtgtgtcaaaggatacctagcagcaaggaggcatatgaatgggattttaagtacagtcaacctaatggtggacagtggccttccttgctttagcaggggagatcctatcaataatcttcggaagcggtttcatccagagatgaatgaacgtgaggccgctaacttcatggtacgaacatgtgctgatgcttacaacaagtggactaccgcagggtatgacttgattcagtacttgcagcagggtattgagaaatagtttgtttctcgttttttaagtggcgttcgtgtacatcaattgtatgtagccactatctttttatgtagaatttattttttgagttgtatcatcgggcaaggatggaattcatgtgattaacgtaggatgcttggtgcaaagaggcaattctttttttttcttgcactgtaaaactgccaagaaagtagctagtaagttgatcaagattctgtattgctgtcgcagaatgcattttcgtttactagacatgtatgattcgcatttttatcatgtgatttcattttttccctcgtcaccagatacgagtggctcattgttagac

SEQ ID NO: 47860 - DNA, 3747 bp, Zea Mays
cctcacttgagcagtctgttggaacatatttggatgatcgcatatctgacataggtgaaggagctgatgttagagaatcggttctttctgttcatgcttgctttctgataaaaagcatgtcccagagagacgagcatgttcgtgatgtgagtgttaagcttttaacgcagctgaaggaaaagttcccacaggtcctctggaactcttcatgcttggatttacttcttatttctgttcacaatgagttgacttctggtccagtcagtgatcctgcttgggttgcaactgtacgctcactgtatcaaaagatcgctagggaatggttaacaagtgctctttcatatgctccatgtaccacacaaggccttatacaggaaaatttttgcaagccaagtggagtacaaagaacacaacatacagcagatgttgtttcacttttatctgagatacgtatttgtagtggaaagaatgattggaacggtattaggacggccaatgttcctgcagttatggactcagcagcagcagcatcgggagccaaaaaagaagcacctgacttcactttggaagtactctctactgcagtagtgagtgcaactgtgaagtgcaatcatgctggtgagattgctggtatgagaaggctgtttagtactatgggaggcataaacatgggcatgtctcctcctgggacacaatctttgcacccccatcagtcatttgatgaagtttttgtctccaagtttgtcagtcttcttcagaactttgttgttgcagctgagaaacaaccaatagataattcacaatttcgtgaaacatgttctcaagctacagcattacttcttgatcatatggtgtctgattctagagcaaacctggaagggttttctcagcttatacggcttctatgttggtgtcctgcttatatttctacccctgatgcaatggaaactggaatctacatctggacatggctagtatcggctgcgccttctttaggtcctcttgtgcttgcggaacttgttgatgcatggctgtggaccatagatacaaagcgtggattgtttgcatcagatatgaattactgtggcccagatgcaaaattgaggccgcatcttatcgctggtgagcctgaggcaccaccagaaaaggacccagtagaagcaataatagcccatagactctggcttggcttcttcattgatcggtttgaggtggttcggcatgacagcattgaacaacttctacttctaggtcgaatgttacaaggaacaatgaagtctccagctcatttttctcaccatcctgctgctactggcactttctttactgcgatgctccttggattgaagttttgctcatgccagtctcaatctaacttgcagaagtgtaatatggggcttcagttgttagaggacagggtataccgtgctgctttgggatggttttcttatgcgcctgagtggtatgaatctccaaacaaaacttatgctcagagagaagctcaatctgtgtcagtatttgttcattttctacaaaatgagcgcaccagtggtcctgtcgattcggtttcaaagttacagggacgtgaaggtgaacctagcatggcagatcacattcatcctgtttggggctgtgttgacaactacacaaatgcaagggaaaagcgtaaacagttacttctgacactttctcagaatgaggcagacagacttgaagtctgggcacaaccaatacatacaaaagatacaacgacttttcgcggtaaaatcagctcggataaatggattgatcatgtcagaactgcttttgctgttgatcctcgaattgctctttctatgcctttgaggtttccaacgaatgctacaatgcaatctgagattactcagttggtacagacacgattactggagcttcgtacaattcctgaagcattaccctttttcattactccaaaagcagtagatgaaaattcagtgctgttacagcaactaccacactgggctccatgttctgttacacaggcattggagtttcttactcctccttataaaggacatccacgtgttatggcctatgtccttcgtgtcttggagacttacccccctgagactgttaccttttttatgccacaattggtacaatctctcagatatgatgaagggaaactggttgaagggtacttgcttggagctactcgaagaagtaatatatttgctcatatcttgatatggcatctgcagggagaatatgttgatgaatctgagaaagatgcagctgctctgaagggcagtgcattccagtccttgctcccagctgttaaggacaaaattatagagagttttactccagaggctcgtgacatgtttgaaagagaatttgatttctttgacaaagtcacatctatttctggtgttcttttccctctccccaaggacgagcggagagcgggtataagaagggaactggagaagatttctattccaggtgatgacctctacctacctactgcaacaaacaagctagtacggggtatacagttggacagcggtattcctctccagtctgctgcaaaagttccaataatgattacttttaacgttgttgaccgtgacggggacccaaatgatgtaaaaccacaggcttgtatttttaaggttggtgatgactgtagacaagatgtgctggcgctgcaagtgattgctctattaagggatgtatttcaagctgtcggattaaacctgtatctttttccatatggtgttttgcctactggaccaggccgaggcataattgaggtggtcccagatactcgaagtagaaatcaaatgggtgaaacaactgatggtggtttattagagatatttcagcaagattatggtcctgtaggttcaccttcttttgaaactgctcgagaaatgtttatgatcagtagtgctggatatgctgttgctagcttactccttcaaccgaaggatcggcataatggcaatcttctctttgatagccatgggagattagttcacattgattttggttttattttggagatttcacctggaggtaacatggggtttgagagtgcacatttcaagctaagccacgagatgactcaattgctggatccatctggaactatgaagagtgatacatggaaccaatttctcaggttgtgtgtcaaaggatacctagcagcaaggaggcatatgaatgggattttaagtacagtcaacctaatggtggacagtggccttccttgctttagcaggggagatcctatcaataatcttcggaagcggtttcatccagagatgaatgaacgtgaggccgctaacttcatggtacgaacatgtgctgatgcttacaacaagtggactaccgcagggtatgacttgattcagtacttgcagcagggtattgagaaatagtttgtttctcgttttttaagtggcgttcgtgtacatcaattgtatgtagccactatctttttatgtagaatttattttttgagttgtatcatcgggcaaggatggaattcatgtgattaacgtaggatgcttggtgcaaagaggcaattctttttttttcttgcactgtaaaactgccaagaaagtagctagtaagttgatcaagattctgtattgctgtcgcagaatgcattttcgtttactagacatgtatgattcgcatttttatcatgtgatttcattttttccctcgtcaccagatacgagtggctcattgttagac

SEQ ID NO: 47861 - DNA, 1924 bp, Zea Mays
gtcagtatgtgtaaagatttgtagtcctgcaggaatatactagtgaatttaggctccacccatgttgattgaacacgattactggagcttcgtacaattcctgaagcattaccctttttcattactccaaaagcagtagatgaaaattcagtgctgttacagcaactaccacactgggctccatgttctgttacacaggcattggagtttcttactcctccttataaaggacatccacgtgttatggcctatgtccttcgtgtcttggagacttacccccctgagactgttaccttttttatgccacaattggtacaatctctcagatatgatgaagggaaactggttgaagggtacttgcttggagctactcgaagaagtaatatatttgctcatatcttgatatggcatctgcagggagaatatgttgatgaatctgagaaagatgcagctgctctgaagggcagtgcattccagtccttgctcccagctgttaaggacaaaattatagagagttttactccagaggctcgtgacatgtttgaaagagaatttgatttctttgacaaagtcacatctatttctggtgttcttttccctctccccaaggacgagcggagagcgggtataagaagggaactggagaagatttctattccaggtgatgacctctacctacctactgcaacaaacaagctagtacggggtatacagttggacagcggtattcctctccagtctgctgcaaaagttccaataatgattacttttaacgttgttgaccgtgacggggacccaaatgatgtaaaaccacaggcttgtatttttaaggttggtgatgactgtagacaagatgtgctggcgctgcaagtgattgctctattaagggatgtatttcaagctgtcggattaaacctgtatctttttccatatggtgttttgcctactggaccaggccgaggcataattgaggtggtcccagatactcgaagtagaaatcaaatgggtgaaacaactgatggtggtttattagagatatttcagcaagattatggtcctgtaggttcaccttcttttgaaactgctcgagaaatgtttatgatcagtagtgctggatatgctgttgctagcttactccttcaaccgaaggatcggcataatggcaatcttctctttgatagccatgggagattagttcacattgattttggttttattttggagatttcacctggaggtaacatggggtttgagagtgcacatttcaagctaagccacgagatgactcaattgctggatccatctggaactatgaagagtgatacatggaaccaatttctcaggttgtgtgtcaaaggatacctagcagcaaggaggcatatgaatgggattttaagtacagtcaacctaatggtggacagtggccttccttgctttagcaggggagatcctatcaataatcttcggaagcggtttcatccagagatgaatgaacgtgaggccgctaacttcatggtacgaacatgtgctgatgcttacaacaagtggactaccgcagggtatgacttgattcagtacttgcagcagggtattgagaaatagtttgtttctcgttttttaagtggcgttcgtgtacatcaattgtatgtagccactatctttttatgtagaatttattttttgagttgtatcatcgggcaaggatggaattcatgtgattaacgtaggatgcttggtgcaaagaggcaattctttttttttcttgcactgtaaaactgccaagaaagtagctagtaagttgatcaagattctgtattgctgtcgcagaatgcattttcgtttactagacatgtatgattcgcatttttatcatgtgatttcattttttccctcgtcaccagatacgagtggctcattgttagac

SEQ ID NO: 47862 - DNA, 2668 bp, Zea Mays
aacacgtctggtcgtccgaaatcacgcggcatcgccatctccagttcagcagttcttcaccgctccacgagacaacacaacccatctctgcgacctgcgacaactacacgaaaccacttgatttctgaaaggcaggccacatatataccggttcctcacagagcgtcgtcgcccggtcgccgtccgtcccaccaccggatcccgcccacccgccagatccaggtgtccagatccccgaagggcgaaggcctgaacccctgcgcatatccccatggagccctcgccggcgcaagcgggcgcgtcggaccgcgaccgctcgccgcctccgcccccgccaccgccgtcccagtcgtctaccgcagcgacgatctcatcgccgcttgccgtcgtctgcagtttctggaaagattttgatttggagaaggaaagaagtggattggatgagcaaggtttaaagattgcggagaatcaagaaactagtcaaaagaacaggcgtaagcttgctgagaacacacgggatttcaaaaaggcatcatcagatgagaaactcagtttactcaattctttgctgaagagttatcaagaggaagttgataacctcacaaagagagcaaagtttggagaaaatgcatttctcaacatctatcagaagctctatgaagctcctgatccatatccagctcttgcttcaatgactgatcaagaccagaaattgtctgaactggagactgagaaccgtaagatgaaactagagcttgaagaataccgtgctgaagctgcacacttgaagaaccagcaggcaacaattaggcgacttgaagagcgtaatcgccaactggaacagcagggaacggtcattgcaggaccaactaaggcaagctacagaaagtgtaaagaatatgcaaaagctacatgaatcggcgcaaagccaattgtttgagcttcgcactcaatcagaggaggatcgagctgcaaaggaggttgaagtcagccttctgatggatgaagttgaaagggctcaagcacgattagtcagtcttgagagggaaaagggggatctgcgttcacaattgcagacaactaatgaggatgcaagcaaaagtagtgactatttggaatcaagtgatatacttgagagttccttgaacgccaaggagaagattatttcggagttgaatgcagaacttcgcaacattgaaagtactttatcaagtgagagagaaatgcatgtgaacgagcttaagaagttgactactttactcactgaacaggaaagtgctcttatggagttgaagaaagaactccaggaaagacctacacaaaaactggtagatgatctcaagaaaaaggttcagattttgcaggctgttggttacaactccattgaagctgaagactgggagcttgctactaatggtgaagaaatgagcaagttggaagcattgcttctagacaagaaccgtaaaatggagcatgagctaacacaactgaaggttaaaatatcagagaaaacaagtgttcttgaggaagctgaaaaaaggattgttgaactaacttcaaaggttgaagagcagcaaaagctgattttgaaacttgaggatgacatactaaagggctacagttcaactgataggaggggctcactcttgaatgactgggatattcaagaaatcggctcaagtgaagcatctgagggctctgatccaaggcatgcatcggcagatcaagatcaaagttcgatgctcaaggtcatttgcaaccagagggatcgtttccgtgcacgtctgcgtgaaactgaggaggaactgaggagactaaaagagaagcatgagatgctgactgttgaactggaaaaaactaaagctgataatgtgcaactgtatggaaagattcgatatgtccaagactatagccacgacaagattgtttccaggggaccaaaaaagtacgcagaagatattgaaagtggttcttctgatgttgaagcaaagtacaagaaaatgtatgaggatgacataaacccgtttgctgctttttcaaagaaggaaaaggatcagcgttataaggaacttggtttaagagacaaaatcacacttagtagtggccgttttgtccttggtaacaaatacgcacggacgtttatattcttctacagcatcggattgcatctccttgtatttacattactgtacagaatgtcagctttgagctatctcaacacaacaactcagcaggatgaaatcattctggatgctggtaatcagaggctaacgcacatgctttaggccaagttccatataacagtagaaaaagaggctctctgggttttgatctatagaatctttggacaggatcgttgctgagattgctattgatttgtttgctttgtacccttaagcgccttgatatgtttctgtagataaaaagaaaaaaaaacctgttttgggggcaggcgtgggtgcggcatgagctttgaactatgtaatactgttgtactgccaatttaccattttgttggtaaatgaaagcacacttgtcacaaaggtatacggtatgccataccatcactacatcgtttagagtgaaatgcctctaaactttttctgcattctcttctagctctatgaactcatggaatggtcattcgttattttttttcactttttaa

SEQ ID NO: 47863 - DNA, 2720 bp, Zea Mays
gccatctccagttcagcagttcttcaccgctccacgagacaacacaacccatctctgcgacctgcgacaactacacgaaaccacttgatttctgaaaggcaggccacatatataccggttcctcacagagcgtcgtcgcccggtcgccgtccgtcccaccaccggatcccgcccacccgccagatccaggtgtccagatccccgaagggcgaaggcctgaacccctgcgcatatccccatggagccctcgccggcgcaagcgggcgcgtcggaccgcgaccgctcgccgcctccgcccccgccaccgccgtcccagtcgtctaccgcagcgacgatctcatcgccgcttgccgtcgtctgcagtttctggaaagattttgatttggagaaggaaagaagtggattggatgagcaaggtttaaagattgcggagaatcaagaaactagtcaaaagaacaggcgtaagcttgctgagaacacacgggatttcaaaaaggcatcatcagatgagaaactcagtttactcaattctttgctgaagagttatcaagaggaagttgataacctcacaaagagagcaaagtttggagaaaatgcatttctcaacatctatcagaagctctatgaagctcctgatccatatccagctcttgcttcaatgactgatcaagaccagaaattgtctgaactggagactgagaaccgtaagatgaaactagagcttgaagaataccgtgctgaagctgcacacttgaagaaccagcaggcaacaattaggcgacttgaagagcgtaatcgccaactggaacagcagatggaggagaaagtaagggagatggttgaaatgaagcagcgaagcatggctgaggatagtcagaaaactctagaagccctgaaagatagggaacggtcattgcaggaccaactaaggcaagctacagaaagtgtaaagaatatgcaaaagctacatgaatcggcgcaaagccaattgtttgagcttcgcactcaatcagaggaggatcgagctgcaaaggaggttgaagtcagccttctgatggatgaagttgaaagggctcaagcacgattagtcagtcttgagagggaaaagggggatctgcgttcacaattgcagacaactaatgaggatgcaagcaaaatgactatttggaatcaagtgatatacttgagagttccttgaacgccaaggagaagattatttcggagttgaatgcagaacttcgcaacattgaaagtactttatcaagtgagagagaaatgcatgtgaacgagcttaagaagttgactactttactcactgaacaggaaagtgctcttatggagttgaagaaagaactccaggaaagacctacacaaaaactggtagatgatctcaagaaaaaggttcagattttgcaggctgttggttacaactccattgaagctgaagactgggagcttgctactaatggtgaagaaatgagcaagttggaagcattgcttctagacaagaaccgtaaaatggagcatgagctaacacaactgaaggttaaaatatcagagaaaacaagtgttcttgaggaagctgaaaaaaggattgttgaactaacttcaaaggttgaagagcagcaaaagctgattttgaaacttgaggatgacatactaaagggctacagttcaactgataggaggggctcactcttgaatgactgggatattcaagaaatcggctcaagtgaagcatctgagggctctgatccaaggcatgcatcggcagatcaagatcaaagttcgatgctcaaggtcatttgcaaccagagggatcgtttccgtgcacgtctgcgtgaaactgaggaggaactgaggagactaaaagagaagcatgagatgctgactgttgaactggaaaaaactaaagctgataatgtgcaactgtatggaaagattcgatatgtccaagactatagccacgacaagattgtttccaggggaccaaaaaagtacgcagaagatattgaaagtggttcttctgatgttgaagcaaagtacaagaaaatgtatgaggatgacataaacccgtttgctgctttttcaaagaaggaaaaggatcagcgttataaggaacttggtttaagagacaaaatcacacttagtagtggccgttttgtccttggtaacaaatacgcacggacgtttatattcttctacagcatcggattgcatctccttgtatttacattactgtacagaatgtcagctttgagctatctcaacacaacaactcagcaggatgaaatcattctggatgctggtaatcagaggctaacgcacatgctttaggccaagttccatataacagtagaaaaagaggctctctgggttttgatctatagaatctttggacaggatcgttgctgagattgctattgatttgtttgctttgtacccttaagcgccttgatatgtttctgtagataaaaagaaaaaaaaacctgttttgggggcaggcgtgggtgcggcatgagctttgaactatgtaatactgttgtactgccaatttaccattttgttggtaaatgaaagcacacttgtcacaaaggtatacggtatgccataccatcactacatcgtttagagtgaaatgcctctaaactttttctgcattctcttctagctctatgaactcatggaatggtcattcgttattttttttcactttttaa

SEQ ID NO: 47864 - DNA, 2539 bp, Zea Mays
acatatataccggttcctcacagagcgtcgtcgcccggtcgccgtccgtcccaccaccggatcccgcccacccgccagatccaggtgtccagatccccgaagggcgaaggcctgaacccctgcgcatatccccatggagccctcgccggcgcaagcgggcgcgtcggaccgcgaccgctcgccgcctccgcccccgccaccgccgtcccagtcgtctaccgcagcgacgatctcatcgccgcttgccgtcgtctgcagtttctggaaagattttgatttggagaaggaaagaagtggattggatgagcaaggtttaaagattgcggagaatcaagaaactagtcaaaagaacaggcgtaagcttgctgagaacacacgggatttcaaaaaggcatcatcagatgagaaactcagtttactcaattctttgctgaagagttatcaagaggaagttgataacctcacaaagagagcaaagtttggagaaaatgcatttctcaacatctatcagaagctctatgaagctcctgatccatatccagctcttgcttcaatgactgatcaagaccagaaattgtctgaactggagactgagaaccgtaagatgaaactagagcttgaagaataccgtgctgaagctgcacacttgaagaaccagcaggcaacaattaggcgacttgaagagcgtaatcgccaactggaacagcagatggaggagaaagtaagggagatggttgaaatgaagcagcgaagcatggctgaggatagtcagaaaactctagaagccctgaaagatagggaacggtcattgcaggaccaactaaggcaagctacagaaagtgtaaagaatatgcaaaagctacatgaatcggcgcaaagccaattgtttgagcttcgcactcaatcagaggaggatcgagctgcaaaggaggttgaagtcagccttctgatggatgaagttgaaagggctcaagcacgattagtcagtcttgagagggaaaagggggatctgcgttcacaattgcagacaactaatgaggatgcaagcaaaagtagtgactatttggaatcaagtgatatacttgagagttccttgaacgccaaggagaagattatttcggagttgaatgcagaacttcgcaacattgaaagtactttatcaagtgagagagaaatgcatgtgaacgagcttaagaagttgactactttactcactgaacaggaaagtgctcttatggagttgaagaaagaactccaggaaagacctacacaaaaactggtagatgatctcaagaaaaaggttcagattttgcaggctgttggttacaactccattgaagctgaagactgggagcttgctactaatggtgaagaaatgagcaagttggaagcattgcttctagacaagaaccgtaaaatggagcatgagctaacacaactgaaggttaaaatatcagagaaaacaagtgttcttgaggaagctgaaaaaaggattgttgaactaacttcaaaggttgaagagcagcaaaagctgattttgaaacttgaggatgacatactaaagggctacagttcaactgataggaggggctcactcttgaatgactgggatattcaagaaatcggctcaagtgaagcatctgagggctctgatccaaggcatgcatcggcagatcaagatcaaagttcgatgctcaaggtcatttgcaaccagagggatcgtttccgtgcacgtctgcgtgaaactgaggaggaactgaggagactaaaagagaagcatgagatgctgactgttgaactggaaaaaactaaagctgataatgtgcaactgtatggaaagattcgatatgtccaagactatagccacgacaagattgtttccaggggaccaaaaaagtacgcagaagatattgaaagtggttcttctgatgttgaagcaaagtacaagaaaatgtatgaggatgacataaacccgtttgctgctttttcaaagaagatacgcacggacgtttatattcttctacagcatcggattgcatctccttgtatttacattactgtacagaatgtcagctttgagctatctcaacacaacaactcagcaggatgaaatcattctggatgctggtaatcagaggctaacgcacatgctttaggccaagttccatataacagtagaaaaagaggctctctgggttttgatctatagaatctttggacaggatcgttgctgagattgctattgatttgtttgctttgtacccttaagcgccttgatatgtttctgtagataaaaagaaaaaaaaacctgttttgggggcaggcgtgggtgcggcatgagctttgaactatgtaatactgttgtactgccaatttaccattttgttggtaaatgaaagcacacttgtcacaaaggtatacggtatgccataccatcactacatcgtttagagtgaaatgcctctaaactttttctgcattctcttctagctctatgaactcatggaatggtcattcgttattttttttcactttttaa

SEQ ID NO: 47865 - DNA, 1423 bp, Zea Mays
aacaaggacagagtcatcctagtgaggaaagtgctcttatggagttgaagaaagaactccaggaaagacctacacaaaaactggtagatgatctcaagaaaaaggttcagattttgcaggctgttggttacaactccattgaagctgaagactgggagcttgctactaatggtgaagaaatgagcaagttggaagcattgcttctagacaagaaccgtaaaatggagcatgagctaacacaactgaaggttaaaatatcagagaaaacaagtgttcttgaggaagctgaaaaaaggattgttgaactaacttcaaaggttgaagagcagcaaaagctgattttgaaacttgaggatgacatactaaagggctacagttcaactgataggaggggctcactcttgaatgactgggatattcaagaaatcggctcaagtgaagcatctgagggctctgatccaaggcatgcatcggcagatcaagatcaaagttcgatgctcaaggtcatttgcaaccagagggatcgtttccgtgcacgtctgcgtgaaactgaggaggaactgaggagactaaaagagaagcatgagatgctgactgttgaactggaaaaaactaaagctgataatgtgcaactgtatggaaagattcgatatgtccaagactatagccacgacaagattgtttccaggggaccaaaaaagtacgcagaagatattgaaagtggttcttctgatgttgaagcaaagtacaagaaaatgtatgaggatgacataaacccgtttgctgctttttcaaagaaggaaaaggatcagcgttataaggaacttggtttaagagacaaaatcacacttagtagtggccgttttgtccttggtaacaaatacgcacggacgtttatattcttctacagcatcggattgcatctccttgtatttacattactgtacagaatgtcagctttgagctatctcaacacaacaactcagcaggatgaaatcattctggatgctggtaatcagaggctaacgcacatgctttaggccaagttccatataacagtagaaaaagaggctctctgggttttgatctatagaatctttggacaggatcgttgctgagattgctattgatttgtttgctttgtacccttaagcgccttgatatgtttctgtagataaaaagaaaaaaaaacctgttttgggggcaggcgtgggtgcggcatgagctttgaactatgtaatactgttgtactgccaatttaccattttgttggtaaatgaaagcacacttgtcacaaaggtatacggtatgccataccatcactacatcgtttagagtgaaatgcctctaaactttttctgcattctcttctagctctatgaactcatggaatggtcattcgttattttttttcactttttaa

SEQ ID NO: 47866 - DNA, 1340 bp, Zea Mays
aaggacagagtcatcctagtgaggaaagtgctcttatggagttgaagaaagaactccaggaaagacctacacaaaaactggtagatgatctcaagaaaaaggttcagattttgcaggctgttggttacaactccattgaagctgaagactgggagcttgctactaatggtgaagaaatgagcaagttggaagcattgcttctagacaagaaccgtaaaatggagcatgagctaacacaactgaaggttaaaatatcagagaaaacaagtgttcttgaggaagctgaaaaaaggattgttgaactaacttcaaaggttgaagagcagcaaaagctgattttgaaacttgaggatgacatactaaagggctacagttcaactgataggaggggctcactcttgaatgactgggatattcaagaaatcggctcaagtgaagcatctgagggctctgatccaaggcatgcatcggcagatcaagatcaaagttcgatgctcaaggtcatttgcaaccagagggatcgtttccgtgcacgtctgcgtgaaactgaggaggaactgaggagactaaaagagaagcatgagatgctgactgttgaactggaaaaaactaaagctgataatgtgcaactgtatggaaagattcgatatgtccaagactatagccacgacaagattgtttccaggggaccaaaaaagtacgcagaagatattgaaagtggttcttctgatgttgaagcaaagtacaagaaaatgtatgaggatgacataaacccgtttgctgctttttcaaagaagatacgcacggacgtttatattcttctacagcatcggattgcatctccttgtatttacattactgtacagaatgtcagctttgagctatctcaacacaacaactcagcaggatgaaatcattctggatgctggtaatcagaggctaacgcacatgctttaggccaagttccatataacagtagaaaaagaggctctctgggttttgatctatagaatctttggacaggatcgttgctgagattgctattgatttgtttgctttgtacccttaagcgccttgatatgtttctgtagataaaaagaaaaaaaaacctgttttgggggcaggcgtgggtgcggcatgagctttgaactatgtaatactgttgtactgccaatttaccattttgttggtaaatgaaagcacacttgtcacaaaggtatacggtatgccataccatcactacatcgtttagagtgaaatgcctctaaactttttctgcattctcttctagctctatgaactcatggaatggtcattcgttattttttttcactttttaa

SEQ ID NO: 47867 - DNA, 598 bp, Zea Mays
ccctgcgctgctctcgtcgtcgacggggttagtggccggctcattgcttgtggcgtcgctgtggccacctacaacgacggggcaacggatttcagagacacgcctgcttacaaggaatcccaatcacaggagttccctgaggagtcggaatcatcgagcgctgatgtgttcgaaggcaacccgactgaggtagcaccagctcttgagtaggactagcaaggaggcacgggggagaaaactcgtctctctattcaagctttagcctatagggagggcttcgcgtttgctgtatagatataaaaggtttggttaaaatctgatgctacgaaaattggctggtataattattttgtactggattttcccttagaatcaaatatagatggatggctagtgcctggtggtgatgggattcaactgtgttattccaaaaaagtgggggatgggggaaagaaacagagcatcagagcaagcattactgtcttttcctgtattttgtattcatcctggaaagtgtgtaactcaaataaaatttcacaaatacatcatgtaccggcacaatccataattaatgaacatgtggcttctcagattcggt

SEQ ID NO: 47868 - DNA, 1251 bp, Zea Mays
caactgccccctttggcttcccggacaatccatctacgcgccggcgctctccgcaccgcacccacccatcgaaattccacttcgcctaattccaaatcgccaaggccgagcagcagcaagcaaagccgcgccggtgaggctggctgttggagaggcatgccgcctaaatccgatagcgttgaaggaatcgtcctgggtttcgtaaatgaggccattgaattcacagaatgcagctgatgcactgcagaagtttaatcttaagaagactgcggtgcaaaaggcactggatgcattggctgacagtggacagatttccttcaaggagtatggcaagcagaaaatttacattgctcggcaagatcaatttgacattccaaatggtgaggaacttgaggagatgaagaaaacaaatgccaagttacaggaagaacttgcggatcaaaagaaagcaattagtgaggttgaatctgaggtacgaggtctgcagtcaaacttgacactcacagagatcacgtcaaagaagagtgaattgcaaagcgaagtccaagaaatggaagagaaactaaataagttgcggagtggtgttaccttggtgaaacctgaggacaagaagatcattgagaattcctttgctgaaaaagtgagccaatggaaaaggcggaagaggatgttcaaggagctctgggataatattactgagcacagcccaaaagatcagaaggaatttaaggaagaacttggtatcgagtacgacgaagatgttgatgtgaacgtgcagtcttactctgacatgctagcaagtctcaacaaaaggcgaaaaatttcccgctgatgatgtagcataagagcgtcttaagttgaaagtaggctacaaccgttacatgccagcagctatgcattcatggttctaccggttcttaaggttctgtagagattagtttaccctgacagcattgaggccccgtttgtttcaactttttttcagcttctgaccaccagaagctgctgcagactaccaaatgctcatattttcagcctgcttttgttagaatcgctttgataaaaaccgttcaaaatcaacgtaaacatacaatcggtcgagtcgttgtgataatagtaatccatcattttctagatcctaaattctataaacccttttatcttcctcttcatataatttccaagatatttaggttctctacacagctagattctaagaaaagctggtctaaaaaaaatcaaaacaaacaa

SEQ ID NO: 47869 - DNA, 1187 bp, Zea Mays
aactgccccctttggcttcccggacaatccatctacgcgccggcgctctccgcaccgcacccacccatcgaaattccacttcgcctaattccaaatcgccaaggccgagcagcagcaagcaaagccgcgccggtgaggctggctgttggagaggcatgccgcctaaatccgatagcgttgaaggaatcgtcctgggtttcgtaaatgagcaaaacaggccattgaattcacagaatgcagctgatgcactgcagaagtttaatcttaagaagactgcggtgcaaaaggcactggatgcattggctgacagtggacagatttccttcaaggagtatggcaagcagaaaatttacattgctcggcaagatcaatttgacattccaaatggtgaggaacttgaggagatgaagaaaacaaatgccaagttacaggaagaacttgcggatcaaaagaaagcaattagtgaggttgaatctggtccaagaaatggaagagaaactaaataagttgcggagtggtgttaccttggtgaaacctgaggacaagaagatcattgagaattcctttgctgaaaaagtgagccaatggaaaaggcggaagaggatgttcaaggagctctgggataatattactgagcacagcccaaaagatcagaaggaatttaaggaagaacttggtatcgagtacgacgaagatgttgatgtgaacgtgcagtcttactctgacatgctagcaagtctcaacaaaaggcgaaaaatttcccgctgatgatgtagcataagagcgtcttaagttgaaagtaggctacaaccgttacatgccagcagctatgcattcatggttctaccggttcttaaggttctgtagagattagtttaccctgacagcattgaggccccgtttgtttcaactttttttcagcttctgaccaccagaagctgctgcagactaccaaatgctcatattttcagcctgcttttgttagaatcgctttgataaaaaccgttcaaaatcaacgtaaacatacaatcggtcgagtcgttgtgataatagtaatccatcattttctagatcctaaattctataaacccttttatcttcctcttcatataatttccaagatatttaggttctctacacagctagattctaagaaaagctggtctaaaaaaaatcaaaacaaacaa

SEQ ID NO: 47870 - DNA, 1142 bp, Zea Mays
aactgccccctttggcttcccggacaatccatctacgcgccggcgctctccgcaccgcacccacccatcgaaattccacttcgcctaattccaaatcgccaaggccgagcagcagcaagcaaagccgcgccggtgaggctggctgttggagaggcatgccgcctaaatccgatagcgttgaaggaatcgtcctgggtttcgtaaatgagaagtttaatcttaagaagactgcggtgcaaaaggcactggatgcattggctgacagtggacagatttccttcaaggagtatggcaagcagaaaatttacattgctcggcaagatcaatttgacattccaaatggtgaggaacttgaggagatgaagaaaacaaatgccaagttacaggaagaacttgcggatcaaaagaaagcaattagtgaggttgaatctggtccaagaaatggaagagaaactaaataagttgcggagtggtgttaccttggtgaaacctgaggacaagaagatcattgagaattcctttgctgaaaaagtgagccaatggaaaaggcggaagaggatgttcaaggagctctgggataatattactgagcacagcccaaaagatcagaaggaatttaaggaagaacttggtatcgagtacgacgaagatgttgatgtgaacgtgcagtcttactctgacatgctagcaagtctcaacaaaaggcgaaaaatttcccgctgatgatgtagcataagagcgtcttaagttgaaagtaggctacaaccgttacatgccagcagctatgcattcatggttctaccggttcttaaggttctgtagagattagtttaccctgacagcattgaggccccgtttgtttcaactttttttcagcttctgaccaccagaagctgctgcagactaccaaatgctcatattttcagcctgcttttgttagaatcgctttgataaaaaccgttcaaaatcaacgtaaacatacaatcggtcgagtcgttgtgataatagtaatccatcattttctagatcctaaattctataaacccttttatcttcctcttcatataatttccaagatatttaggttctctacacagctagattctaagaaaagctggtctaaaaaaaatcaaaacaaacaa

SEQ ID NO: 47871 - DNA, 780 bp, Zea Mays
gccatttgaccgtgccatggccactatatacgctagaaacgagagtttggttatcgtcgtgtgcaggggtacttgggttcgcctataaaaagcggttcttggtgcgctctacagctcacttctagagtttagctatagcctcactgctagagcgccgccatggctcaggtaaggggcagtgctcgtggcactggcagtggcagcagcgccgccgcgctggcgctggtcctcctgtgcgcgctcctccgcggcgagttcgccgagtcggcggtgtacacggtcggcgaccgcggcgggtggagcttcaacaccgccagctggcccaacgtgttcaggtacgacgccagggcgcacaacgtggtgcccgtgagcgcggcggggtacagctcgtgcagcgcgcccgagggcgccagggcgctcgccaccgggaacgaccgcgtcacgctgaggcgcggcgccaactacttcatctgcagcttcccaggccactgccaggccggcatgaaggtcgccgtcaccgccgcctaggcactgcagggcggccaatcagccggcggagagcgccgcgctcacggagtagtaaagcacgtagctaattagacggtgctgcccttgttgttcaataatatcgtctgtcgtcccgtacttcataacctgcgcggcgtgttagtagttgtttggtggtgtttggcgactggcactataaagaagggtcagatcgagtgatgtacttgctaccaataaaggtatacggtttgtgtgttcactcgatgttatata

SEQ ID NO: 47872 - DNA, 1383 bp, Zea Mays
cggtcgccctccgcccctatcccatcctccatgtcagtatgtcaccacctcccccgtccggccgcgccgcgccgtgcccgacccaaccaccacgccacttccctcccgtcccgtctcgttctcgtcgcacctcgccccgcagggaagggggtgcgcgctcgctcgatccgtgcgcgccagccagcgccatggcctcggaccaacaggccctctcggtcccggtccccgtccccgtcccgtccaaccctaacccgagcgcactagccgacccgaccccgccctcggcctccgccccgcgcaagctccctatcaagcgccggtccccgcggccgtcgtcctcgcccccatcctcctctccggactcctccgacccgctccgcgcgcccgcggccggcggcggtggcggcggatctgacaagcagcagcagccgcccttcaagttccagcgcatctggtccgagtccgacgagctccgcttcctgcagggcctcctcggctgcggcgcgcagggcctcgtcttcccacgcgacctcaacgtcttctacgaccgcttctccgagtccatgccccagccctacacccgcgcccagctctccgagaagctccgccgcctcaagaacaagttccgcagcatgtccgcgcgcgtcgcggagggcctagacccggctcgccttgcgccgcacgaccgcgacgtgctccacctctgctccaggctgtgggaccccgccaacgccgccacgtcgcccttcgtggccagcgccggaacgtccgggaacaagcgccgccgcgccaacctgcagggcacgtcactccctcccccagacgcgtctggggatagcaactcccatgactacaatgggattaactcctctgctccctgtttgtttccggatggttccaatggcgaggatatgttttaccttgagcaagaacctgggcacctgggcgaccatgaaggtgctgctccggtagcagatagcagattcggtgttattgtgcaggagcagggtgttattgtgcatgagcagggtgaggccgtgggtactctccccaaatgggaacaatggaattggcaatgagatgaatgtggagtgtaaaatggtggtgccgtgcagcaacgagcatcgaatggcgaatgctgtcctagatgtgtttgaggaatgcctgagggaggcaaagagtaatggggttatcaatggtggcaatgtggacgggagtggtgaggaaagcgagctctccaagcggtggagagcgcagaggatggatgagcttgatgtcttaagccggaggctgaggttgctggttgagtatgctgcggcggctgggcagtgaagcagagattttggtggttttgcttcactacaacgtctacattcagcctgc

SEQ ID NO: 47873 - DNA, 1513 bp, Zea Mays
cggtcgccctccgcccctatcccatcctccatgtcagtatgtcaccacctcccccgtccggccgcgccgcgccgtgcccgacccaaccaccacgccacttccctcccgtcccgtctcgttctcgtcgcacctcgccccgcagggaagggggtgcgcgctcgctcgatccgtgcgcgccagccagcgccatggcctcggaccaacaggccctctcggtcccggtccccgtccccgtcccgtccaaccctaacccgagcgcactagccgacccgaccccgccctcggcctccgccccgcgcaagctccctatcaagcgccggtccccgcggccgtcgtcctcgcccccatcctcctctccggactcctccgacccgctccgcgcgcccgcggccggcggcggtggcggcggatctgacaagcagcagcagccgcccttcaagttccagcgcatctggtccgagtccgacgagctccgcttcctgcagggcctcctcggctgcggcgcgcagggcctcgtcttcccacgcgacctcaacgtcttctacgaccgcttctccgagtccatgccccagccctacacccgcgcccagctctccgagaagctccgccgcctcaagaacaagttccgcagcatgtccgcgcgcgtcgcggagggcctagacccggctcgccttgcgccgcacgaccgcgacgtgctccacctctgctccaggctgtgggaccccgccaacgccgccacgtcgcccttcgtggccagcgccggaacgtccgggaacaagcgccgccgcgccaacctgcagggcacgtcactccctcccccagacgcgtctggggatagcaactcccatgactacaatgggattaactcctctgctccctgtttgtttccggatggttccaatggcgaggatatgttttaccttgagcaagaacctgggcacctgggcgaccatgaaggtgctgctccggtagcagatagcagattcggtgttattgtgcaggagcagggtgttattgtgcatgagcagggtgaggccgtgggtactctccccaaatgggaacaatggaattggcaatgagatgaatgtggagtgtaaaatggtggtgccgtgcagcaacgagcatcgaatggcgaatgctgtcctagatgtgtttgaggaatgcctgagggaggcaaagagtaatggggttatcaatggtggcaatgtggacgggagtggtgaggaaagcgagctctccaagcggtggagagcgcagaggatggatgagcttgatgtcttaagccggaggctgaggttgctggttgagtatgctgcggcggctgggcagtgaagcagagattttggtggttttgcgcatccacacttccaccccaccacgccaccggcagcgcccgcctgctccaatggcttctcctcatccccgcctgcctgcaggctgcagccgccttccctctgggctaaacggagctccatcagaggacgatggagctgcttgggctggtggataggag

SEQ ID NO: 47874 - DNA, 2698 bp, Zea Mays
cggtcgccctccgcccctatcccatcctccatgtcagtatgtcaccacctcccccgtccggccgcgccgcgccgtgcccgacccaaccaccacgccacttccctcccgtcccgtctcgttctcgtcgcacctcgccccgcagggaagggggtgcgcgctcgctcgatccgtgcgcgccagccagcgccatggcctcggaccaacaggccctctcggtcccggtccccgtccccgtcccgtccaaccctaacccgagcgcactagccgacccgaccccgccctcggcctccgccccgcgcaagctccctatcaagcgccggtccccgcggccgtcgtcctcgcccccatcctcctctccggactcctccgacccgctccgcgcgcccgcggccggcggcggtggcggcggatctgacaagcagcagcagccgcccttcaagttccagcgcatctggtccgagtccgacgagctccgcttcctgcagggcctcctcggctgcggcgcgcagggcctcgtcttcccacgcgacctcaacgtcttctacgaccgcttctccgagtccatgccccagccctacacccgcgcccagctctccgagaagctccgccgcctcaagaacaagttccgcagcatgtccgcgcgcgtcgcggagggcctagacccggctcgccttgcgccgcacgaccgcgacgtgctccacctctgctccaggctgtgggaccccgccaacgccgccacgtcgcccttcgtggccagcgccggaacgtccgggaacaagcgccgccgcgccaacctgcagggcacgtcactccctcccccagacgcgtctggggatagcaactcccatgactacaatgggattaactcctctgctccctgtttgtttccggatggttccaatggcgaggatatgttttaccttgagcaagaacctgggcacctgggcgaccatgaaggtgctgctccggtagcagatagcagattcggtgttattgtgcaggagcagggtgttattgtgcatgagcagggtgaggccgtgggtactctccccaaatgggaacaatggaattggcaatgagatgaatgtggagtgtaaaatggtggtgccgtgcagcaacgagcatcgaatggcgaatgctgtcctagatgtgtttgaggaatgcctgagggaggcaaagagtaatggggttatcaatggtggcaatgtggacgggagtggtgaggaaagcgagctctccaagcggtggagagcgcagaggatggatgagcttgatgtcttaagccggaggctgaggttgctggttgagtatgctgcggcggctgggcagtgaagcagagattttggtggttttggtgatgttcctgccacccttttccccttttgtatagaagctaggttcctgtgctatgctttggaatgtattcctcagctggacccttgcctttagaaagcttactatatttaactatgtacccttgagtttaataactcgagcagcataataatctataattttaacgctgttatttgcatgggttcctgctgtttgatatagatgatagccttgttaatgtagcttcaggctttcaaatttcctctttttcaattagaagctgttgtacttgtaacttgtaagctgtgagagagtaatattatgtttccttgttaaccgcttgtaatgcttctcttatagcttcactacaacgtctacattcagcctgcaatacccatgatttatttgcaagcgcttcctcgcttgtctgcagcgcatccacacttccaccccaccacgccaccggcagcgcccgcctgctccaatggcttctcctcatccccgcctgcctgcaggctgcagccgccttccctctgggctaaacggagctccatcagaggacgatggagctgcttgggctggtggataggagtggtgggatagcgcccttcacttcgctcctggcggcggcaatacaaggttttgggtgtgtgggttctagtggtaccatggcgttggcccattgaatccatggaggagcaggtgctccatcaccttgtgtgggcagtggtgccagaaaggaagaggcaggccgcaggtgtggtttggtagatatccagaatgatatgctggagcgggagacatccctgacataacattgggagcagaagagaaactgtggacatcactgcaacctgaggtaggaataccatgcagatgcattcgctggttgagtgctatagttgggaccaatatcaaacttctgtacttgcaaaaggtgaaaataatacatgtttattccagaagggcgggcttggtgcagcggtagagcctaccgtctgtaaccggaaggtcccgggttggagcaccagtctctgcatattatgcgagtaaggcttggcgcttaaagatacccttccacagatcccgcacagtgcgggaagcctacggcactggcttccgtaaatgagcaagtacagcatagcagaattttgtctcttgcgctccgaggaaaaatatcaagaaaattgagaagaagaggaatttgttccatgactacaatgtgattagctcctctcctcccagcttgttttcagatggttccagtgttgaatatgttctactttaagcaggaaagcaggcaactagacaatcacaaagagtgaagtttgaaatagtgagtgagataaggagcaggataaag

SEQ ID NO: 47875 - DNA, 2594 bp, Zea Mays
cggtcgccctccgcccctatcccatcctccatgtcagtatgtcaccacctcccccgtccggccgcgccgcgccgtgcccgacccaaccaccacgccacttccctcccgtcccgtctcgttctcgtcgcacctcgccccgcagggaagggggtgcgcgctcgctcgatccgtgcgcgccagccagcgccatggcctcggaccaacaggccctctcggtcccggtccccgtccccgtcccgtccaaccctaacccgagcgcactagccgacccgaccccgccctcggcctccgccccgcgcaagctccctatcaagcgccggtccccgcggccgtcgtcctcgcccccatcctcctctccggactcctccgacccgctccgcgcgcccgcggccggcggcggtggcggcggatctgacaagcagcagcagccgcccttcaagttccagcgcatctggtccgagtccgacgagctccgcttcctgcagggcctcctcggctgcggcgcgcagggcctcgtcttcccacgcgacctcaacgtcttctacgaccgcttctccgagtccatgccccagccctacacccgcgcccagctctccgagaagctccgccgcctcaagaacaagttccgcagcatgtccgcgcgcgtcgcggagggcctagacccggctcgccttgcgccgcacgaccgcgacgtgctccacctctgctccaggctgtgggaccccgccaacgccgccacgtcgcccttcgtggccagcgccggaacgtccgggaacaagcgccgccgcgccaacctgcagggcacgtcactccctcccccagacgcgtctggggatagcaactcccatgactacaatgggattaactcctctgctccctgtttgtttccggatggttccaatggcgaggatatgttttaccttgagcaagaacctgggcacctgggcgaccatgaaggtgctgctccggtagcagatagcagattcggtgttattgtgcaggagcagggtgttattgtgcatgagcagggtgaggccgtgggtactctccccaaatgggaacaatggaattggcaatgagatgaatgtggagtgtaaaatggtggtgccgtgcagcaacgagcatcgaatggcgaatgctgtcctagatgtgtttgaggaatgcctgagggaggcaaagagtaatggggttatcaatggtggcaatgtggacgggagtggtgaggaaagcgagctctccaagcggtggagagcgcagaggatggatgagcttgatgtcttaagccggaggctgaggttgctggttgagtatgctgcggcggctgggcagtgaagcagagattttggtggttttggtgatgttcctgccacccttttccccttttgtatagaagctaggttcctgtgctatgctttggaatgtattcctcagctggacccttgcctttagaaagcttactatatttaactatgtacccttgagtttaataactcgagcagcataataatctataattttaacgctgttatttgcatgggttcctgctgtttgatatagatgatagccttgttaatgtagcttcaggctttcaaatttcctctttttcaattagaagctgttgtacttgtaacttgtaagctgtgagagagtaatattatgtttccttgttaaccgcttgtaatgcttctcttatagcttcactacaacgtctacattcagcctgcaatacccatgatttatttgcaagcgcttcctcgcttgtctgcagcgcatccacacttccaccccaccacgccaccggcagcgcccgcctgctccaatggcttctcctcatccccgcctgcctgcaggctgcagccgccttccctctgggctaaacggagctccatcagaggacgatggagctgcttgggctggtggataggagtggtgggatagcgcccttcacttcgctcctggcggcggcaatacaaggttttgggtgtgtgggttctagtggtaccatggcgttggcccattgaatccatggaggagcaggtgctccatcaccttgtgtgggcagtggtgccagaaaggaagaggcaggccgcaggtgtggtttggtagatatccagaatgatatgctggagcgggagacatccctgacataacattgggagcagaagagaaactgtggacatcactgcaacctgagaagggcgggcttggtgcagcggtagagcctaccgtctgtaaccggaaggtcccgggttggagcaccagtctctgcatattatgcgagtaaggcttggcgcttaaagatacccttccacagatcccgcacagtgcgggaagcctacggcactggcttccgtaaatgagcaagtacagcatagcagaattttgtctcttgcgctccgaggaaaaatatcaagaaaattgagaagaagaggaatttgttccatgactacaatgtgattagctcctctcctcccagcttgttttcagatggttccagtgttgaatatgttctactttaagcaggaaagcaggcaactagacaatcacaaagagtgaagtttgaaatagtgagtgagataaggagcaggataaag

SEQ ID NO: 47876 - DNA, 2441 bp, Zea Mays
cggtcgccctccgcccctatcccatcctccatgtcagtatgtcaccacctcccccgtccggccgcgccgcgccgtgcccgacccaaccaccacgccacttccctcccgtcccgtctcgttctcgtcgcacctcgccccgcagggaagggggtgcgcgctcgctcgatccgtgcgcgccagccagcgccatggcctcggaccaacaggccctctcggtcccggtccccgtccccgtcccgtccaaccctaacccgagcgcactagccgacccgaccccgccctcggcctccgccccgcgcaagctccctatcaagcgccggtccccgcggccgtcgtcctcgcccccatcctcctctccggactcctccgacccgctccgcgcgcccgcggccggcggcggtggcggcggatctgacaagcagcagcagccgcccttcaagttccagcgcatctggtccgagtccgacgagctccgcttcctgcagggcctcctcggctgcggcgcgcagggcctcgtcttcccacgcgacctcaacgtcttctacgaccgcttctccgagtccatgccccagccctacacccgcgcccagctctccgagaagctccgccgcctcaagaacaagttccgcagcatgtccgcgcgcgtcgcggagggcctagacccggctcgccttgcgccgcacgaccgcgacgtgctccacctctgctccaggctgtgggaccccgccaacgccgccacgtcgcccttcgtggccagcgccggaacgtccgggaacaagcgccgccgcgccaacctgcagggcacgtcactccctcccccagacgcgtctggggatagcaactcccatgactacaatgggattaactcctctgctccctgtttgtttccggatggttccaatggcgaggatatgttttaccttgagcaagaacctgggcacctgggcgaccatgaaggtgctgctccggtagcagatagcagattcggtgttattgtgcaggagcagggtgttattgtgcatgagcagggtgaggccgtgggtactctccccaaatgggaacaatggaattggcaatgagatgaatgtggagtgtaaaatggtggtgccgtgcagcaacgagcatcgaatggcgaatgctgtcctagatgtgtttgaggaatgcctgagggaggcaaagagtaatggggttatcaatggtggcaatgtggacgggagtggtgaggaaagcgagctctccaagcggtggagagcgcagaggatggatgagcttgatgtcttaagccggaggctgaggttgctggttgagtatgctgcggcggctgggcagtgaagcagagattttggtggttttggtgatgttcctgccacccttttccccttttgtatagaagctaggttcctgtgctatgctttggaatgtattcctcagctggacccttgcctttagaaagcttactatatttaactatgtacccttgagtttaataactcgagcagcataataatctataattttaacgctgttatttgcatgggttcctgctgtttgatatagatgatagccttgttaatgtagcttcaggctttcaaatttcctctttttcaattagaagctgttgtacttgtaacttgtaagctgtgagagagtaatattatgtttccttgttaaccgcttgtaatgcttctcttatagcttcactacaacgtctacattcagcctgcaatacccatgatttatttgcaagcgcttcctcgcttgtctgcagcgcatccacacttccaccccaccacgccaccggcagcgcccgcctgctccaatggcttctcctcatccccgcctgcctgcaggctgcagccgccttccctctgggctaaacggagctccatcagaggacgatggagctgcttgggctggtggataggagtggtgggatagcgcccttcacttcgctcctggcggcggcaatacaaggttttgggtgtgtgggttctagtggtaccatggcgttggcccattgaatccatggaggagcaggtgctccatcaccttgtgtgggcagtggtgccagaaaggaagaggcaggccgcaggtgtggtttggtagatatccagaatgatatgctggagcgggagacatccctgacataacattgggagcagaagagaaactgtggacatcactgcaacctgagcttccgtaaatgagcaagtacagcatagcagaattttgtctcttgcgctccgaggaaaaatatcaagaaaattgagaagaagaggaatttgttccatgactacaatgtgattagctcctctcctcccagcttgttttcagatggttccagtgttgaatatgttctactttaagcaggaaagcaggcaactagacaatcacaaagagtgaagtttgaaatagtgagtgagataaggagcaggataaag

SEQ ID NO: 47877 - DNA, 3749 bp, Zea Mays
gtcattatcactagtccccgccccacctcctctccctgtaaagatttcgttcgttcctcttccgggttcctgatctcggtctcggtccccgattcgacctgtggagtctttcctgcaatctgtagcagtagcacgttgcctcgggaggagtttgtgcgttcctccagaggagccgagtccgtcagtggtcgcttgccactagcgcgaatcacgtccgggttgcgtcctccactccgtgccaatctaattccgggcgcccggggaaggattcgggacggaaggcactggtttctgtgcttccttggattccacggtgaaaccagcctgcgtggtccgcgccggctcccaccgcattccggcgagtcccgagtaacctcgctgtgggggggatggtgtcgcaggctcccatggcaggggcgggcgcgggcgcgggcgccaacctcaccgcggcgctgtgcaggaagagcaaccgcgtcgcgcgggtgctcgcgtacgcgctgctcgagtgggtcctcatcgcgctgcttctcgccgacggcgtcttctcctacctcatatcccggttcgccgccttcttcgggctcgcgccgccgtgcgcgctctgctcccgcctcggcgtcgacagcctcttcgagacccacccccgccaccgaggcgtcggcgccgagcccctgcgccgcttgctgtgcgacgtgcacgccgccgagctgtcgcgcgtcgggtactgcagcgcgcaccgccggctcgcggacgccggggacatgtgcgaggattgcgccgccgcggcggcggcggcgcccgggaaggcgttgctgtcatggatgggccagagcgagctcggcgagcgggacctcgcctgcgcctgctgcggcgtcgcgctcgagagtggcttctactcgccaccgttcttgctcaccgcgtcggcgccccgtggctcagattgtgggcacaaggaagaggaagaggcagccaggccaaatggagacgtggtcttcgtctccgaggaaggtcctgtgatcgagcttttcgacgagaagccatttgtggagggtgactcaatcggcgtcttggcttgtggtgccgaagttgttgccaatgttgagcggctggtgcctcttgaatcaattgactcgttgcccgtcgccatggccaccatgttatctcaatccggtgttgaaggaaaggaagcagttgatcatgatgatgtaaggcagaataacgtggatatggagcacacagttagtaccgatgaggagacaattgtcatgacatctgatgatgacaaggttgatgatgtggttgatcggctgattgatgaacatattgcagccgtagtctttgtgccagcttgtatagaatctacgcctaacgatgggataaatgcaggcaaaacggtggaggcctttgcctttgctgatcatcagtctgctgaggatgacagtggattgaaagataaggatcagaaaatatctgatatatctgaggatgagcaagccgaacaggctactccacaacaggaattgtgtgctatgccgacaaatcctagtgaccatgaaattgttgagaggttagacagaagtattgacttggagcattttccacaggctaagtcaaagcataaaatgaactctatgccagtggaagcttctgagcatgtcactgtaactcagattgaggagaagcaggttcagcaagctgaggtaactcaggagttggattcactaccaatatgttctagggagcaagctgaggtaactcaggctgggttggaacaagattgtggctctgtgccaattgattctggggaacatggttgcctgacttcatatgctcatactgatgttgagcaagctgaggtgaagcagaaagtcacttctgtaacaagagatgttctcgattatgcagcgggcacttttaatgttaacacaaacacatggaaagaagatattgaagaggatccaactgaagctgctctaacggccatatatcaaatttcttacgaacctttgacaaacttagacaagttctctccggatcatagtgtctccgaagaagacagacagcttaatgcgctgactcatatcgaagatatatgtgattcacaggaaccgctggattctaaagcagctgtttctgatgctaaatctgtagattcaggtgttgctactttgtctactgatcttgaaagcacggaattggtgaatgccgatcaactaaaatctgctttggcttccacacgcaagtcattgaacaccctatattttgaacttgaaaatgagaggaacgctgctgctatagctgctgatgaaaccatggcgatgataaaccgcttgcaagaacagaaagctgcaatgcagatggaggcgatccaataccagcggcttatggaggaacagtcagagtatgaccaagaagcactggagaggctgaacgaactagttgtgaagagagagaaggagaagcaagatctggagagagagctcgagctgtaccgccacaaggttcatctctacgaaataaaggtgaggaaaatgtccaggcacaaggctgatgaccagaacggatcgtcgtcaacttcatcgagcgccgaggatagtgacgacctttcacaaagcttctatgaaggtgatgaatcttcccacggtcttaatggaagcaacgggagtattcccacagatgtcgtgctacaagaaactgccagacatctcgttatcatcgatggctctttagctgattttgaggaagagaggctctccatactggaacagcttaaagtgctagaggataagctttttgatctcgatgatgacgatgaatccgatagcaggaagcatttcccagaagaaaaccacttcagcggtgcctcgaacggtttctctgacgacgatagctgctctaaactccgtgacaaaagaagagttgtaacctacagaggaaaggaactccttccgttgttcgacgatgctacgactgtggaagctggaaatgtccccaatggtgacgaggcacatcatccagcagaggctacactggacctcgctagagagcgacataagcttgtgatcgccaacgaaatcgatcaagtgaatgagaggctacaggcccttgaggcagacagggagtacataaaacagtgcgtgagggccttgaaaaggggaggcgaagggttcgatcttctccaggagatattgcagcatcttcgggacctaagaaggatcgagcagcgcggaaggaactctggggagctttcgcctcattacctacatctttacacggactgaagatcagctgcaaagtctcgtgcccaatattgcttgaagatggaaaccataggacaatgataaggggaaaaaaggattgtcgactaataactagcattgtcattggagaggtttcgttgttggttcccggagaggagaaaggagctcctcctggaacagtcacagtctgttcggaaacgccatccggaaggcagatcgcggagcaagtctgtctgcattccaaggtccagggttagtgagctgcccgggtccatgggggtgtgcttgtgggttgtggcggcaatcatggccctgtgcaagcttttaaaagaattcatttatcctgaaaacatgccgatgccagctttgctgccggatacggatagagtgggcttcactagtttttttatatatttcttttttccctcctaaattcttttcctgtaaatcctctagctgtatgtaatgtgctttgggcttctggaatga

SEQ ID NO: 47878 - DNA, 3703 bp, Zea Mays
atttcgttcgttcctcttccgggttcctgatctcggtctcggtccccgattcgacctgtggagtctttcctgcaatctgtagcagtagcacgttgcctcgggaggagtttgtgcgttcctccagaggagccgagtccgtcagtggtcgcttgccactagcgcgaatcacgtccgggttgcgtcctccactccgtgccaatctaattccgggcgcccggggaaggattcgggacggaaggcactggtttctgtgcttccttggattccacggtgaaaccagcctgcgtggtccgcgccggctcccaccgcattccggcgagtcccgagtaacctcgctgtgggggggatggtgtcgcaggctcccatggcaggggcgggcgcgggcgcgggcgccaacctcaccgcggcgctgtgcaggaagagcaaccgcgtcgcgcgggtgctcgcgtacgcgctgctcgagtgggtcctcatcgcgctgcttctcgccgacggcgtcttctcctacctcatatcccggttcgccgccttcttcgggctcgcgccgccgtgcgcgctctgctcccgcctcggcgtcgacagcctcttcgagacccacccccgccaccgaggcgtcggcgccgagcccctgcgccgcttgctgtgcgacgtgcacgccgccgagctgtcgcgcgtcgggtactgcagcgcgcaccgccggctcgcggacgccggggacatgtgcgaggattgcgccgccgcggcggcggcggcgcccgggaaggcgttgctgtcatggatgggccagagcgagctcggcgagcgggacctcgcctgcgcctgctgcggcgtcgcgctcgagagtggcttctactcgccaccgttcttgctcaccgcgtcggcgccccgtggctcagattgtgggcacaaggaagaggaagaggcagccaggccaaatggagacgtggtcttcgtctccgaggaaggtcctgtgatcgagcttttcgacgagaagccatttgtggagggtgactcaatcggcgtcttggcttgtggtgccgaagttgttgccaatgttgagcggctggtgcctcttgaatcaattgactcgttgcccgtcgccatggccaccatgttatctcaatccggtgttgaaggaaaggaagcagttgatcatgatgatgtaaggcagaataacgtggatatggagcacacagttagtaccgatgaggagacaattgtcatgacatctgatgatgacaaggttgatgatgtggttgatcggctgattgatgaacatattgcagccgtagtctttgtgccagcttgtatagaatctacgcctaacgatgggataaatgcaggcaaaacggtggaggcctttgcctttgctgatcatcagtctgctgaggatgacagtggattgaaagataaggatcagaaaatatctgatatatctgaggatgagcaagccgaacaggctactccacaacaggaattgtgtgctatgccgacaaatcctagtgaccatgaaattgttgagaggttagacagaagtattgacttggagcattttccacaggctaagtcaaagcataaaatgaactctatgccagtggaagcttctgagcatgtcactgtaactcagattgaggagaagcaggttcagcaagctgaggtaactcaggagttggattcactaccaatatgttctagggagcaagctgaggtaactcaggctgggttggaacaagattgtggctctgtgccaattgattctggggaacatggttgcctgacttcatatgctcatactgatgttgagcaagctgaggtgaagcagaaagtcacttctgtaacaagagatgttctcgattatgcagcgggcacttttaatgttaacacaaacacatggaaagatattgaagaggatccaactgaagctgctctaacggccatatatcaaatttcttacgaacctttgacaaacttagacaagttctctccggatcatagtgtctccgaagaagacagacagcttaatgcgctgactcatatcgaagatatatgtgattcacaggaaccgctggattctaaagcagctgtttctgatgctaaatctgtagattcaggtgttgctactttgtctactgatcttgaaagcacggaattggtgaatgccgatcaactaaaatctgctttggcttccacacgcaagtcattgaacaccctatattttgaacttgaaaatgagaggaacgctgctgctatagctgctgatgaaaccatggcgatgataaaccgcttgcaagaacagaaagctgcaatgcagatggaggcgatccaataccagcggcttatggaggaacagtcagagtatgaccaagaagcactggagaggctgaacgaactagttgtgaagagagagaaggagaagcaagatctggagagagagctcgagctgtaccgccacaaggttcatctctacgaaataaaggtgaggaaaatgtccaggcacaaggctgatgaccagaacggatcgtcgtcaacttcatcgagcgccgaggatagtgacgacctttcacaaagcttctatgaaggtgatgaatcttcccacggtcttaatggaagcaacgggagtattcccacagatgtcgtgctacaagaaactgccagacatctcgttatcatcgatggctctttagctgattttgaggaagagaggctctccatactggaacagcttaaagtgctagaggataagctttttgatctcgatgatgacgatgaatccgatagcaggaagcatttcccagaagaaaaccacttcagcggtgcctcgaacggtttctctgacgacgatagctgctctaaactccgtgacaaaagaagagttgtaacctacagaggaaaggaactccttccgttgttcgacgatgctacgactgtggaagctggaaatgtccccaatggtgacgaggcacatcatccagcagaggctacactggacctcgctagagagcgacataagcttgtgatcgccaacgaaatcgatcaagtgaatgagaggctacaggcccttgaggcagacagggagtacataaaacagtgcgtgagggccttgaaaaggggaggcgaagggttcgatcttctccaggagatattgcagcatcttcgggacctaagaaggatcgagcagcgcggaaggaactctggggagctttcgcctcattacctacatctttacacggactgaagatcagctgcaaagtctcgtgcccaatattgcttgaagatggaaaccataggacaatgataaggggaaaaaaggattgtcgactaataactagcattgtcattggagaggtttcgttgttggttcccggagaggagaaaggagctcctcctggaacagtcacagtctgttcggaaacgccatccggaaggcagatcgcggagcaagtctgtctgcattccaaggtccagggttagtgagctgcccgggtccatgggggtgtgcttgtgggttgtggcggcaatcatggccctgtgcaagcttttaaaagaattcatttatcctgaaaacatgccgatgccagctttgctgccggatacggatagagtgggcttcactagtttttttatatatttcttttttccctcctaaattcttttcctgtaaatcctctagctgtatgtaatgtgctttgggcttctggaatga

SEQ ID NO: 47879 - DNA, 3527 bp, Zea Mays
atttcgttcgttcctcttccgggttcctgatctcggtctcggtccccgattcgacctgtggagtctttcctgcaatctgtagcagtagcacgttgcctcgggaggagtttgtgcgttcctccagaggagccgagtccgtcagtggtcgcttgccactagcgcgaatcacgtccgggttgcgtcctccactccgtgccaatctaattccgggcgcccggggaaggattcgggacggaaggcactggtttctgtgcttccttggattccacggtgaaaccagcctgcgtggtccgcgccggctcccaccgcattccggcgagtcccgagtaacctcgctgtgggggggatggtgtcgcaggctcccatggcaggggcgggcgcgggcgcgggcgccaacctcaccgcggcgctgtgcaggaagagcaaccgcgtcgcgcgggtgctcgcgtacgcgctgctcgagtgggtcctcatcgcgctgcttctcgccgacggcgtcttctcctacctcatatcccggttcgccgccttcttcgggctcgcgccgccgtgcgcgctctgctcccgcctcggcgtcgacagcctcttcgagacccacccccgccaccgaggcgtcggcgccgagcccctgcgccgcttgctgtgcgacgtgcacgccgccgagctgtcgcgcgtcgggtactgcagcgcgcaccgccggctcgcggacgccggggacatgtgcgaggattgcgccgccgcggcggcggcggcgcccgggaaggcgttgctgtcatggatgggccagagcgagctcggcgagcgggacctcgcctgcgcctgctgcggcgtcgcgctcgagagtggcttctactcgccaccgttcttgctcaccgcgtcggcgccccgtggctcagattgtgggcacaaggaagaggaagaggcagccaggccaaatggagacgtggtcttcgtctccgaggaaggtcctgtgatcgagcttttcgacgagaagccatttgtggagggtgactcaatcggcgtcttggcttgtggtgccgaagttgttgccaatgttgagcggctggtgcctcttgaatcaattgactcgttgcccgtcgccatggccaccatgttatctcaatccggtgttgaaggaaaggaagcagttgatcatgatgatgtaaggcagaataacgtggatatggagcacacagttagtaccgatgaggagacaattgtcatgacatctgatgatgacaaggttgatgatgtggttgatcggctgattgatgaacatattgcagccgtagtctttgtgccagcttgtatagaatctacgcctaacgatgggataaatgcaggcaaaacggtggaggcctttgcctttgctgatcatcagtgctaagtcaaagcataaaatgaactctatgccagtggaagcttctgagcatgtcactgtaactcagattgaggagaagcaggttcagcaagctgaggtaactcaggagttggattcactaccaatatgttctagggagcaagctgaggtaactcaggctgggttggaacaagattgtggctctgtgccaattgattctggggaacatggttgcctgacttcatatgctcatactgatgttgagcaagctgaggtgaagcagaaagtcacttctgtaacaagagatgttctcgattatgcagcgggcacttttaatgttaacacaaacacatggaaagaagatattgaagaggatccaactgaagctgctctaacggccatatatcaaatttcttacgaacctttgacaaacttagacaagttctctccggatcatagtgtctccgaagaagacagacagcttaatgcgctgactcatatcgaagatatatgtgattcacaggaaccgctggattctaaagcagctgtttctgatgctaaatctgtagattcaggtgttgctactttgtctactgatcttgaaagcacggaattggtgaatgccgatcaactaaaatctgctttggcttccacacgcaagtcattgaacaccctatattttgaacttgaaaatgagaggaacgctgctgctatagctgctgatgaaaccatggcgatgataaaccgcttgcaagaacagaaagctgcaatgcagatggaggcgatccaataccagcggcttatggaggaacagtcagagtatgaccaagaagcactggagaggctgaacgaactagttgtgaagagagagaaggagaagcaagatctggagagagagctcgagctgtaccgccacaaggttcatctctacgaaataaaggtgaggaaaatgtccaggcacaaggctgatgaccagaacggatcgtcgtcaacttcatcgagcgccgaggatagtgacgacctttcacaaagcttctatgaaggtgatgaatcttcccacggtcttaatggaagcaacgggagtattcccacagatgtcgtgctacaagaaactgccagacatctcgttatcatcgatggctctttagctgattttgaggaagagaggctctccatactggaacagcttaaagtgctagaggataagctttttgatctcgatgatgacgatgaatccgatagcaggaagcatttcccagaagaaaaccacttcagcggtgcctcgaacggtttctctgacgacgatagctgctctaaactccgtgacaaaagaagagttgtaacctacagaggaaaggaactccttccgttgttcgacgatgctacgactgtggaagctggaaatgtccccaatggtgacgaggcacatcatccagcagaggctacactggacctcgctagagagcgacataagcttgtgatcgccaacgaaatcgatcaagtgaatgagaggctacaggcccttgaggcagacagggagtacataaaacagtgcgtgagggccttgaaaaggggaggcgaagggttcgatcttctccaggagatattgcagcatcttcgggacctaagaaggatcgagcagcgcggaaggaactctggggagctttcgcctcattacctacatctttacacggactgaagatcagctgcaaagtctcgtgcccaatattgcttgaagatggaaaccataggacaatgataaggggaaaaaaggattgtcgactaataactagcattgtcattggagaggtttcgttgttggttcccggagaggagaaaggagctcctcctggaacagtcacagtctgttcggaaacgccatccggaaggcagatcgcggagcaagtctgtctgcattccaaggtccagggttagtgagctgcccgggtccatgggggtgtgcttgtgggttgtggcggcaatcatggccctgtgcaagcttttaaaagaattcatttatcctgaaaacatgccgatgccagctttgctgccggatacggatagagtgggcttcactagtttttttatatatttcttttttccctcctaaattcttttcctgtaaatcctctagctgtatgtaatgtgctttgggcttctggaatga

SEQ ID NO: 47880 - DNA, 3542 bp, Zea Mays
atttcgttcgttcctcttccgggttcctgatctcggtctcggtccccgattcgacctgtggagtctttcctgcaatctgtagcagtagcacgttgcctcgggaggagtttgtgcgttcctccagaggagccgagtccgtcagtggtcgcttgccactagcgcgaatcacgtccgggttgcgtcctccactccgtgccaatctaattccgggcgcccggggaaggattcgggacggaaggcactggtttctgtgcttccttggattccacggtgaaaccagcctgcgtggtccgcgccggctcccaccgcattccggcgagtcccgagtaacctcgctgtgggggggatggtgtcgcaggctcccatggcaggggcgggcgcgggcgcgggcgccaacctcaccgcggcgctgtgcaggaagagcaaccgcgtcgcgcgggtgctcgcgtacgcgctgctcgagtgggtcctcatcgcgctgcttctcgccgacggcgtcttctcctacctcatatcccggttcgccgccttcttcgggctcgcgccgccgtgcgcgctctgctcccgcctcggcgtcgacagcctcttcgagacccacccccgccaccgaggcgtcggcgccgagcccctgcgccgcttgctgtgcgacgtgcacgccgccgagctgtcgcgcgtcgggtactgcagcgcgcaccgccggctcgcggacgccggggacatgtgcgaggattgcgccgccgcggcggcggcggcgcccgggaaggcgttgctgtcatggatgggccagagcgagctcggcgagcgggacctcgcctgcgcctgctgcggcgtcgcgctcgagagtggcttctactcgccaccgttcttgctcaccgcgtcggcgccccgtggctcagattgtgggcacaaggaagaggaagaggcagccaggccaaatggagacgtggtcttcgtctccgaggaaggtcctgtgatcgagcttttcgacgagaagccatttgtggagggtgactcaatcggcgtcttggcttgtggtgccgaagttgttgccaatgttgagcggctggtgcctcttgaatcaattgactcgttgcccgtcgccatggccaccatgttatctcaatccggtgttgaaggaaaggaagcagttgatcatgatgatgtaaggcagaataacgtggatatggagcacacagttagtaccgatgaggagacaattgtcatgacatctgatgatgacaaggttgatgatgtggttgatcggctgattgatgaacatattgcagccgtagtctttgtgccagcttgtatagaatctacgcctaacgatgggataaatgcaggcaaaacggtggaggcctttgcctttgctgatcatcagtctgctgaggatgacagtggattgaaagataaggatcagaaaatatctgatatatctgaggatgagcaagccgaacaggctactccacaacaggaattgtgtgctatgccgacaaatcctagtgaccatgaaattgttgagaggttagacagaagtattgacttggagcattttccacaggctaagtcaaagcataaaatgaactctatgccagtggaagcttctgagcatgtcactgtaactcagattgaggagaagcaggttcagcaagctgaggtaactcaggagttggattcactaccaatatgttctagggagcaagctgaggtaactcaggctgggttggaacaagattgtggctctgtgccaattgattctggggaacatggttgcctgacttcatatgctcatactgatgttgagcaagctgaggtgaagcagaaagtcacttctgtaacaagagatgttctcgattatgcagcgggcacttttaatgttaacacaaacacatggaaaggaaccgctggattctaaagcagctgtttctgatgctaaatctgtagattcaggtgttgctactttgtctactgatcttgaaagcacggaattggtgaatgccgatcaactaaaatctgctttggcttccacacgcaagtcattgaacaccctatattttgaacttgaaaatgagaggaacgctgctgctatagctgctgatgaaaccatggcgatgataaaccgcttgcaagaacagaaagctgcaatgcagatggaggcgatccaataccagcggcttatggaggaacagtcagagtatgaccaagaagcactggagaggctgaacgaactagttgtgaagagagagaaggagaagcaagatctggagagagagctcgagctgtaccgccacaaggttcatctctacgaaataaaggtgaggaaaatgtccaggcacaaggctgatgaccagaacggatcgtcgtcaacttcatcgagcgccgaggatagtgacgacctttcacaaagcttctatgaaggtgatgaatcttcccacggtcttaatggaagcaacgggagtattcccacagatgtcgtgctacaagaaactgccagacatctcgttatcatcgatggctctttagctgattttgaggaagagaggctctccatactggaacagcttaaagtgctagaggataagctttttgatctcgatgatgacgatgaatccgatagcaggaagcatttcccagaagaaaaccacttcagcggtgcctcgaacggtttctctgacgacgatagctgctctaaactccgtgacaaaagaagagttgtaacctacagaggaaaggaactccttccgttgttcgacgatgctacgactgtggaagctggaaatgtccccaatggtgacgaggcacatcatccagcagaggctacactggacctcgctagagagcgacataagcttgtgatcgccaacgaaatcgatcaagtgaatgagaggctacaggcccttgaggcagacagggagtacataaaacagtgcgtgagggccttgaaaaggggaggcgaagggttcgatcttctccaggagatattgcagcatcttcgggacctaagaaggatcgagcagcgcggaaggaactctggggagctttcgcctcattacctacatctttacacggactgaagatcagctgcaaagtctcgtgcccaatattgcttgaagatggaaaccataggacaatgataaggggaaaaaaggattgtcgactaataactagcattgtcattggagaggtttcgttgttggttcccggagaggagaaaggagctcctcctggaacagtcacagtctgttcggaaacgccatccggaaggcagatcgcggagcaagtctgtctgcattccaaggtccagggttagtgagctgcccgggtccatgggggtgtgcttgtgggttgtggcggcaatcatggccctgtgcaagcttttaaaagaattcatttatcctgaaaacatgccgatgccagctttgctgccggatacggatagagtgggcttcactagtttttttatatatttcttttttccctcctaaattcttttcctgtaaatcctctagctgtatgtaatgtgctttgggcttctggaatga

SEQ ID NO: 47881 - DNA, 3595 bp, Zea Mays
gtttagttcagcaccttctaatttttttctgacttcgtccttaatctccatgacacttggattttcttcacgtctaaattctttttatagctagattctctttttgaaagaaaaaaaatctgagccctacggcttaacacgacttaaccgtaggtgaatagctacggacctacggttgacctgttccctaaaccgtcatccgccccacactcagcaaacctttctccccacttgccgcatcggcgccgccgggatgaagcgctccgccgacgcgatgactgagccggtgaagcctgtgttcctcaccaaggcggagcgggagcgcctcgcgcttgagcgccgccaggccgccgtctccgaccagcgccgcaccgcgctcgacctcatccagtccctgccccggccccctccgccgccgacttccggtggtcctcccccgtccggctccaaccccgcacgtcgcgactcctccaactccaaccgcgactccgaccgggacagggaccgggaccaagaccgggaacgccgccgcgacgacgactcccgccgcgaccgatatcgggatcgagatcgagatagggaccgcgaccgagatgactcctcccgccgcgacagggaccgcgaccggcgcgaccgtgatagggaccgggaccgggaccgcgacagggatcgcggggaccgggagagggaccggctggagaagattgcggagcgggagcgtgagaaggagctcgacgcgatcaaggagcagtacctcgggtccaagaagcccaagaagcgggttatcaagccctctgagaagttccgcttctccttcgactgggaaaacaccgaggacaccagccgggacatgaatgcactctaccagtcgccgcacgaggcccggctgctctttggccggggcttccttgccggcattgaccgacgtgagcagaagaaggcggcagctgtgcacgagaaggagacccgtgcagagctgcggcgcaaggctggtgtggaggaccgtccggaggatgatgcggtagataagaagaaggctgctgctgctgaaatttatgatgctttcgatatgcgtgtggacaggcactggtccgaaaagacactcgaggagatgactgagcgggattggcgaattttccgtgaggatttcaatatctcctataagggttctcgcataccccgaccgatgcgaaagtggagtgaaagcaagcttggcaccgagttgcttcgtgctattgacaaggctggatatgaaaaaccgtcaccaatccagatggctgccattccgctaggtctacagcagcgtgatgttattggtattgctgagacaggttctggaaagactgcagcttttgtactccccatgttgtcttacattacccgattgccacccataagcgaggagaatgaggccgagggtccctatgccgttgttatggcacctactcgtgagcttgctcaacagattgaggaggagactgtgaaatttgcaacctatctaggccttaaagttgtctcaattgttggtggccagtcaattgaggagcagggtttcaagattaggcagggctgtgagattgtaattgccacacctggtcggcttcttgattgcttggaaaggaggtatgctgttctcaaccagtgcaactatgttgtgctcgatgaggctgataggatgattgatatgggctttgagccacaagttgttggtgtccttgacgcgatgccatcgagtaacttgaaacctgaaaatgaggatgaggaacttgatgagaaaaggatttacagaactacttatatgttcagtgccaccatgcctcctgctgtggaacgtcttgctaggaagtatctccgaaacccagttgttgtgacaattggtacggctggcaaggccactgatctgatcacccagaatgtgatcatggtgaaggagtctgagaagatgccacggctccagaagatactcacggatcttggagacaagactgccattgtgttctgcaatactaagaagacagcggacatgcgcgccaaggatctggacaaggcaggcttccgcgtcacaaccctacatggtgggaagtcacaagaccagagagagattagccttgatggatttagaaaccgtcggttcaatgttcttgtggctactgatgttgcaggacgtggtattgatattcctgatgttgcacacgtgattaactatgagatgcctagttcaatcgacacatacacacatcgcattggaaggacagatgcttatgcagagcaacagtcccgtaccacctgaacttgcaaggcatgaggcatcaaaatttaagccaggctcaattcctgatagacctccaaggcgaaatgatacagtctttgcaaatcattgaagtaatctaccttagaagagactgaagatctttgaactattatgagctcaacttctaccagatggagggacctagtttagtatttatgagagggcatatattgtatcagatcttcattatggagattgatcaattgtggttcacatttcatttatctgaagaggtgctgttaatttcttatcattgccttttgtgttcccgttatgtggtttaatgtttgattttatagtttcatcttgcttgtgttcagaataatatggtttaatggttaagcaatatgcattaaacttctgagcttatgtagtgtcaatgttgttggtgcttaaggagtagtgtcgaagttggtgctaaaggcagtcgaatcactagttgctggtcattctgggtagaaccgtgtagcaaaaagatgcattttcatcatcagatctcaaaatgagacatctgcgatttgtccagtgagtaattgaccatcaatgtgtgtgatctgttctagggaactgaacagatgttcatgcagaataacctaatatgatatttgtagatagtgtagcacatattctgcttaagattcagtagttaaactgtttatcatgcttttatattagatgctctgtgtgttggtcatatgcttgtactacagtgtaatatcttatctgtggtgttgcattggagctcacggtcctagaactgttaggcacaagaatttatgttagggaatgcattttgatagtcgagacacctcacacctgccgtccaaatctcagcaaaggatggcatacttttttatgacagatatacgccttctcatattgcagtgtttgattatgagatcacgctgaagtagtgaagtgaagtatgttaaactgtacttgtgggtgttgatttttgtcaattgttgaaaccttagagagaaatctatacgtctagagaactgtacttgtgggtgttgattcttgtatggtgttgtgaatctgttttctatctgaactgttgcattgcttactactagcttgatttgaaaatgggttgtaattaccgctgttttctttggaatttactcctaatagataaaatttatcaagtaccttatctatatcggatagattcttcggcaacgattggtatatattttgatttcaaacagtaaagtcaagcaatagtaagatgggtactgtttgtacgaggaatctggaattgactgtcattttaaccgg

SEQ ID NO: 47882 - DNA, 2787 bp, Zea Mays
cttggattttcttcacgtctaaattctttttatagctagattctctttttgaaagaaaaaaaatctgagccctacggcttaacacgacttaaccgtaggtgaatagctacggacctacggttgacctgttccctaaaccgtcatccgccccacactcagcaaacctttctccccacttgccgcatcggcgccgccgggatgaagcgctccgccgacgcgatgactgagccggtgaagcctgtgttcctcaccaaggcggagcgggagcgcctcgcgcttgagcgccgccaggccgccgtctccgaccagcgccgcaccgcgctcgacctcatccagtccctgccccggccccctccgccgccgacttccggtggtcctcccccgtccggctccaaccccgcacgtcgcgactcctccaactccaaccgcgactccgaccgggacagggaccgggaccaagaccgggaacgccgccgcgacgacgactcccgccgcgaccgatatcgggatcgagatcgagatagggaccgcgaccgagatgactcctcccgccgcgacagggaccgcgaccggcgcgaccgtgatagggaccgggaccgggaccgcgacagggatcgcggggaccgggagagggaccggctggagaagattgcggagcgggagcgtgagaaggagctcgacgcgatcaaggagcagtacctcgggtccaagaagcccaagaagcgggttatcaagccctctgagaagttccgcttctccttcgactgggaaaacaccgaggacaccagccgggacatgaatgcactctaccagtcgccgcacgaggcccggctgctctttggccggggcttccttgccggcattgaccgacgtgagcagaagaaggcggcagctgtgcacgagaaggagacccgtgcagagctgcggcgcaaggctggtgtggaggaccgtccggaggatgatgcggtagataagaagaaggctgctgctgctgaaatttatgatgctttcgatatgcgtgtggacaggcactggtccgaaaagacactcgaggagatgactgagcgggattggcgaattttccgtgaggatttcaatatctcctataagggttctcgcataccccgaccgatgcgaaagtggagtgaaagcaagcttggcaccgagttgcttcgtgctattgacaaggctggatatgaaaaaccgtcaccaatccagatggctgccattccgctaggtctacagcagcgtgatgttattggtattgctgagacaggttctggaaagactgcagcttttgtactccccatgttgtcttacattacccgattgccacccataagcgaggagaatgaggccgagggtccctatgccgttgttatggcacctactcgtgagcttgctcaacagattgaggaggagactgtgaaatttgcaacctatctaggccttaaagttgtctcaattgttggtggccagtcaattgaggagcagggtttcaagattaggcagggctgtgagattgtaattgccacacctggtcggcttcttgattgcttggaaaggaggtatgctgttctcaaccagtgcaactatgttgtgctcgatgaggctgataggatgattgatatgggctttgagccacaagttgttggtgtccttgacgcgatgccatcgagtaacttgaaacctgaaaatgaggatgaggaacttgatgagaaaaggatttacagaactacttatatgttcagtgccaccatgcctcctgctgtggaacgtcttgctaggaagtatctccgaaacccagttgttgtgacaattggtacggctggcaaggccactgatctgatcacccagaatgtgatcatggtgaaggagtctgagaagatgccacggctccagaagatactcacggatcttggagacaagactgccattgtgttctgcaatactaagaagacagcggacatgcgcgccaaggatctggacaaggcaggcttccgcgtcacaaccctacatggacgtggtattgatattcctgatgttgcacacgtgattaactatgagatgcctagttcaatcgacacatacacacatcgcattggaaggacagagcaacagtcccgtaccacctgaacttgcaaggcatgaggcatcaaaatttaagccaggctcaattcctgatagacctccaaggcgaaatgatacagtctttgcaaatcattgaagtaatctaccttagaagagactgaagatctttgaactattatgagctcaacttctaccagatggagggacctagtttagtatttatgagagggcatatattgtatcagatcttcattatggagattgatcaattgtggttcacatttcatttatctgaagagtttgattatgagatcacgctgaagtagtgaagtgaagtatgttaaactgtacttgtgggtgttgatttttgtcaattgttgaaaccttagagagaaatctatacgtctagagaactgtacttgtgggtgttgattcttgtatggtgttgtgaatctgttttctatctgaactgttgcattgcttactactagcttgatttgaaaatgggttgtaattaccgctgttttctttggaatttactcctaatagataaaatttatcaagtaccttatctatatcggatagattcttcggcaacgattggtatatattttgatttcaaacagtaaagtcaagcaatagtaagatgggtactgtttgtacgaggaatctggaattgactgtcattttaaccgg

SEQ ID NO: 47883 - DNA, 2830 bp, Zea Mays
aaaccgtcatccgccccacactcagcaaacctttctccccacttgccgcatcggcgccgccgggatgaagcgctccgccgacgcgatgactgagccggtgaagcctgtgttcctcaccaaggcggagcgggagcgcctcgcgcttgagcgccgccaggccgccgtctccgaccagcgccgcaccgcgctcgacctcatccagtccctgccccggccccctccgccgccgacttccggtggtcctcccccgtccggctccaaccccgcacgtcgcgactcctccaactccaaccgcgactccgaccgggacagggaccgggaccaagaccgggaacgccgccgcgacgacgactcccgccgcgaccgatatcgggatcgagatcgagatagggaccgcgaccgagatgactcctcccgccgcgacagggaccgcgaccggcgcgaccgtgatagggaccgggaccgggaccgcgacagggatcgcggggaccgggagagggaccggctggagaagattgcggagcgggagcgtgagaaggagctcgacgcgatcaaggagcagtacctcgggtccaagaagcccaagaagcgggttatcaagccctctgagaagttccgcttctccttcgactgggaaaacaccgaggacaccagccgggacatgaatgcactctaccagtcgccgcacgaggcccggctgctctttggccggggcttccttgccggcattgaccgacgtgagcagaagaaggcggcagctgtgcacgagaaggagacccgtgcagagctgcggcgcaaggctggtgtggaggaccgtccggaggatgatgcggtagataagaagaaggctgctgctgctgaaatttatgatgctttcgatatgcgtgtggacaggcactggtccgaaaagacactcgaggagatgactgagcgggattggcgaattttccgtgaggatttcaatatctcctataagggttctcgcataccccgaccgatgcgaaagtggagtgaaagcaagcttggcaccgagttgcttcgtgctattgacaaggctggatatgaaaaaccgtcaccaatccagatggctgccattccgctaggtctacagcagcgtgatgttattggtattgctgagacaggttctggaaagactgcagcttttgtactccccatgttgtcttacattacccgattgccacccataagcgaggagaatgaggccgagggtccctatgccgttgttatggcacctactcgtgagcttgctcaacagattgaggaggagactgtgaaatttgcaacctatctaggccttaaagttgtctcaattgttggtggccagtcaattgaggagcagggtttcaagattaggcagggctgtgagattgtaattgccacacctggtcggcttcttgattgcttggaaaggaggtatgctgttctcaaccagtgcaactatgttgtgctcgatgaggctgataggatgattgatatgggctttgagccacaagttgttggtgtccttgacgcgatgccatcgagtaacttgaaacctgaaaatgaggatgaggaacttgatgagaaaaggatttacagaactacttatatgttcagtgccaccatgcctcctgctgtggaacgtcttgctaggaagtatctccgaaacccagttgttgtgacaattggtacggctggcaaggccactgatctgatcacccagaatgtgatcatggtgaaggagtctgagaagatgccacggctccagaagatactcacggatcttggagacaagactgccattgtgttctgcaatactaagaagacagcggacatgcgcgccaaggatctggacaaggcaggcttccgcgtcacaaccctacatggtgggaagtcacaagaccagagagagattagccttgatggatttagaaaccgtcggttcaatgttcttgtggctactgatgttgcaggacgtggtattgatattcctgatgttgcacacgtgattaactatgagatgcctagttcaatcgacacatacacacatcgcattggaaggacaggtcgtgctggaaagaagggagtagcaagttcatttttaacttacgagaacactgatattttctttgatctgaaacagatgcttatgcagagcaacagtcccgtaccacctgaacttgcaaggcatgaggcatcaaaatttaagccaggctcaattcctgatagacctccaaggcgaaatgatacagtctttgcaaatcattgaagtaatctaccttagaagagactgaagatctttgaactattatgagctcaacttctaccagatggagggacctagtttagtatttatgaggagggcatatattgtatcagatcttcattatggagattgatcaattgtggttcacatttcatttatctgaagagtttgattatgagatcacgctgaagtagtgaagtgaagtatgttaaactgtacttgtgggtgttgatttttgtcaattgttgaaaccttagagagaaatctatacgtctagagaactgtacttgtgggtgttgattcttgtatggtgttgtgaatctgttttctatctgaactgttgcattgcttactactagcttgatttgaaaatgggttgtaattaccgctgttttctttggaatttactcctaatagataaaatttatcaagtaccttatctatatcggatagattcttcggcaacgattggtatatattttgatttcaaacagtaaagtcaagcaatagtaagatgggtactgtttgtacgaggaatctggaattgactgtcattttaaccgg

SEQ ID NO: 47884 - DNA, 3099 bp, Zea Mays
aaaccgtcatccgccccacactcagcaaacctttctccccacttgccgcatcggcgccgccgggatgaagcgctccgccgacgcgatgactgagccggtgaagcctgtgttcctcaccaaggcggagcgggagcgcctcgcgcttgagcgccgccaggccgccgtctccgaccagcgccgcaccgcgctcgacctcatccagtccctgccccggccccctccgccgccgacttccggtggtcctcccccgtccggctccaaccccgcacgtcgcgactcctccaactccaaccgcgactccgaccgggacagggaccgggaccaagaccgggaacgccgccgcgacgacgactcccgccgcgaccgatatcgggatcgagatcgagatagggaccgcgaccgagatgactcctcccgccgcgacagggaccgcgaccggcgcgaccgtgatagggaccgggaccgggaccgcgacagggatcgcggggaccgggagagggaccggctggagaagattgcggagcgggagcgtgagaaggagctcgacgcgatcaaggagcagtacctcgggtccaagaagcccaagaagcgggttatcaagccctctgagaagttccgcttctccttcgactgggaaaacaccgaggacaccagccgggacatgaatgcactctaccagtcgccgcacgaggcccggctgctctttggccggggcttccttgccggcattgaccgacgtgagcagaagaaggcggcagctgtgcacgagaaggagacccgtgcagagctgcggcgcaaggctggtgtggaggaccgtccggaggatgatgcggtagataagaagaaggctgctgctgctgaaatttatgatgctttcgatatgcgtgtggacaggcactggtccgaaaagacactcgaggagatgactgagcgggattggcgaattttccgtgaggatttcaatatctcctataagggttctcgcataccccgaccgatgcgaaagtggagtgaaagcaagcttggcaccgagttgcttcgtgctattgacaaggctggatatgaaaaaccgtcaccaatccagatggctgccattccgctaggtctacagcagcgtgatgttattggtattgctgagacaggttctggaaagactgcagcttttgtactccccatgttgtcttacattacccgattgccacccataagcgaggagaatgaggccgagggtccctatgccgttgttatggcacctactcgtgagcttgctcaacagattgaggaggagactgtgaaatttgcaacctatctaggccttaaagttgtctcaattgttggtggccagtcaattgaggagcagggtttcaagattaggcagggctgtgagattgtaattgccacacctggtcggcttcttgattgcttggaaaggaggtatgctgttctcaaccagtgcaactatgttgtgctcgatgaggctgataggatgattgatatgggctttgagccacaagttgttggtgtccttgacgcgatgccatcgagtaacttgaaacctgaaaatgaggatgaggaacttgatgagaaaaggatttacagaactacttatatgttcagtgccaccatgcctcctgctgtggaacgtcttgctaggaagtatctccgaaacccagttgttgtgacaattggtacggctggcaaggccactgatctgatcacccagaatgtgatcatggtgaaggagtctgagaagatgccacggctccagaagatactcacggatcttggagacaagactgccattgtgttctgcaatactaagaagacagcggacatgcgcgccaaggatctggacaaggcaggcttccgcgtcacaaccctacatggtgggaagtcacaagaccagagagagattagccttgatggatttagaaaccgtcggttcaatgttcttgtggctactgatgttgcaggacgtggtattgatattcctgatgttgcacacgtgattaactatgagatgcctagttcaatcgacacatacacacatcgcattggaaggacagatgcttatgcagagcaacagtcccgtaccacctgaacttgcaaggcatgaggcatcaaaatttaagccaggctcaattcctgatagacctccaaggcgaaatgatacagtctttgcaaatcattgaagtaatctaccttagaagagactgaagatctttgaactattatgagctcaacttctaccagatggagggacctagtttagtatttatgaggtacaaaactttgacggttagaaatatgtacttatgaggtccaaaaactatgatgattagatttggttctatttttctgttcggaaactggctttattgtcgtaactttagtatgtttcggtggtgatttagcagtggacatgtgtatcatatcaaaatttttgtgctattcttcaagatttgacatggctggtttctagtatcttgaatatgttctatgaatgctgttttatatttggtagcatattgctctggagtcattagtatctcgtatatgttctataaatgctgttttatatttggtagcatattgctccggagtcattctttttatcatttttttgcagagggcatatattgtatcagatcttcattatggagattgatcaattgtggttcacatttcatttatctgaagagtttgattatgagatcacgctgaagtagtgaagtgaagtatgttaaactgtacttgtgggtgttgatttttgtcaattgttgaaaccttagagagaaatctatacgtctagagaactgtacttgtgggtgttgattcttgtatggtgttgtgaatctgttttctatctgaactgttgcattgcttactactagcttgatttgaaaatgggttgtaattaccgctgttttctttggaatttactcctaatagataaaatttatcaagtaccttatctatatcggatagattcttcggcaacgattggtatatattttgatttcaaacagtaaagtcaagcaatagtaagatgggtactgtttgtacgaggaatctggaattgactgtcattttaaccgg

SEQ ID NO: 47885 - DNA, 2790 bp, Zea Mays
aaaccgtcatccgccccacactcagcaaacctttctccccacttgccgcatcggcgccgccgggatgaagcgctccgccgacgcgatgactgagccggtgaagcctgtgttcctcaccaaggcggagcgggagcgcctcgcgcttgagcgccgccaggccgccgtctccgaccagcgccgcaccgcgctcgacctcatccagtccctgccccggccccctccgccgccgacttccggtggtcctcccccgtccggctccaaccccgcacgtcgcgactcctccaactccaaccgcgactccgaccgggacagggaccgggaccaagaccgggaacgccgccgcgacgacgactcccgccgcgaccgatatcgggatcgagatcgagatagggaccgcgaccgagatgactcctcccgccgcgacagggaccgcgaccggcgcgaccgtgatagggaccgggaccgggaccgcgacagggatcgcggggaccgggagagggaccggctggagaagattgcggagcgggagcgtgagaaggagctcgacgcgatcaaggagcagtacctcgggtccaagaagcccaagaagcgggttatcaagccctctgagaagttccgcttctccttcgactgggaaaacaccgaggacaccagccgggacatgaatgcactctaccagtcgccgcacgaggcccggctgctctttggccggggcttccttgccggcattgaccgacgtgagcagaagaaggcggcagctgtgcacgagaaggagacccgtgcagagctgcggcgcaaggctggtgtggaggaccgtccggaggatgatgcggtagataagaagaaggctgctgctgctgaaatttatgatgctttcgatatgcgtgtggacaggcactggtccgaaaagacactcgaggagatgactgagcgggattggcgaattttccgtgaggatttcaatatctcctataagggttctcgcataccccgaccgatgcgaaagtggagtgaaagcaagcttggcaccgagttgcttcgtgctattgacaaggctggatatgaaaaaccgtcaccaatccagatggctgccattccgctaggtctacagcagcgtgatgttattggtattgctgagacaggttctggaaagactgcagcttttgtactccccatgttgtcttacattacccgattgccacccataagcgaggagaatgaggccgagggtccctatgccgttgttatggcacctactcgtgagcttgctcaacagattgaggaggagactgtgaaatttgcaacctatctaggccttaaagttgtctcaattgttggtggccagtcaattgaggagcagggtttcaagattaggcagggctgtgagattgtaattgccacacctggtcggcttcttgattgcttggaaaggaggtatgctgttctcaaccagtgcaactatgttgtgctcgatgaggctgataggatgattgatatgggctttgagccacaagttgttggtgtccttgacgcgatgccatcgagtaacttgaaacctgaaaatgaggatgaggaacttgatgagaaaaggatttacagaactacttatatgttcagtgccaccatgcctcctgctgtggaacgtcttgctaggaagtatctccgaaacccagttgttgtgacaattggtacggctggcaaggccactgatctgatcacccagaatgtgatcatggtgaaggagtctgagaagatgccacggctccagaagatactcacggatcttggagacaagactgccattgtgttctgcaatactaagaagacagcggacatgcgcgccaaggatctggacaaggcaggcttccgcgtcacaaccctacatggtgggaagtcacaagaccagagagagattagccttgatggatttagaaaccgtcggttcaatgttcttgtggctactgatgttgcaggacgtggtattgatattcctgatgttgcacacgtgattaactatgagatgcctagttcaatcgacacatacacacatcgcattggaaggacagatgcttatgcagagcaacagtcccgtaccacctgaacttgcaaggcatgaggcatcaaaatttaagccaggctcaattcctgatagacctccaaggcgaaatgatacagtctttgcaaatcattgaagtaatctaccttagaagagactgaagatctttgaactattatgagctcaacttctaccagatggagggacctagtttagtatttatgaggtacaaaactttgacggttagaaatatgtacttatgagagggcatatattgtatcagatcttcattatggagattgatcaattgtggttcacatttcatttatctgaagagtttgattatgagatcacgctgaagtagtgaagtgaagtatgttaaactgtacttgtgggtgttgatttttgtcaattgttgaaaccttagagagaaatctatacgtctagagaactgtacttgtgggtgttgattcttgtatggtgttgtgaatctgttttctatctgaactgttgcattgcttactactagcttgatttgaaaatgggttgtaattaccgctgttttctttggaatttactcctaatagataaaatttatcaagtaccttatctatatcggatagattcttcggcaacgattggtatatattttgatttcaaacagtaaagtcaagcaatagtaagatgggtactgtttgtacgaggaatctggaattgactgtcattttaaccgg

SEQ ID NO: 47886 - DNA, 2293 bp, Zea Mays
ccccgtcccctaccctacgtcctaccaatagtagccaccattggtgtctcggactctcggctcggtggaacgcaacgcattgcgaccgacccgcccactctctccacgactcaatcgctagactagagagagaaacccttgtacccgtgttccttttcatcccccattttctccgagtttccggcccatcgccgagcatcgagtccaaggaagcggagccggcggagaaggggagatttgactttcccgtcgggtgcctagggagcaggagggatgcagcggcggcggggccacacgtgggcaggggtggggaagacggcccaggcggcggcggcgcacgccgcgctcttctgcttcactctcctcctcgcgctcagggtcgacggacgcaccgcatactcctggtgtgggcaccatgtcattcgattgttgcggcgcctttactaattgcgttcgagctgcttctttgtatatatcttgaaagcataagagttagaaatcatccatctgttgatctgaagattgtgttccttcccctgttggcctttgaagcaataatccttattgacaattttagaatgtgtagagctttaatgcctggggatgaagaaagcatgagtgatgaagctatttgggagacacttcctcatttttgggtttcaatttcaatggtgtttcttatagctgctacaacattcacccttctcaagctgtctggtgatgttggtgctttgggatggtgggatttgtttataaattatgggattgcagaatgctttgcatttcttgtctgtacaagatggtttaatcccatgattcacaagtctcccactcatggggaggctagctcatcatcagcgattagataccgtgattgggaaagtggtcttgtcctcccatcactagaagatcatgaacaagagaggctttgtggtctacctgatattgggggtcatgtaatgaaaatacctcttgtggctttccaagtattgctttgtatgcggttggagggtacaccaccaagtgctcgcaacattccaatatttgctcttttctcgccactatttattctgcaaggtgctggtgcctttttctctctagcaagattagtggagaaggttgttctgctattgcgcaatggaccagttagtcctaattaccttacagtctcatcaaaagttcgtgattgctttgcttttcttcatcatggttcaaggcttcttggttggtggtctattgatgaagggagcaaggaggaacaagcccggttgttctatactgaatctactgggtacaatacattttgtggctatccaccagaagtggttaggaaaatgcctaaaaaggaccttgcagaagaggtttggaggctgcaggcagcgttgggagaacaatctgaaatcaccaagtgtaccaaacaggaatatgaaaggcttcaaaatgagaaggttctttgtagggtttgctacgagggagagatatgcatggtgcttcttccctgccggcacagaactttatgcaaatcttgtgctgagaaatgcaagaagtgtcctatctgccgtgtcccaattgaagaacgcatgcctgtatatgatgtttaaacctcactaactcagcttaacattcaaatttgtacatatgggttctgtcatgctgtgcatttagtctcgatcacaactttaagctgattgaggtgtgcgtttcagaaaaaaagtctacaatatgtgtatatcatgccatgtctaaccaaaagcatggaaaggtggctgatgagcattttgccatttcggtccagttatctactgtaagtatgtggtcagtgtattccccttttgtgattggtagatgagtcagtcttgtttgcgtagcagcattttctcagggttatgcagttgttgagaagaaagtagaacaaaaacagactgtaaataaaaaaatactgccttttttaaatgtaatcctcaagtgtaaacctccctgttgtgccattttgtagtagaaaaatgtctgccgaaatttgtgaccgcaacgcttcgttgtctggtgtcttttcacaatgtgaggggtcgtcttagcaaaattatttaaagattgtggaagcatgtctggagaagaaaggttgcgtctggtctgtgccaaggaatcattgttggtatgttttttcaaaccgtattgcggtgattggaaccaatttaatcatgatactgtggactgctgtctccttttaaagcagagtataaatctaaatattgttcgtcaaactattttaagtttgactaaatttgtataaaag

SEQ ID NO: 47887 - DNA, 2256 bp, Zea Mays
agtagccaccattggtgtctcggactctcggctcggtggaacgcaacgcattgcgaccgacccgcccactctctccacgactcaatcgctagactagagagagaaacccttgtacccgtgttccttttcatcccccattttctccgagtttccggcccatcgccgagcatcgagtccaaggaagcggagccggcggagaaggggagatttgactttcccgtcgggtgcctagggagcaggagggatgcagcggcggcggggccacacgtgggcaggggtggggaagacggcccaggcggcggcggcgcacgccgcgctcttctgcttcactctcctcctcgcgctcagggtcgacggacgcaccgcatactcctggtgtgggcaccatgtcattcgattgttgcggcgcctttactaattgcgttcgagctgcttctttgtatatatcttgaaagcataagagttagaaatcatccatctgttgatctgaagattgtgttccttcccctgttggcctttgaagcaataatccttattgacaattttagaatgtgtagagctttaatgcctggggatgaagaaagcatgagtgatgaagctatttgggagacacttcctcatttttgggtttcaatttcaatggtgtttcttatagctgctacaacattcacccttctcaagctgtctggtgatgttggtgctttgggatggtgggatttgtttataaattatggaatgctttgcatttcttgtctgtacaagatggtttaatcccatgattcacaagtctcccactcatggggaggctagctcatcatcagcgattagataccgtgattgggaaagtggtcttgtcctcccatcactagaagatcatgaacaagagaggctttgtggtctacctgatattgggggtcatgtaatgaaaatacctcttgtggctttccaagtattgctttgtatgcggttggagggtacaccaccaagtgctcgcaacattccaatatttgctcttttctcgccactatttattctgcaaggtgctggtgcctttttctctctagcaagattagtggagaaggttgttctgctattgcgcaatggaccagttagtcctaattaccttacagtctcatcaaaagttcgtgattgctttgcttttcttcatcatggttcaaggcttcttggttggtggtctattgatgaagggagcaaggaggaacaagcccggttgttctatactgaatctactgggtacaatacattttgtggctatccaccagaagtggttaggaaaatgcctaaaaaggaccttgcagaagaggtttggaggctgcaggcagcgttgggagaacaatctgaaatcaccaagtgtaccaaacaggaatatgaaaggcttcaaaatgagaaggttctttgtagggtttgctacgagggagagatatgcatggtgcttcttccctgccggcacagaactttatgcaaatcttgtgctgagaaatgcaagaagtgtcctatctgccgtgtcccaattgaagaacgcatgcctgtatatgatgtttaaacctcactaactcagcttaacattcaaatttgtacatatgggttctgtcatgctgtgcatttagtctcgatcacaactttaagctgattgaggtgtgcgtttcagaaaaaaagtctacaatatgtgtatatcatgccatgtctaaccaaaagcatggaaaggtggctgatgagcattttgccatttcggtccagttatctactgtaagtatgtggtcagtgtattccccttttgtgattggtagatgagtcagtcttgtttgcgtagcagcattttctcagggttatgcagttgttgagaagaaagtagaacaaaaacagactgtaaataaaaaaatactgccttttttaaatgtaatcctcaagtgtaaacctccctgttgtgccattttgtagtagaaaaatgtctgccgaaatttgtgaccgcaacgcttcgttgtctggtgtcttttcacaatgtgaggggtcgtcttagcaaaattatttaaagattgtggaagcatgtctggagaagaaaggttgcgtctggtctgtgccaaggaatcattgttggtatgttttttcaaaccgtattgcggtgattggaaccaatttaatcatgatactgtggactgctgtctccttttaaagcagagtataaatctaaatattgttcgtcaaactattttaagtttgactaaatttgtataaaag

SEQ ID NO: 47888 - DNA, 1824 bp, Zea Mays
agaaggacctaaacatgattttcattgactcatggaagacttataataaaataccaaggaatgttatgttgtgggctttcgacaaacataaagttcctatgaacatttttgggtttcaatttcaatggtgtttcttatagctgctacaacattcacccttctcaagctgtctggtgatgttggtgctttgggatggtgggatttgtttataaattatgggtgagatttgttgctgtggcgttattcctttttatgagatttcagttagtctaattcggcagcttgcttatccaggattgcagaatgctttgcatttcttgtctgtacaagatggtttaatcccatgattcacaagtctcccactcatggggaggctagctcatcatcagcgattagataccgtgattgggaaagtggtcttgtcctcccatcactagaagatcatgaacaagagaggctttgtggtctacctgatattgggggtcatgtaatgaaaatacctcttgtggctttccaagtattgctttgtatgcggttggagggtacaccaccaagtgctcgcaacattccaatatttgctcttttctcgccactatttattctgcaaggtgctggtgcctttttctctctagcaagattagtggagaaggttgttctgctattgcgcaatggaccagttagtcctaattaccttacagtctcatcaaaagttcgtgattgctttgcttttcttcatcatggttcaaggcttcttggttggtggtctattgatgaagggagcaaggaggaacaagcccggttgttctatactgaatctactgggtacaatacattttgtggctatccaccagaagtggttaggaaaatgcctaaaaaggaccttgcagaagaggtttggaggctgcaggcagcgttgggagaacaatctgaaatcaccaagtgtaccaaacaggaatatgaaaggcttcaaaatgagaaggttctttgtagggtttgctacgagggagagatatgcatggtgcttcttccctgccggcacagaactttatgcaaatcttgtgctgagaaatgcaagaagtgtcctatctgccgtgtcccaattgaagaacgcatgcctgtatatgatgtttaaacctcactaactcagcttaacattcaaatttgtacatatgggttctgtcatgctgtgcatttagtctcgatcacaactttaagctgattgaggtgtgcgtttcagaaaaaaagtctacaatatgtgtatatcatgccatgtctaaccaaaagcatggaaaggtggctgatgagcattttgccatttcggtccagttatctactgtaagtatgtggtcagtgtattccccttttgtgattggtagatgagtcagtcttgtttgcgtagcagcattttctcagggttatgcagttgttgagaagaaagtagaacaaaaacagactgtaaataaaaaaatactgccttttttaaatgtaatcctcaagtgtaaacctccctgttgtgccattttgtagtagaaaaatgtctgccgaaatttgtgaccgcaacgcttcgttgtctggtgtcttttcacaatgtgaggggtcgtcttagcaaaattatttaaagattgtggaagcatgtctggagaagaaaggttgcgtctggtctgtgccaaggaatcattgttggtatgttttttcaaaccgtattgcggtgattggaaccaatttaatcatgatactgtggactgctgtctccttttaaagcagagtataaatctaaatattgttcgtcaaactattttaagtttgactaaatttgtataaaag

SEQ ID NO: 47889 - DNA, 3288 bp, Zea Mays
ctcataccttccgcatgccaccaccgtccatggctcgtgtcttccttgaatttatccaagtgtataccactagtccactactcgacgctttactatggagaaacttttgcagtgggtacatgtaacggctgggtctagtttagactgacgggtatgggggaaattttccagtcgcggagatttacccattgccagccgcggtaagctaaaagcgcccccgcacccctcccatcccctcccccgccggcccgcccacacacaccggcctctcgcttctctcccatcctccaaccactttcccttgcacgctagtagcagtggtactagtcctaggccagtactgccaccactcgtagcccagatcagcgggagcaggaaaaaaaaatcgaaccaaagagagggggagggaggtgaaaagcttggggagaggagacgagggagcgcagcataaatcccgatccccaaatcgcaaaacctagccgctcccgatctgcaatgccgcaggcttgagtgcgagcgcacggggaatgaggcgggtggcaccggcgatgatcgccgccggcagtgctggcggcgaggatacggcggagggggcggtggtggagaagacgctgctcaacggggacgtctaccgcggcgggttctccgctggatctccgcacgggaagggcaagtacgtctgggctgacggctgcatgtacgagggggagtggcggcggggcaaggcgtccgggaagggccgcttctcgtggccttcgggcgccacattcgagggggagttccgcagcggccggatcgaggggcagggcgtgttcgtcggccccgacggcgccacctaccgcggcgcgtgggtggcggaccgacgccacggcgtgggcgccaagagctacgccaacggggactactacgagggccagtggcggcgcaacttccaggacggccacggacggtacgtctgggccaacggcaaccagtacgtcggggagtggcgcgccggggtgctctcgggccgcggcgtgctcatctgggccaatggcagccgctacgacggggtctgggagaatggcgtgcccagggggactggggtcttcacgtggcccgacggcagccggtacgtcggctcctggcctgggacctgcgtcgacctgccggctataagcggcacgttcttcgcgccggtgggcgctggggctcctgctgctgtgaggaagagatcctccgtggagggtgtgggggagaaggcgaccccgcggatctgcatctgggagtcggagggcgaggctggagacattacttgcgacatcgttgacgcgctcgaggcgtccatgctctacaaggaggccgcggctgttgcgggaggggcaacgtacacgcggaaactgccccagaggaatacccggcgagcagccagcggagtcccacgctgggcgtcgtcggcggccaccacgcctgagagtaagcgacccgggcagaccatctccaagggacacaagaattacgagctcatgctgcagctgcaattgggcatcaggcattccgtgggaaagtcttcggccgtgccgatgcgagcactgcaaccgggcgattttgacccaggggagaagttctggacacggttcccaccagagggttcgaaggttacgctaccacattcatctggagagttccgatggaaggactactgccccatggcatttgaggaagttgtttgctgttgatacagcggattacatgcttgcgatctgtggcaatgatgctctgagggagctgtcttcacccggcaaaagtgggagcttcttttaccttacccaagatgaccgattcatgattaagacagtgaagaaatcagaagtcaagctgctaattcgaatgttaaatagctactacaaccatttcaatcgatacaagaactcattaatcacgaggttctatggtgtacactgtgtgaagccccttaatggacaaaaggtccgatttattgtcatgggtaatctgttctgttcagaataccagatacatcgccgttttgatttgaaaggttcatcctatggacgaacagcagacaagtttgaagatgaaattgatgagacaactacactcaaggatttggacctcaattttgtcttccggttgcagcgatcttggtacaccgatctccatgaacaattgggacgagactgtgattttttggaatcagaagggattatggattacagtttcttggtaggagttcacttttgtgatgacatctctgcctcaaagatgggatcctctacttttactgcctctccaaagcttttaacaaagagtgagtcatttcaaggtggtggcacgccagagctttgcttctcggatgatgattttgatatggtacctgattgccaccggaaacctctgattagacttggtgcacacatgccagcccgggcagagcaagcatccaggaggagtgaattcgacccgcttctcctaacaggtggaggattcctgttcccaaaccagaccggcgaagtgcatgatgtgattttattctttgggataattgacatcctccaggattacagcttaagaaagcgggccgagcatgcttacaagtcattacagacagatcccaactcgatctctgccgtggacccgaagctctactcgaagaggttccaagacttcatcggcagaatttttgtggaagatggctaactggcattggatagagattaaccgcgaattccatgcggaggccagagcacctgtaatgattccgggacagtttttttgcgctcagtaaagaagtctgcataattgccaagaatcatcttcatccatggggatccggtaaagcagcagcccctcggctgggtgtaacctactgtgaagcatcaggtcagcagtgaaggagatctgagttcgaagcaaatttgccgcgaattctccggaaatcattcgagtggctggattttgaagcgcagccatgggatcggaggattttgtctgtaaaatgatgtgattcggcgggtgagagactggttcttccgggtccattgtagcagcagtcctttttttttatctccttagttttgttggagttcttttccccccgctccccttctatatatatcgttccgatgtgaggaatggggcagggagttttgtttccagaaagatgatatttaaggctgcggctggcagtgaacaataagatcatgtacagatacaccttgatcctgggaatgggtggattagaattgaattcagcatcttcatgacccgtgggccccagaccactgcttc

SEQ ID NO: 47890 - DNA, 3015 bp, Zea Mays
cgcccacacacaccggcctctcgcttctctcccatcctccaaccactttcccttgcacgctagtagcagtggtactagtcctaggccagtactgccaccactcgtagcccagatcagcgggagcaggaaaaaaaaatcgaaccaaagagagggggagggaggtgaaaagcttggggagaggagacgagggagcgcagcataaatcccgatccccaaatcgcaaaacctagccgctcccgatctgcaatgccgcaggcttgagtgcgagcgcacggggaatgaggcgggtggcaccggcgatgatcgccgccggcagtgctggcggcgaggatacggcggagggggcggtggtggagaagacgctgctcaacggggacgtctaccgcggcgggttctccgctggatctccgcacgggaagggcaagtacgtctgggctgacggctgcatgtacgagggggagtggcggcggggcaaggcgtccgggaagggccgcttctcgtggccttcgggcgccacattcgagggggagttccgcagcggccggatcgaggggcagggcgtgttcgtcggccccgacggcgccacctaccgcggcgcgtgggtggcggaccgacgccacggcgtgggcgccaagagctacgccaacggggactactacgagggccagtggcggcgcaacttccaggacggccacggacggtacgtctgggccaacggcaaccagtacgtcggggagtggcgcgccggggtgctctcgggccgcggcgtgctcatctgggccaatggcagccgctacgacggggtctgggagaatggcgtgcccagggggactggggtcttcacgtggcccgacggcagccggtacgtcggctcctggcctgggacctgcgtcgacctgccggctataagcggcacgttcttcgcgccggtgggcgctggggctcctgctgctgtgaggaagagatcctccgtggagggtgtgggggagaaggcgaccccgcggatctgcatctgggagtcggagggcgaggctggagacattacttgcgacatcgttgacgcgctcgaggcgtccatgctctacaaggaggccgcggctgttgcgggaggggcaacgtacacgcggaaactgccccagaggaatacccggcgagcagccagcggagtcccacgctgggcgtcgtcggcggccaccacgcctgagagtaagcgacccgggcagaccatctccaagggacacaagaattacgagctcatgctgcagctgcaattgggcatcaggcattccgtgggaaagtcttcggccgtgccgatgcgagcactgcaaccgggcgattttgacccaggggagaagttctggacacggttcccaccagagggttcgaaggttacgctaccacattcatctggagagttccgatggaaggactactgccccatggtgttcagcggattacatgcttgcgatctgtggcaatgatgctctgagggagctgtcttcacccggcaaaagtgggagcttcttttaccttacccaagatgaccgattcatgattaagacagtgaagaaatcagaagtcaagctgctaattcgaatgttaaatagctactacaaccatttcaatcgatacaagaactcattaatcacgaggttctatggtgtacactgtgtgaagccccttaatggacaaaaggtccgatttattgtcatgggtaatctgttctgttcagaataccagatacatcgccgttttgatttgaaaggttcatcctatggacgaacagcagacaagtttgaagatgaaattgatgagacaactacactcaaggatttggacctcaattttgtcttccggttgcagcgatcttggtacaccgatctccatgaacaattgggacgagactgtgattttttggaatcagaagggattatggattacagtttcttggtaggagttcacttttgtgatgacatctctgcctcaaagatgggatcctctacttttactgcctctccaaagcttttaacaaagagtgagtcatttcaaggtggtggcacgccagagctttgcttctcggatgatgattttgatatggtacctgattgccaccggaaacctctgattagacttggtgcacacatgccagcccgggcagagcaagcatccaggaggagtgaattcgacccgcttctcctaacaggtggaggattcctgttcccaaaccagaccggcgaagtgcatgatgtgattttattctttgggataattgacatcctccaggattacagcttaagaaagcgggccgagcatgcttacaagtcattacagacagatcccaactcgatctctgccgtggacccgaagctctactcgaagaggttccaagacttcatcggcagaatttttgtggaagatggctaactggcattggatagagattaaccgcgaattccatgcggaggccagagcacctgtaatgattccgggacagtttttttgcgctcagtaaagaagtctgcataattgccaagaatcatcttcatccatggggatccggtaaagcagcagcccctcggctgggtgtaacctactgtgaagcatcaggtcagcagtgaaggagatctgagttcgaagcaaatttgccgcgaattctccggaaatcattcgagtggctggattttgaagcgcagccatgggatcggaggattttgtctgtaaaatgatgtgattcggcgggtgagagactggttcttccgggtccattgtagcagcagtcctttttttttatctccttagttttgttggagttcttttccccccgctccccttctatatatatcgttccgatgtgaggaatggggcagggagttttgtttccagaaagatgatatttaaggctgcggctggcagtgaacaataagatcatgtacagatacaccttgatcctgggaatgggtggattagaattgaattcagcatcttcatgacccgtgggccccagaccactgcttc

SEQ ID NO: 47891 - DNA, 2967 bp, Zea Mays
cgcccacacacaccggcctctcgcttctctcccatcctccaaccactttcccttgcacgctagtagcagtggtactagtcctaggccagtactgccaccactcgtagcccagatcagcgggagcaggaaaaaaaaatcgaaccaaagagagggggagggaggtgaaaagcttggggagaggagacgagggagcgcagcataaatcccgatccccaaatcgcaaaacctagccgctcccgatctgcaatgccgcaggcttgagtgcgagcgcacggggaatgaggcgggtggcaccggcgatgatcgccgccggcagtgctggcggcgaggatacggcggagggggcggtggtggagaagacgctgctcaacggggacgtctaccgcggcgggttctccgctggatctccgcacgggaagggcaagtacgtctgggctgacggctgcatgtacgagggggagtggcggcggggcaaggcgtccgggaagggccgcttctcgtggccttcgggcgccacattcgagggggagttccgcagcggccggatcgaggggcagggcgtgttcgtcggccccgacggcgccacctaccgcggcgcgtgggtggcggaccgacgccacggcgtgggcgccaagagctacgccaacggggactactacgagggccagtggcggcgcaacttccaggacggccacggacggtacgtctgggccaacggcaaccagtacgtcggggagtggcgcgccggggtgctctcgggccgcggcgtgctcatctgggccaatggcagccgctacgacggggtctgggagaatggcgtgcccagggggactggggtcttcacgtggcccgacggcagccggtacgtcggctcctggcctgggacctgcgtcgacctgccggctataagcggcacgttcttcgcgccggtgggcgctggggctcctgctgctgtgaggaagagatcctccgtggagggtgtgggggagaaggcgaccccgcggatctgcatctgggagtcggagggcgaggctggagacattacttgcgacatcgttgacgcgctcgaggcgtccatgctctacaaggaggccgcggctgttgcgggaggggcaacgtacacgcggaaactgccccagaggaatacccggcgagcagccagcggagtcccacgctgggcgtcgtcggcggccaccacgcctgagagtaagcgacccgggcagaccatctccaagggacacaagaattacgagctcatgctgcagctgcaattgggcatcaggcattccgtgggaaagtcttcggccgtgccgatgcgagcactgcaaccgggcgattttgacccaggggagaagttctggacacggttcccaccagagggttcgaaggttacgctaccacattcatctggagagttccgatggaaggactactgccccatggtgttcaggcatttgaggaagttgtttgctgttgatacagcggattacatgcttgcgatctgtggcaatgatgctctgagggagctgtcttcacccggcaaaagtgggagcttcttttaccttacccaagatgaccgattcatgattaagacagtgaagaaatcagaagtcaagctgctaattcgaatgttaaatagctactacaaccatttcaatcgatacaagaactcattaatcacgaggttctatggtgtacactgtgtgaagccccttaatggacaaaaggtccgatttattgtcatgggtaatctgttctgttcagaataccagatacatcgccgttttgatttgaaaggttcatcctatggacgaacagcagacaagtttgaagatgaaattgatgagacaactacactcaaggatttggacctcaattttgtcttccggttgcagcgatcttggtacaccgatctccatgaacaattgggacgagactgtgattttttggaatcagaagggattatggattacagtttcttggtaggagttcacttttgtgatgacatctctgcctcaaagatgggatcctctacttttactgcctctccaaagcttttaacaaagagtgagtcatttcaaggtggtggcacgccagagctttgcttctcggatgatgattttgatatggtacctgattgccaccggaaacctctgattagacttggtgcacacatgccagcccgggcagagcaagcatccaggaggagtgaattcgacccgcttctcctaacaggattacagcttaagaaagcgggccgagcatgcttacaagtcattacagacagatcccaactcgatctctgccgtggacccgaagctctactcgaagaggttccaagacttcatcggcagaatttttgtggaagatggctaactggcattggatagagattaaccgcgaattccatgcggaggccagagcacctgtaatgattccgggacagtttttttgcgctcagtaaagaagtctgcataattgccaagaatcatcttcatccatggggatccggtaaagcagcagcccctcggctgggtgtaacctactgtgaagcatcaggtcagcagtgaaggagatctgagttcgaagcaaatttgccgcgaattctccggaaatcattcgagtggctggattttgaagcgcagccatgggatcggaggattttgtctgtaaaatgatgtgattcggcgggtgagagactggttcttccgggtccattgtagcagcagtcctttttttttatctccttagttttgttggagttcttttccccccgctccccttctatatatatcgttccgatgtgaggaatggggcagggagttttgtttccagaaagatgatatttaaggctgcggctggcagtgaacaataagatcatgtacagatacaccttgatcctgggaatgggtggattagaattgaattcagcatcttcatgacccgtgggccccagaccactgcttc

SEQ ID NO: 47892 - DNA, 3030 bp, Zea Mays
cgcccacacacaccggcctctcgcttctctcccatcctccaaccactttcccttgcacgctagtagcagtggtactagtcctaggccagtactgccaccactcgtagcccagatcagcgggagcaggaaaaaaaaatcgaaccaaagagagggggagggaggtgaaaagcttggggagaggagacgagggagcgcagcataaatcccgatccccaaatcgcaaaacctagccgctcccgatctgcaatgccgcaggcttgagtgcgagcgcacggggaatgaggcgggtggcaccggcgatgatcgccgccggcagtgctggcggcgaggatacggcggagggggcggtggtggagaagacgctgctcaacggggacgtctaccgcggcgggttctccgctggatctccgcacgggaagggcaagtacgtctgggctgacggctgcatgtacgagggggagtggcggcggggcaaggcgtccgggaagggccgcttctcgtggccttcgggcgccacattcgagggggagttccgcagcggccggatcgaggggcagggcgtgttcgtcggccccgacggcgccacctaccgcggcgcgtgggtggcggaccgacgccacggcgtgggcgccaagagctacgccaacggggactactacgagggccagtggcggcgcaacttccaggacggccacggacggtacgtctgggccaacggcaaccagtacgtcggggagtggcgcgccggggtgctctcgggccgcggcgtgctcatctgggccaatggcagccgctacgacggggtctgggagaatggcgtgcccagggggactggggtcttcacgtggcccgacggcagccggtacgtcggctcctggcctgggacctgcgtcgacctgccggctataagcggcacgttcttcgcgccggtgggcgctggggctcctgctgctgtgaggaagagatcctccgtggagggtgtgggggagaaggcgaccccgcggatctgcatctgggagtcggagggcgaggctggagacattacttgcgacatcgttgacgcgctcgaggcgtccatgctctacaaggaggccgcggctgttgcgggaggggcaacgtacacgcggaaactgccccagaggaatacccggcgagcagccagcggagtcccacgctgggcgtcgtcggcggccaccacgcctgagagtaagcgacccgggcagaccatctccaagggacacaagaattacgagctcatgctgcagctgcaattgggcatcaggcattccgtgggaaagtcttcggccgtgccgatgcgagcactgcaaccgggcgattttgacccaggggagaagttctggacacggttcccaccagagggttcgaaggttacgctaccacattcatctggagagttccgatggaaggactactgccccatggtgttcaggcatttgaggaagttgtttgctgttgatacagcggattacatgcttgcgatctgtggcaatgatgctctgagggagctgtcttcacccggcaaaagtgggagcttcttttaccttacccaagatgaccgattcatgattaagacagtgaagaaatcagaagtcaagctgctaattcgaatgttaaatagctactacaaccatttcaatcgatacaagaactcattaatcacgaggttctatggtgtacactgtgtgaagccccttaatggacaaaaggtccgatttattgtcatgggtaatctgttctgttcagaataccagatacatcgccgttttgatttgaaaggttcatcctatggacgaacagcagacaagtttgaagatgaaattgatgagacaactacactcaaggatttggacctcaattttgtcttccggttgcagcgatcttggtacaccgatctccatgaacaattgggacgagactgtgattttttggaatcagaagggattatggattacagtttcttggtaggagttcacttttgtgatgacatctctgcctcaaagatgggatcctctacttttactgcctctccaaagcttttaacaaagagtgagtcatttcaaggtggtggcacgccagagctttgcttctcggatgatgattttgatatggaaacctctgattagacttggtgcacacatgccagcccgggcagagcaagcatccaggaggagtgaattcgacccgcttctcctaacaggtggaggattcctgttcccaaaccagaccggcgaagtgcatgatgtgattttattctttgggataattgacatcctccaggattacagcttaagaaagcgggccgagcatgcttacaagtcattacagacagatcccaactcgatctctgccgtggacccgaagctctactcgaagaggttccaagacttcatcggcagaatttttgtggaagatggctaactggcattggatagagattaaccgcgaattccatgcggaggccagagcacctgtaatgattccgggacagtttttttgcgctcagtaaagaagtctgcataattgccaagaatcatcttcatccatggggatccggtaaagcagcagcccctcggctgggtgtaacctactgtgaagcatcaggtcagcagtgaaggagatctgagttcgaagcaaatttgccgcgaattctccggaaatcattcgagtggctggattttgaagcgcagccatgggatcggaggattttgtctgtaaaatgatgtgattcggcgggtgagagactggttcttccgggtccattgtagcagcagtcctttttttttatctccttagttttgttggagttcttttccccccgctccccttctatatatatcgttccgatgtgaggaatggggcagggagttttgtttccagaaagatgatatttaaggctgcggctggcagtgaacaataagatcatgtacagatacaccttgatcctgggaatgggtggattagaattgaattcagcatcttcatgacccgtgggccccagaccactgcttc

SEQ ID NO: 47893 - DNA, 2929 bp, Zea Mays
cgcccacacacaccggcctctcgcttctctcccatcctccaaccactttcccttgcacgctagtagcagtggtactagtcctaggccagtactgccaccactcgtagcccagatcagcgggagcaggaaaaaaaaatcgaaccaaagagagggggagggaggtgaaaagcttggggagaggagacgagggagcgcagcataaatcccgatccccaaatcgcaaaacctagccgctcccgatctgcaatgccgcaggcttgagtgcgagcgcacggggaatgaggcgggtggcaccggcgatgatcgccgccggcagtgctggcggcgaggatacggcggagggggcggtggtggagaagacgctgctcaacggggacgtctaccgcggcgggttctccgctggatctccgcacgggaagggcaagtacgtctgggctgacggctgcatgtacgagggggagtggcggcggggcaaggcgtccgggaagggccgcttctcgtggccttcgggcgccacattcgagggggagttccgcagcggccggatcgaggggcagggcgtgttcgtcggccccgacggcgccacctaccgcggcgcgtgggtggcggaccgacgccacggcgtgggcgccaagagctacgccaacggggactactacgagggccagtggcggcgcaacttccaggacggccacggacggtacgtctgggccaacggcaaccagtacgtcggggagtggcgcgccggggtgctctcgggccgcggcgtgctcatctgggccaatggcagccgctacgacggggtctgggagaatggcgtgcccagggggactggggtcttcacgtggcccgacggcagccggtacgtcggctcctggcctgggacctgcgtcgacctgccggctataagcggcacgttcttcgcgccggtgggcgctggggctcctgctgctgtgaggaagagatcctccgtggagggtgtgggggagaaggcgaccccgcggatctgcatctgggagtcggagggcgaggctggagacattacttgcgacatcgttgacgcgctcgaggcgtccatgctctacaaggaggccgcggctgttgcgggaggggcaacgtacacgcggaaactgccccagaggaatacccggcgagcagccagcggagtcccacgctgggcgtcgtcggcggccaccacgcctgagagtaagcgacccgggcagaccatctccaagggacacaagaattacgagctcatgctgcagctgcaattgggcatcaggcattccgtgggaaagtcttcggccgtgccgatgcgagcactgcaaccgggcgattttgacccaggggagaagttctggacacggttcccaccagagggttcgaaggttacgctaccacattcatctggagagttccgatggaaggactactgccccatggtgttcaggcatttgaggaagttgtttgctgttgatacagcggattacatgcttgcgatctgtggcaatgatgctctgagggagctgtcttcacccggcaaaagtgggagcttcttttaccttacccaagatgaccgattcatgattaagacagtgaagaaatcagaagtcaagctgctaattcgaatgttaaatagctactacaaccatttcaatcgatacaagaactcattaatcacgaggttctatggtgtacactgtgtgaagccccttaatggacaaaaggtccgatttattgtcatgggtaatctgttctgttcagaataccagatacatcgccgttttgatttgaaaggttcatcctatggacgaacagcagacaagtttgaagatgaaattgatgagacaactacactcaaggatttggacctcaattttgtcttccggttgcagcgatcttggtacaccgatctccatgaacaattgggacgagactgtgattttttggaatcagaagggattatggattacagtttcttggtaggagttcacttttgtgatgacatctctgcctcaaagatgggatcctctacttttactgcctctccaagtggtggcacgccagagctttgcttctcggatgatgattttgatatggtacctgattgccaccggaaacctctgattagacttggtgcacacatgccagcccgggcagagcaagcatccaggaggagtgaattcgacccgcttctcctaacagcttaagaaagcgggccgagcatgcttacaagtcattacagacagatcccaactcgatctctgccgtggacccgaagctctactcgaagaggttccaagacttcatcggcagaatttttgtggaagatggctaactggcattggatagagattaaccgcgaattccatgcggaggccagagcacctgtaatgattccgggacagtttttttgcgctcagtaaagaagtctgcataattgccaagaatcatcttcatccatggggatccggtaaagcagcagcccctcggctgggtgtaacctactgtgaagcatcaggtcagcagtgaaggagatctgagttcgaagcaaatttgccgcgaattctccggaaatcattcgagtggctggattttgaagcgcagccatgggatcggaggattttgtctgtaaaatgatgtgattcggcgggtgagagactggttcttccgggtccattgtagcagcagtcctttttttttatctccttagttttgttggagttcttttccccccgctccccttctatatatatcgttccgatgtgaggaatggggcagggagttttgtttccagaaagatgatatttaaggctgcggctggcagtgaacaataagatcatgtacagatacaccttgatcctgggaatgggtggattagaattgaattcagcatcttcatgacccgtgggccccagaccactgcttc

SEQ ID NO: 47894 - DNA, 1646 bp, Zea Mays
gtaaccttgttgcttttcgttctgaaaaaccttcttgaacgtcgcggcgcgggaggaagaatggcgtcgtggttggagcagctgcagcgcgagctcgccgcccgcggcctcacagtcgcctccatccccggcaagggaaggggtctcatcgctacttgcaccttcttcccaggggatgtcattctcaatcaggaaccttacgcttctacacctaacaagattttagttggatcgagctgtgaccattgtttcacctctggcaacctgaggaagtgctctatgtgtcgagttacttggtactgcagcagcaactgtcagaaagaagaatggaaactacatcagctggagtgtagagcaatggcagcacttacagaggatagaaagaagatgcttactcctacaattcggttgatggttcggctggcactcaaaaggaaattacaaaatgagaagatggccaatcttgtgagcctgattcttccttttattgagcttgaccttaaggaaattgcacaaactttttctaagtttgcctgcaatgcgcataccatatgtgaccctgaacttaggcctcttgggactggactgtaccctgtcatatccattattaaccacagttgtgtaccaaatgcagttttgatatttgatggtaggacagcatatgttcgtgcattgcaaccgataaataaagatgaagaggtatctataagctacattgagactgcgacagtcaccaagaagagaaacaatgatctgaaacagtacttcttcacctgcacatgtccacgctgtgtaaagggttttgatgaggatgcactacttgaggggttcaggtgcaagaaccaagcatgtgatggctttttgctgcccaactcaggtaaaaaggcttatacatgccaaaaatgtggtgcttctagagatgtggaagagataaaaaatatgagaagcgaaatactacagttatcggataaagcatcttcatttctttcatcaggaaataaggctgaagcaggttctatctacaagataatcgaacagttagagagaaatctgtaccatgctttctcaactactttgctgcacacgtgcgaaacactattgaagatatatctggaattacaagattggtggactgcgttgacatactgtagattgacaattcctgtttatgaaagagtttatccaccttttcatccgatgattggattacaattctatacttgtggaaagcttgaatggttgcttgagttcacagaggatgcactaaaatctttaaccagagcagcagatatacttaaagtaacacatggcgtaaaatcccagttcatgaaagagctctttggcaagttagaggaagcaagagctgaagtttcgtttagactatcctcgagacatggacatgatgagtaattttcataactgcaggccagttatgatggaaaataatatattgaaattatgtttctactgttgagatcatatttcaaggtacaataaaaaatgtggagactttgtaggcaaagaattagcactgttgtaaaacgattatgtgccgacacaaaataggccctaatttgttgtataaaaaatacaattttgaatttaattgtatatcatgtggtaggttgaactccataaactctctt

SEQ ID NO: 47895 - DNA, 1739 bp, Zea Mays
gtaaccttgttgcttttcgttctgaaaaaccttcttgaacgtcgcggcgcgggaggaagaatggcgtcgtggttggagcagctgcagcgcgagctcgccgcccgcggcctcacagtcgcctccatccccggcaagggaaggggtctcatcgctacttgcaccttcttcccaggggatgtcattctcaatcaggaaccttacgcttctacacctaacaagattttagttggatcgagctgtgaccattgtttcacctctggcaacctgaggaagtgctctatgtgtcgagttacttggtactgcagcagcaactgtcagaaagaagaatggaaactacatcagctggagtgtagagcaatggcagcacttacagaggatagaaagaagatgcttactcctacaattcggttgatggttcggctggcactcaaaaggaaattacaaaatgagaaggtcattccatcctcaagtatagataactacaatctggttgatggcttggagtctcatatatcgaaggttgatgaaaatcaacttgtgctctatgctcagatggccaatcttgtgagcctgattcttccttttattgagcttgaccttaaggaaattgcacaaactttttctaagtttgcctgcaatgcgcataccatatgtgaccctgaacttaggcctcttgggactggactgtaccctgtcatatccattattaaccacagttgtgtaccaaatgcagttttgatatttgatggtaggacagcatatgttcgtgcattgcaaccgataaataaagatgaagaggtatctataagctacattgagactgcgacagtcaccaagaagagaaacaatgatctgaaacagtacttcttcacctgcacatgtccacgctgtggttttgatgaggatgcactacttgaggggttcaggtgcaagaaccaagcatgtgatggctttttgctgcccaactcaggtaaaaaggcttatacatgccaaaaatgtggtgcttctagagatgtggaagagataaaaaatatgagaagcgaaatactacagttatcggataaagcatcttcatttctttcatcaggaaataaggctgaagcaggttctatctacaagataatcgaacagttagagagaaatctgtaccatgctttctcaactactttgctgcacacgtgcgaaacactattgaagatatatctggaattacaagattggtggactgcgttgacatactgtagattgacaattcctgtttatgaaagagtttatccaccttttcatccgatgattggattacaattctatacttgtggaaagcttgaatggttgcttgagttcacagaggatgcactaaaatctttaaccagagcagcagatatacttaaagtaacacatggcgtaaaatcccagttcatgaaagagctctttggcaagttagaggaagcaagagctgaagtttcgtttagactatcctcgagacatggacatgatgagtaattttcataactgcaggccagttatgatggaaaataatatattgaaattatgtttctactgttgagatcatatttcaaggtacaataaaaaatgtggagactttgtaggcaaagaattagcactgttgtaaaacgattatgtgccgacacaaaataggccctaatttgttgtataaaaaatacaattttgaatttaattgtatatcatgtggtaggttgaactccataaactctctt

SEQ ID NO: 47896 - DNA, 1625 bp, Zea Mays
gtaaccttgttgcttttcgttctgaaaaaccttcttgaacgtcgcggcgcgggaggaagaatggcgtcgtggttggagcagctgcagcgcgagctcgccgcccgcggcctcacagtcgcctccatccccggcaagggaaggggtctcatcgctacttgcaccttcttcccaggggatgtcattctcaatcaggaaccttacgcttctacacctaacaagattttagttggatcgagctgtgaccattgtttcacctctggcaacctgaggaagtgctctatgtgtcgagttacttggtactgcagcagcaactgtcagaaagaagaatggaaactacatcagctggagtgtagagcaatggcagcacttacagaggatagaaagaagatgcttactcctacaattcggttgatggttcggctggcactcaaaaggaaattacaaaatgagaaggtcattccatcctcaagtatagataactacaatctggttgatggcttggagtctcatatatcgaaggttgatgaaaatcaacttgtgctctatgctcagatggccaatcttgtgagcctgattcttccttttattgagcttgaccttaaggaaattgcacaaactttttctaagtttgcctgcaatgcgcataccatatgtgaccctgaacttaggcctcttgggactggactgtaccctgtcatatccattattaaccacagttgtgtaccaaatgcagttttgatatttgatggtaggacagcatatgttcgtgcattgcaaccgataaataaagatgaagaggtatctataagctacattgagactgcgacagtcaccaagaagagaaacaatgatctgaaacagtacttcttcacctgcacatgtccacgctgtgtaaagggttttgatgaggatgcactacttgaggggttcaggtgcaagaaccaagcatgtgatggctttttgctgcccaactcagataaggctgaagcaggttctatctacaagataatcgaacagttagagagaaatctgtaccatgctttctcaactactttgctgcacacgtgcgaaacactattgaagatatatctggaattacaagattggtggactgcgttgacatactgtagattgacaattcctgtttatgaaagagtttatccaccttttcatccgatgattggattacaattctatacttgtggaaagcttgaatggttgcttgagttcacagaggatgcactaaaatctttaaccagagcagcagatatacttaaagtaacacatggcgtaaaatcccagttcatgaaagagctctttggcaagttagaggaagcaagagctgaagtttcgtttagactatcctcgagacatggacatgatgagtaattttcataactgcaggccagttatgatggaaaataatatattgaaattatgtttctactgttgagatcatatttcaaggtacaataaaaaatgtggagactttgtaggcaaagaattagcactgttgtaaaacgattatgtgccgacacaaaataggccctaatttgttgtataaaaaatacaattttgaatttaattgtatatcatgtggtaggttgaactccataaactctctt

SEQ ID NO: 47897 - DNA, 998 bp, Zea Mays
ctccattctcgaatatttatcgcgagctagtttatttttaaactaaaacacgataaataaaaagaacggaggaagtatgttctatggaaagccaaactctgccattgatacacaatgatgaggatccataatagatgaactacgtagatccaattcttaaaccaaacagtgatatcctagatacaaatgaccaactctgaatttatcttttatgcctaatcacctttctatgaagtatgaataatgcttagctctgaatttatgtctaataaatcacccttccatgttcttccgtccagaaccacagtaacacaactccaagtcaagacagactaggtagcaaacaaactcacttaacaaatatcacacgatcttgcacgctgcagacgacgcctcctcgcagtcgcaggtgacctcgatctttgggtactgcctcaacggcagcccttcgtagcacggcgggtggtccacgaactggcaacggcagccgtagccgtagccgtagcctccacacccgcatatgcacataccgcagcagcacggcggagcaggagccggcccgggcggtttcgacggcatggctggtcgttgcggcgtgagcttcagttctgccgccacgagctggatgtccctgatcacacagcccgccttgcgccggagcttgcaggggagcaccagcgggtcgaaggctcccgagatcgtcaccgtcccggacacctcgtcgaaggaaatcgcccggatgtcctcggtttctgccagcacgcgcgcgcgcaagactcaagaggggggagttaaagagcttttcgatcacgattcacaagcacaggacgacgatatagatgctgaatcgaccgggaggcaaggcaagtgattatcaccttgcagcttgcacacggtcttccggatcctggtgaagcagcggcagcagccatggttgagtgtgacgaccagcgtggacaccttctctgccatgtgtgctctttctggttctggagaat

SEQ ID NO: 47898 - DNA, 2600 bp, Zea Mays
catgcgtaactgcaggcaacctcatgtgtatattgtagcaaagggaattttcacttcccaccactacgccacggcagtacggcacacgccatagcccttcccgcaagcagccgagctcctccccaaatccttccccgatgctgcggcgcaacagcgagtgcgaaatcgagtccgagctctgacgcgctcgcatggagctctggttctaggtgtgggctgcgctcctcgtatggatccagatgttctcgtggaaccgtaagcagtcctcctcctccggctcgccctcgccctcctcctcctccggccgccgccgcggcggggcggacgcctccatggactccagcagccgcggcggcggcgggagcgggagtgggagcgggagccgcggacggagcccgcggttggatcgccgcaacgcggtgaagcgcgtcgactacgaggcgggcgcgggggcgtccgtgtcggtggccgcgtcgtggtcgtcctcgtcctccgcggatcagcagcgttcgccgggcccggggctccagccttcgcgctccctagacgttgcccccggagcggacctccggatcagcgggagcgtagagggggaggtcgacgaactctgccgcagcctggggctctcggggcccgaggatttcgccatccccgtcgcggcctgggaggcgcgcaagtcgcggtctaactccgacctcctcccgcgctcccaccccgacccgtccacacccgccgacgaaccctcgccaattgcgcgtgtggtctcggcgcctgatgttcagccgactcgcttcgtccctgcccccattcctgctactgttgcggcgcccgaggagtcacccaaggctgcccctgccgttgctgttgcggctcccgtcgggggtttgcccctgccttcgccaaggaggggaggcggggaggtagggatacggggtgcacggccgcctttactctccccgcctccgccaattggtgcactcgctcctccgccggtgaggaggtccttcgttgacgatgacatgactaggtccgcttgggacattgtgcagtcgtttgctcccagggaacagggaagtgaaccgggagagcgtttggacactcgttgcaattcggacacagaggaagagagtgaggctgaggatggggtggcagctgtggagggcgagctgaaagagttgaggataggagagaccttcgaggggctcactggaacttcttcattgtcaacgacaaatgatgatgatgcgtccagtacaaccacggaggccatgttcatcatctcaccgaatggcaagttcaagcgtaagattaagtcatggatgcgtggtgctcttctgggaagcggctcatttgggatggtgtacgaggggatcagtgatgagggtgcttttttcgctgtgaaggaagtatctttgcttgaccaaggaagcaacgcacaacaatctattgttgcacttgagcaggaaattgcactcctcggtcagtttgaacatgaaaatatagtccagtattatggaactgacaaggaagaatccaaactctatatttttattgagcttgtcacacaaggatctctttcatccctctatcaaaagtataaactacgagaatcacaagtctctgcatacacaaggcagattcttaacggattggtttacctgcatgagagaaatgtggtccacagctgaaacaattgcttcatatgcagagatatcaagtgtgccaatatattggtgcatgcaaatggatctgtaaagcttgcagattttggattggcaaaggagatgtcaaaaatcaatatgctaaggtcatgcaaaggaagtgtttactggatggcacctgaggttattaatcctaaaaagatgtatgggccttcagctgatatatggagccttggctgcaccgtgttggaaatgctaacccggcaaataccatttcctaatattgagtggacaaatgctttcttcatgattggaagaggggaacagcctactattccctgctacctgtcgaaggaggcacaagatttcattggccaatgtgtaagagttgatcctgagagccggccttctgcatcacaacttttggagcacccattcgttaacagaccactgcgggcttcatttgaatcttcatctcccccagccatctgattgtactattgatatagttgatcatcatgatttacgctactggttccagaatagaattatgtgggcgtgttagtttagtatctctgtagtacatagggttggtaggcagcattgctatgtttttgtattctttgggtgttcttcatcaggcatagggttttcttcctggttactacgtagatttgtgtacacttgtaggtaaaagggttgcaaacttgcaattgcctctggtgtagggttaggcagttagctgatgtttgtgaatattagacatcaccattctttacttaatggtttgttgaagcatccgcagcattgaatcgcgtggtccttctgtttttcgtcgcataggaaactggttcttctgatgttatcatctacggctacggggctattctgttatccagttatatcatctgccgcttgtgtcattttacatgaactcat

SEQ ID NO: 47899 - DNA, 2512 bp, Zea Mays
gcgtaactgcaggcaacctcatgtgtatattgtagcaaagggaattttcacttcccaccactacgccacggcagtacggcacacgccatagcccttcccgcaagcagccgagctcctccccaaatccttccccgatgctgcggcgcaacagcgagtgcgaaatcgagtccgagctctgacgcgctcgcatggagctctggttctaggtgtgggctgcgctcctcgtatggatccagatgttctcgtggaaccgtaagcagtcctcctcctccggctcgccctcgccctcctcctcctccggccgccgccgcggcggggcggacgcctccatggactccagcagccgcggcggcggcgggagcgggagtgggagcgggagccgcggacggagcccgcggttggatcgccgcaacgcggtgaagcgcgtcgactacgaggcgggcgcgggggcgtccgtgtcggtggccgcgtcgtggtcgtcctcgtcctccgcggatcagcagcgttcgccgggcccggggctccagccttcgcgctccctagacgttgcccccggagcggacctccggatcagcgggagcgtagagggggaggtcgacgaactctgccgcagcctggggctctcggggcccgaggatttcgccatccccgtcgcggcctgggaggcgcgcaagtcgcggtctaactccgacctcctcccgcgctcccaccccgacccgtccacacccgccgacgaaccctcgccaattgcgcgtgtggtctcggcgcctgatgttcagccgactcgcttcgtccctgcccccattcctgctactgttgcggcgcccgaggagtcacccaaggctgcccctgccgttgctgttgcggctcccgtcgggggtttgcccctgccttcgccaaggaggggaggcggggaggtagggatacggggtgcacggccgcctttactctccccgcctccgccaattggtgcactcgctcctccgccggtgaggaggtccttcgttgacgatgacatgactaggtccgcttgggacattgtgcagtcgtttgctcccagggaacagggaagtgaaccgggagagcgtttggacactcgttgcaattcggacacagaggaagagagtgaggctgaggatggggtggcagctgtggagggcgagctgaaagagttgaggataggagagaccttcgaggggctcactggaacttcttcattgtcaacgacaaatgatgatgatgcgtccagtacaaccacggaggccatgttcatcatctcaccgaatggcaagttcaagcgtaagattaagtcatggatgcgtggtgctcttctgggaagcggctcatttgggatggtgtacgaggggatcagtgagaaattgcactcctcggtcagtttgaacatgaaaatatagtccagtattatggaactgacaaggaagaatccaaactctatatttttattgagcttgtcacacaaggatctctttcatccctctatcaaaagtataaactacgagaatcacaagtctctgcatacacaaggcagattcttaacggattggtttacctgcatgagagaaatgtggtccacagctgaaacaattgcttcatatgcagagatatcaagtgtgccaatatattggtgcatgcaaatggatctgtaaagcttgcagattttggattggcaaaggagatgtcaaaaatcaatatgctaaggtcatgcaaaggaagtgtttactggatggcacctgaggttattaatcctaaaaagatgtatgggccttcagctgatatatggagccttggctgcaccgtgttggaaatgctaacccggcaaataccatttcctaatattgagtggacaaatgctttcttcatgattggaagaggggaacagcctactattccctgctacctgtcgaaggaggcacaagatttcattggccaatgtgtaagagttgatcctgagagccggccttctgcatcacaacttttggagcacccattcgttaacagaccactgcgggcttcatttgaatcttcatctcccccagccatctgattgtactattgatatagttgatcatcatgatttacgctactggttccagaatagaattatgtgggcgtgttagtttagtatctctgtagtacatagggttggtaggcagcattgctatgtttttgtattctttgggtgttcttcatcaggcatagggttttcttcctggttactacgtagatttgtgtacacttgtaggtaaaagggttgcaaacttgcaattgcctctggtgtagggttaggcagttagctgatgtttgtgaatattagacatcaccattctttacttaatggtttgttgaagcatccgcagcattgaatcgcgtggtccttctgtttttcgtcgcataggaaactggttcttctgatgttatcatctacggctacggggctattctgttatccagttatatcatctgccgcttgtgtcattttacatgaactcat

SEQ ID NO: 47900 - DNA, 2716 bp, Zea Mays
gcgtaactgcaggcaacctcatgtgtatattgtagcaaagggaattttcacttcccaccactacgccacggcagtacggcacacgccatagcccttcccgcaagcagccgagctcctccccaaatccttccccgatgctgcggcgcaacagcgagtgcgaaatcgagtccgagctctgacgcgctcgcatggagctctggttctaggtgtgggctgcgctcctcgtatggatccagatgttctcgtggaaccgtaagcagtcctcctcctccggctcgccctcgccctcctcctcctccggccgccgccgcggcggggcggacgcctccatggactccagcagccgcggcggcggcgggagcgggagtgggagcgggagccgcggacggagcccgcggttggatcgccgcaacgcggtgaagcgcgtcgactacgaggcgggcgcgggggcgtccgtgtcggtggccgcgtcgtggtcgtcctcgtcctccgcggatcagcagcgttcgccgggcccggggctccagccttcgcgctccctagacgttgcccccggagcggacctccggatcagcgggagcgtagagggggaggtcgacgaactctgccgcagcctggggctctcggggcccgaggatttcgccatccccgtcgcggcctgggaggcgcgcaagtcgcggtctaactccgacctcctcccgcgctcccaccccgacccgtccacacccgccgacgaaccctcgccaattgcgcgtgtggtctcggcgcctgatgttcagccgactcgcttcgtccctgcccccattcctgctactgttgcggcgcccgaggagtcacccaaggctgcccctgccgttgctgttgcggctcccgtcgggggtttgcccctgccttcgccaaggaggggaggcggggaggtagggatacggggtgcacggccgcctttactctccccgcctccgccaattggtgcactcgctcctccgccggtgaggaggtccttcgttgacgatgacatgactaggtccgcttgggacattgtgcagtcgtttgctcccagggaacagggaagtgaaccgggagagcgtttggacactcgttgcaattcggacacagaggaagagagtgaggctgaggatggggtggcagctgtggagggcgagctgaaagagttgaggataggagagaccttcgaggggctcactggaacttcttcattgtcaacgacaaatgatgatgatgcgtccagtacaaccacggaggccatgttcatcatctcaccgaatggcaagttcaagcgtaagattaagtcatggatgcgtggtgctcttctgggaagcggctcatttgggatggtgtacgaggggatcagtgatgagggtgcttttttcgctgtgaaggaagtatctttgcttgaccaaggaagcaacgcacaacaatctattgttgcacttgagcaggaaattgcactcctcggtcagtttgaacatgaaaatatagtccagtattatggaactgacaaggtcttagtaatattgatgaactcatgtgatctgtttatgttccaatgcaggaagaatccaaactctatatttttattgagcttgtcacacaaggatctctttcatccctctatcaaaagtataaactacgagaatcacaagtctctgcatacacaaggcagattcttaacggattggtttacctgcatgagagaaatgtggtccacagagatatcaagtgtgccaatatattggtgcatgcaaatggatctgtaaagcttgcagattttggattggcaaaggagatgtcaaaaatcaatatgctaaggtcatgcaaaggaagtgtttactggatggcacctgaggttattaatcctaaaaagatgtatgggccttcagctgatatatggagccttggctgcaccgtgttggaaatgctaacccggcaaataccatttcctaatattgagtggacaaatgctttcttcatgattggaagaggggaacagcctactattccctgctacctgtcgaaggaggcacaagatttcattggccaatgtgtaagagttgatcctgagagccggccttctgcatcacaacttttggagcacccattcgttaacagaccactgcgggcttcatttgaatcttcatctcccccagccatctgattgtactattgatatagttggtaagtttctctcttgtacaagggtaatgatcaagcttcccaacactcagtatttaaggctgacactaattaatgggtatacacgctttgcagatcatcatgatttacgctactggttccagaatagaattatgtgggcgtgttagtttagtatctctgtagtacatagggttggtaggcagcattgctatgtttttgtattctttgggtgttcttcatcaggcatagggttttcttcctggttactacgtagatttgtgtacacttgtaggtaaaagggttgcaaacttgcaattgcctctggtgtagggttaggcagttagctgatgtttgtgaatattagacatcaccattctttacttaatggtttgttgaagcatccgcagcattgaatcgcgtggtccttctgtttttcgtcgcataggaaactggttcttctgatgttatcatctacggctacggggctattctgttatccagttatatcatctgccgcttgtgtcattttacatgaactcat

SEQ ID NO: 47901 - DNA, 2542 bp, Zea Mays
gcgtaactgcaggcaacctcatgtgtatattgtagcaaagggaattttcacttcccaccactacgccacggcagtacggcacacgccatagcccttcccgcaagcagccgagctcctccccaaatccttccccgatgctgcggcgcaacagcgagtgcgaaatcgagtccgagctctgacgcgctcgcatggagctctggttctaggtgtgggctgcgctcctcgtatggatccagatgttctcgtggaaccgtaagcagtcctcctcctccggctcgccctcgccctcctcctcctccggccgccgccgcggcggggcggacgcctccatggactccagcagccgcggcggcggcgggagcgggagtgggagcgggagccgcggacggagcccgcggttggatcgccgcaacgcggtgaagcgcgtcgactacgaggcgggcgcgggggcgtccgtgtcggtggccgcgtcgtggtcgtcctcgtcctccgcggatcagcagcgttcgccgggcccggggctccagccttcgcgctccctagacgttgcccccggagcggacctccggatcagcgggagcgtagagggggaggtcgacgaactctgccgcagcctggggctctcggggcccgaggatttcgccatccccgtcgcggcctgggaggcgcgcaagtcgcggtctaactccgacctcctcccgcgctcccaccccgacccgtccacacccgccgacgaaccctcgccaattgcgcgtgtggtctcggcgcctgatgttcagccgactcgcttcgtccctgcccccattcctgctactgttgcggcgcccgaggagtcacccaaggctgcccctgccgttgctgttgcggctcccgtcgggggtttgcccctgcctccgccaattggtgcactcgctcctccgccggtgaggaggtccttcgttgacgatgacatgactaggtccgcttgggacattgtgcagtcgtttgctcccagggaacagggaagtgaaccgggagagcgtttggacactcgttgcaattcggacacagaggaagagagtgaggctgaggatggggtggcagctgtggagggcgagctgaaagagttgaggataggagagaccttcgaggggctcactggaacttcttcattgtcaacgacaaatgatgatgatgcgtccagtacaaccacggaggccatgttcatcatctcaccgaatggcaagttcaagcgtaagattaagtcatggatgcgtggtgctcttctgggaagcggctcatttgggatggtgtacgaggggatcagtgatgagggtgcttttttcgctgtgaaggaagtatctttgcttgaccaaggaagcaacgcacaacaatctattgttgcacttgagcaggaaattgcactcctcggtcagtttgaacatgaaaatatagtccagtattatggaactgacaaggaagaatccaaactctatatttttattgagcttgtcacacaaggatctctttcatccctctatcaaaagtataaactacgagaatcacaagtctctgcatacacaaggcagattcttaacggattggtttacctgcatgagagaaatgtggtccacagagatatcaagtgtgccaatatattggtgcatgcaaatggatctgtaaagcttgcagattttggattggcaaaggagatgtcaaaaatcaatatgctaaggtcatgcaaaggaagtgtttactggatggcacctgaggttattaatcctaaaaagatgtatgggccttcagctgatatatggagccttggctgcaccgtgttggaaatgctaacccggcaaataccatttcctaatattgagtggacaaatgctttcttcatgattggaagaggggaacagcctactattccctgctacctgtcgaaggaggcacaagatttcattggccaatgtgtaagagttgatcctgagagccggccttctgcatcacaacttttggagcacccattcgttaacagaccactgcgggcttcatttgaatcttcatctcccccagccatctgattgtactattgatatagttggctgacactaattaatgggtatacacgctttgcagatcatcatgatttacgctactggttccagaatagaattatgtgggcgtgttagtttagtatctctgtagtacatagggttggtaggcagcattgctatgtttttgtattctttgggtgttcttcatcaggcatagggttttcttcctggttactacgtagatttgtgtacacttgtaggtaaaagggttgcaaacttgcaattgcctctggtgtagggttaggcagttagctgatgtttgtgaatattagacatcaccattctttacttaatggtttgttgaagcatccgcagcattgaatcgcgtggtccttctgtttttcgtcgcataggaaactggttcttctgatgttatcatctacggctacggggctattctgttatccagttatatcatctgccgcttgtgtcattttacatgaactcat

SEQ ID NO: 47902 - DNA, 1630 bp, Zea Mays
atgactgtggacaatgatcttgcactgaaaatatacataaaggctagggcaacccctaaagttgttgctgcttttgctgaaaggagggagtttgacaagacactgatatactcaaagcaggttttggagataaacttagtgacttacccaaatgttgttgatgccattcttgctaatgccctccagcccattaacaacttccttggacaggcacttgttgagttctttggcacattgtcaagagagtgggctttggaatgcatgaaagaccttctactggttaatctgaggggaaatcttcagattgttgtgcaggccacgaaagaatactctgagcagctaggggttgatgcttgcatcaaattatttgagcaattcaaatcttatgaggacctttactttttcttgggatcttatctgagctccagcgaggacccagatatccatttcaagtacatagaagcagcagcaaggactggacaaatcaaagaagttgaacgtgtaaccagagagtcaaacttctatgatgctgagaagataatgaactttttgatggaagcaaaattacctaatgcccgtccactgattaatgtttgtgatcgctttggttttgtgccagatctcactcactatctgtacacaaacaacatgcttcgatatatcgaaggctatgttcagaaggtgaatcccgggaatgctccattggtagtggggcaattacttgatgatgaatgccctaaagattttatcaagggtttgatcctatttgttcgttctctcctccctgttgagcctttggttgatgaatgtgagaagaggaaccgcctacgtttgctcactcaattcttggagcacttgtgagtgaaggtagccaagatgtgcatgtccataatgctcttagtaaaatcatcattgacaacaacaacaatcctgagcatttccttactaccaacccattttacgactctcgtgttgtgggtaaatattgtgaaaagcgggatcctacacttgctgttgttgcttacagacgtgggcagtgtgacgatgaacttattaacgtcactaacaagaattcgttattcaagctgcaagctaggtatgtggttgagagaatggatggtgatctatgggataaagttcttcagcccgagaatgaatatagaaggcaactcattgaccaagtggtttcgactgcattacctgagagcaagagccccgagcaagtgtctgctgctgttaaggctttcatgactgctgacctgccacatgaactgattgagcttcttgaaaagattattcttcagaattctgctttcagtggaaatttcaatctgcagaacctgctcatcttgactgccaaagcccagttacgtgaaggtctggtcagtgaagcaattgagtccttcattcgtgtagatgatgctgcacacttccttgatgttatccgtgcagccgaggaagctaatgtgtacaatgatttagtgaagtacctagatcaactcacttgttatgattgttgagttgattcttgatagcatcactaaacaatgatatatttgtgtacaagtgtcccccgttgcaacgcacgggcatatacctagttaatattttaattatagaaacaacatga

SEQ ID NO: 47903 - DNA, 874 bp, Zea Mays
taattatggtccccgacagcagcattactcagagttgcctgatatcaagcgtgccattgcaaatacccatgtcattgaaccataggcacttgttgagttctttggcacattgtcaagagagtgggctttggaatgcatgaaagaccttctactggttaatctgaggggaaatcttcagattgttgtgcaggccacgaaagaatactctgagcagctaggggttgatgcttgcatcaaattatttgagcaattcaaatcttatgaggacctttactttttcttgggatcttatctgagctccagcgaggacccagatatccatttcaagtacatagaagcagcagcaaggactggacaaatcaaagaagttgaacgtgtaaccagagagtcaaacttctatgatgctgagaagataatgaactttttgatggaagcaaaattacctaatgcccgtccactgattaatgtttgtgatcgctttggttttgtgccagatctcactcactatctgtacacaaacaacatgcttcgatatatcgaaggctatgttcagaaggtgaatcccgggaatgctccattggtagtggggcaattacttgatgatgaatgccctaaagattttatcaagggtttgatcctatttgttcgttctctcctccctgttgagcctttggttgatgaatgtgagaagaggaaccgcctacgtttgctcactcaattcttggagcacttgtgagtgaaggtagccaagatgtgcatgtccataatgctcttagtaaaatcatcattgacaacaacaacaatcctgagcatttccttactaccaacccattttacgactctcgtgttgtgggtaaatattgtgaaaagcggg

SEQ ID NO: 47904 - DNA, 1663 bp, Zea Mays
cagcactcagcagtcagaagtcagcagcacagcacagaccacacggagcgcgcagcgtcgatcggtctcggtctccggccatggcggtggctcagcagcaccacatcaaggcgctgacgccgacgtggttcctcgtcaaggttacgccggccccggcgccgagggagggcggtaagaaagccgcctactcgccgctgctactgtcgccggcggtgtggcagagggcgcagaacgagaaggagagggacgaggacggccccgagcgcgccgccggcggcctgccggtgtcgccgagggtcggctgcatggggcaggtcaaggggaggaggaggataggctgctcgagcgcgcgcggacctgcgcccccgaggggctcgggctcgggctcggggtgccgcggcgccggcggcaaggtggcgagtctcgtgctcgggatgttcgggatgaggcggcggaacgcaaggagggcgtcgcgtgcctgcgccaaggtcagggacgtaccgcgtggcggcggcgcggcctccgcgccggggagcactcgtggtgtccgtcgcggggcggccgtgtcggtggacgtgtttgatccgccgttgccggtgatcgtagggaacttcgcccccatcggtgagcagtcgctgactccatctccaacgaccccagcgaagacaggtgacaccagaggtcctgaccacgccatcaatcaagcaaaaatggaaccaaagctatccacgctgagtgctaacattatctttttattcattgtttggttgactgatgctgggatgatctgcagaccgaacatgattacactgacaggtttcatgtttctactgacatcagcattccttggctttttatattcaccccatctagatacaacaccccccagatgggttcaccttgctcatggactgcttctctttctttatcagactttcgatgccgtggatggaaaacaagcaaggcgtaccaactcatcaagtcctctaggcgagctttttgaccacgaatgtgatgtgcttgtgtgtgctgtaagaccacctgtcaatattttttatttcaagtgcaatgattttcaagtcgttgggtttacaacatccctccctactgccattgaggttgaagggacaacaaggatggtggaagagcaaacggctatgcagatcttgttggtctataggcaaatgagatatccatttgggggcagcaaaactcaagacaacaactacgtagcgcgtcaagatggccatcgggcagcacgcttcattggtccctcttcctccaaggccccgaagatctgcgcgacgatcactattctccgtgctactcgggcggctatgaacatcgagttcagcaaggacatactccttgacaagctcgctaagctcagcaacatgcagatggaggctcaacttttgaatctattgaagcgccatgatcaagaatacaatgttgatgagatcagcatgaatgacaagctcaccaactgtggccatcagataactattatgtgcatatatgtgaatatacttgtacgcttgaggcgtgtgctcattcattctttgacgaattacgagaatcacatgcaagactccctaacggacgcccatttcctccactattcaactttaagcaggaaatagcatgcctgaaggaacacatt

SEQ ID NO: 47905 - DNA, 1656 bp, Zea Mays
atttttccgtcggtatggtatagtaataacccggtttgtcatctctagactagggtacccaaacccgagccgtcgtccccagtgtggcagtgtgccgctcgacgcgcagccaaacccaaacccttcctccctcccgacgggcgacggcgatggccgccgcgacagagaagacggctgaggacatccgccgcgagctccaggagctccagcgccagcaccgcgagatcaccgagcgcctgcgcgacccccgtggccttcgccgcggcgcccccggccctggtcctggacctggccccccccgcccgctccgcggcttcgtgagaccccatgtgggtgcggaagtggcggatcaggctccgcagaagcgtcggctgctatcggccgtagttaaggttgatggcgctgaaaataatgaagaaggcacaaaggatgccaatggggaggggcaagaggcgggttcaggtgccactgaaggcagtgacaggaggactttcaacactggcgggttcagaagggacgggagcctgtggatgcagaggagggtggactataattcgctgccagagccagctccaagggagcttcccaggaatgaggacccgagtttggtgagaaggaataagaggatgctggggcagcttcttgtcggtacattagagaaatttcaacaagaggataaaaagctatccaactctgaggcttttctgcgcagatcagagactcagcgaaaggctgagcaaaaggttcgtgaagaaagtgaaaggctgcgacagcaggaacgtgagcaaattgcagagaagcgtaagcgtgatatgacgctccgcgctcgtgtagctgctaaggcagaagaaaagaggttggagctgttgtacattcagtggactgagcatcataaaaggctgtccaatttcttaaggacaaaagctgagccacctatttattacatgccaactaaaccaattattgatgatccagccattgttgagcagaacaaggaaaaggtattcgaagaatggaaatctatgcgcagggctgagctgactcggtttcaaaagcaagttgaggagcaatatctctcaaatgtggagaggcaattggagaggatccagaatgcccggaacgctcggaaggcgaatgggcctggtaacatgcaagaaatggacaaggagctggacacccacagggcggagcatggtccaaagcctcggcgagttcccgaggagggcggcaatgatgatgacgaagatgcagaggacatggctgcggaagacgagctgatggatgaagttttgggcatcaacgatgcaatcaatgaggacccatccaagccgtccgaagaagctactactgaaggtcagccagcaaccgaggaagcacaataggattctttgttcacacaaggtaggcgtaccattccggcattccgtatgcttagttgccgtcttgttgggtgctgtctgtgcgtgtatttttgttagacgtcccccaatggttagactgtgttttaatattgttgttttggccttttgatgttgaggccatacaactgtcaattattatcttataattgttgtaagcatactataattgttaccatgatttggtcgttttttttgtcgtcagacgtttattgccagcaggttatgttctttcact

SEQ ID NO: 47906 - DNA, 2605 bp, Zea Mays
aattgcaaatgggagttggagcggcgaatgacatgtggcatgtcttgtgggatttgcatgctctgccagaagatgttgtgaggactgatgcaataactaagcttgctggatggacggatgcgattgcatagagccactatggcctaccgatgatcttctcgtcaagtatcagtacatctcagacttcttcatagcccttgcgtacttctcgattccattggagctcatatattttgtgaagaagtcgtccttcttcccatacagatgggtcctgatccagtttggtgcgtttatagttctttgtggggcaacccatctgataaacctgtggacgttcaccacacatacaaagaccgttgcgatggtcatgaccatagcgaagatttctacagcagtcgtgtcctgtgcaactgctttgatgctcgttcatatcattcccgacttgttgagcgtgaaaactagggagttgttcttgaagaataaagctgaggagcttgatagagagatgggacttataaggacgcaagaggagactggtagacatgttaggatgcttacacatgaaatcagaagtactcttgatagacatacaattttgaagactactctcgttgagctaggaaggaccttgggtctggaagaatgtgcattgtggatgccatctcgaagtggctcaagccttcagctttctcatactttgcgccaccagattactgttggatcatcggtgccaatgaatcttcctgtcgtcaatcaagtgttcagtagcaaccgggcaatcataataccccacacatcttctttggcgcgggttcgacctcttgcagggcgatatgttccaccagaagtggccgcagtccgtgtacctcttctacatctttcaaactttcaaataaatgattggcctgagctctcagcaaaaagctttgcaatcatggttttgatgcttccatctgatagtgctagaaaatggcatgtgcatgaattggagctggttgaggtcgttgctgatcaggtagcagttgcactatctcatgcagctattctcgaagagtccatgcgggcacgtgatttactaatggagcagaatgttgccctggatttagctcgaagagaggctgagatggctatccgtgctcgcaatgatttcctagctgttatgaatcacgaaatgagaacacccatgaatgcaataatagccctttcctccttgcttttggaaactgagcttactcctgagcagcgtctaatggtggaaacagtactgaaaagcagcaatttgttagcaacactcatcaatgatgttctggatctttccaaactcgaggatggaagccttgaactggagattaaagcattcaatcttcatgctgttttcaaagaagtgatgggtttcattaaaccaattgcatctatcaagaggctatctgtatcggttatgttggcaccagatctgccgttatgtgcaattggtgatgaaaagagactcatgcaaactattctgaacatctctggcaatgctgtaaagtttaccaaggagggacacatcacgcttgtagcttccattgtgaaggctgactctttgagagagttcagaaccccagaatttcatccaactgcaagtgatgaacatttctatttgaaagttcaggtaaaagatacaggctgtggagttagtcctcaggatctacctcatgtattcacaaagtttgctcatcctcaaagtggaggaaaccgagggtttaatggtagtggtcttggccttgccatatgcaagaggtttgttagtcttatgggagggcacatctggatcgacagcgaaggaaccggaagaggttgcaccgcaacattcgtcatcaagctcggcgtgtgtgacaacacaaacacctaccagcagcagctggttcctctagtctggccaagcagtgcagactccaatttgtctgctccgaaagtgctgcccgacgggagaggatctgtttccctgaaatctcggtaccaaagaagcgtatgagctcagtgtaaatgattgacggcatagtgccaagtaggggatcgattagtgccattgtctaattttgtttgtaacccagtcatagcaacatatagtgtacaaataatgtaaagccaatggagactgcagctgtgtatctgggtagcaacgctgacttgctgcattgagtagtatgtcctaccagcggattgaattgcttgttctggggtgtgcggcgcgcgccccgttgattgttctgttgtaacttgtaatcccatattaatcgtgtaatatgaaattcaatgcaaatacacggtcacaagctgttttcggtgccctcgctccatcagttggttcagatcgtagatgctgccagttgcatgtgttagataggactggaaaataagctcgaggcttgcgagccggctcgagctcgaagtgtttcgcgagcctcgaacgagtcgagctccttctttgagctcgtttttatagtgagccgagccgtctcgttccagctcgcgagccttacaaaaataattaatttatagaataataatgaatattagataattttatggataatagctcattttttagtttttgatgatgaat

SEQ ID NO: 47907 - DNA, 1480 bp, Zea Mays
tcacgacgagaatgtacggtgaatatacaaagcacaacacaacaattgtgtatatatagaataatgagaaaaggcaacctcaacatacgatgcggacgagaaaagagcaattgatgatagactgatacccaccaccagtaccacagtccacgctccttttcttttctttttttccctcctttgtattgcacaaatcagtgagcgtgcagtcgataaagacacactttcgggaccttctttgatcatggaggccacaaggcaagagctagggttctaggaaaagttggaaccccttttataccagtcaaaaaacaacagacactattttacaactaaccccaaacaagaaccaatttttttccaagaaaacaaatgtcttcatctcctttaatatgcaccactactgtgtgatccacgaaatcaccatgcagttcgtttgactttaattcgtatcaacttctactactttttatctagagtgaattgtagctacagtagtccgaacaactagacccgtgtaacaaaaaagcaagggacgtcacgaaattacatggaaatagaagtatgaaaggctggagatcgaagctcaagattgactagttcacgtgttttgagcgtacgatctctcttcacgcttacgcaatttgcgcctcggatcatgcgcaccttttttttctagagaaaaaaaaatactcttcaacaacaacaaaacaaaaaccgagatgatactcttttcacaggacgtagtgctactgctgcacgactcctccgatctaccctccaagggcttgttcggttattttcaatccatatggattggaggggattgatatggattgagagagattttgacttgctagggattaaaaccccttcaatccccctcaatccatatggattggggtagaaccgaacaagccccaaaggagaagaaacggaagagggggggggggggaggggggagaagaaagttctctgccagctgctacgagctagaagctgctgggcgcccggccggagaaggccatggcgaagaggaggatgacgaggtagaagaggatgacgacgagcttcatctggaacatggcgaagaagagcttcaccatgaacaccagcagcagcgcgtcgaatatgatcgttatggccacctccagaggctccatcgccgccgaccagaccaccagcaaaggtgagatcaacactctctcagctgggacggaccaagaaaacaaaacgagaaatcggtaaaggtggatgggaccggtgcggtgagttaggggagaccaaggcgaggggagaaaaccagcagagtagaagaagacgcacctgacccctgaaggcgacgcgttttccgcttcagtgacactgcttcgctttggagctttggcctatctgcactcgcggaccgcaaaccggatgcatcgccatttacagtaaaatattcctgcagcggtggactgtatgaccaactgtaccggac

SEQ ID NO: 47908 - DNA, 1595 bp, Zea Mays
gttcgcgcgagagctcgagctccccgtctctgcaccagacaccagtgcaccaccaaatccgagccgaatcttctcgaccccgctcctcccccgccctccgacccagcgccattttcacgatcctaaggtccttgcccgaccaaacgacccgtgacctccgccacagctgctgcagagctaaccaatggacgtgctgaagcgcgagctgcagcgcaagcgccagctcctcaacgccgatttcggcggccgcaagatcatccgccgcgccgaaatcgaggcacgcgagctccagcgcatccgcgaggtcgagcgccagctcctcctccaaaagcagcacaggcattcccgcccgctgtcctccccctccagttcctcctcaagctcctcgcccacctccgcagccgctgacgccgacgccgacgcgtcgcgggcagagagcggctccaaggagtcgctcccgagggaggaggtcatccggcgcctgcgcgtgctgcggcagccggccacgctcttcggcgaggatgacatcgcgcgcctccgccgcctccaggtcctgatcgaggactccggcgcgctcgccgacatcgacgcggcggagatcggggagggccagaccaacgacttcctccgcgacatccaggcgatgcgtgctaaagctgcgactgtcacgaagcccaaggcggccggcgcggaggccgagcgtggggagggcgacagcgtatcgatagatgtgccgttcgaggagctctgcgacgaggacaagatcactgcgttcttcaggagactgttggacgagtggacccaggaggtggacggtatgcctgaggcggaacggaggacggcaaaagggaaggccgcgatagccacctgcaagcagtgcacgcgatacctcgaccctctgttcaagcagtgcaagaagaaggctctcccttctgatgtccgacaagcattgctggaggtggtcaggtgctgtaggagacgagactacttggctgcagtggacaactatatcaagctagcgataggtaactcgccctggccaattggtgtgaccatggttggtattcatgagcgatcggctcgcgaaaagatctacacgaacagcgtggctcacatcatgaatgatgagacgaccagaaagtacctgcagtctgtgaagaggctcataacattctgccagaggaagtaccccactgatccatcaaggtcggtagagttcaacagcctggcaaatggtagcgatctgcagtctctcctggcgcagcaaaacgcgaagaattcagaagaaacgcttcggttagtggcagcgtcatgaaaggttggattatatctgtcagcggaattctaggaacctaatttaactggagcacagcatactgatactgtttgtggacatggtgacggttcacgaaatgtaactgttgagcaccatattgagcgggcggacggtccggcctgtccgcggtccggacagtccgtgcctgtgggccggacggtccgcgcatgcgcagagcagtttagggttccgagttttgtgctatgtttgttggctagatttgcggaattaatctggaatccagtcatgtaaagggtcc

SEQ ID NO: 47909 - DNA, 1710 bp, Zea Mays
gttcgcgcgagagctcgagctccccgtctctgcaccagacaccagtgcaccaccaaatccgagccgaatcttctcgaccccgctcctcccccgccctccgacccagcgccattttcacgatcctaaggtccttgcccgaccaaacgacccgtgacctccgccacagctgctgcagagctaaccaatggacgtgctgaagcgcgagctgcagcgcaagcgccagctcctcaacgccgatttcggcggccgcaagatcatccgccgcgccgaaatcgaggcacgcgagctccagcgcatccgcgaggtcgagcgccagctcctcctccaaaagcagcacaggcattcccgcccgctgtcctccccctccagttcctcctcaagctcctcgcccacctccgcagccgctgacgccgacgccgacgcgtcgcgggcagagagcggctccaaggagtcgctcccgagggaggaggtcatccggcgcctgcgcgtgctgcggcagccggccacgctcttcggcgaggatgacatcgcgcgcctccgccgcctccaggtcctgatcgaggactccggcgcgctcgccgacatcgacgcggcggagatcggggagggccagaccaacgacttcctccgcgacatccaggcgatgcgtgctaaagctgcgactgtcacgaagcccaaggcggccggcgcggaggccgagcgtggggagggcgacagcgtatcgatagatgtgccgttcgaggagctctgcgacgaggacaagatcactgcgttcttcaggagactgttggacgagtggacccaggaggtggacggtatgcctgaggcggaacggaggacggcaaaagggaaggccgcgatagccacctgcaagcagtgcacgcgatacctcgaccctctgttcaagcagtgcaagaagaagagtatggctctcccttctgatgtccgacaagcattgctggaggtggtcaggtgctgtaggagacgagactacttggctgcagtggacaactatatcaagctagcgataggtaactcgccctggccaattggtgtgaccatggttggtattcatgagcgatcggctcgcgaaaagatctacacgaacagcgtggctcacatcatgaatgatgagacgaccagaaagtacctgcagtctgtgaagaggctcataacattctgccagaggaagtaccccactgatccatcaaggtcggtagagttcaacagcctggcaaatggtagcgatctgcagtctctcctggcgcagcaaaacgcgaagaattcagaagaaacgcttcggttagtggcagcgtcatgaaaggttggattatatctgtcagcggaattctaggcaagttcgattcttgtgtgatttatttgtgatacgaattagtacttgtaagaacctgaattgtatgttcggtcgttactcgttactgccttactgaaccgtggaacaggaacctaatttaactggagcacagcatactgatactgtttgtggacatggtgacggttcacgaaatgtaactgttgagcaccatattgagcgggcggacggtccggcctgtccgcggtccggacagtccgtgcctgtgggccggacggtccgcgcatgcgcagagcagtttagggttccgagttttgtgctatgtttgttggctagatttgcggaattaatctggaatccagtcatgtaaagggtcc

SEQ ID NO: 47910 - DNA, 911 bp, Zea Mays
cagacaccagtgcaccaccaaatccgagccgaatcttctcgaccccgctcctcccccgccctccgacccagcgccattttcacgatcctaaggtccttgcccgaccaaacgacccgtgacctccgccacagctgctgcagagctaaccaatggacgtgctgaagcgcgagctgcagcgcaagcgccagctcctcaacgccgatttcggcggccgcaagatcatccgccgcgccgaaatcgaggcacgcgagctccagcgcatccgcgaggtcgagcgccagctcctcctccaaaagcagcacaggcattcccgcccgctgtcctccccctccagttcctcctcaagctcctcgcccacctccgcagccgctgacgccgacgccgacgcgtcgcgggcagagagcggctccaaggagtcgctcccgagggaggaggtcatccggcgcctgcgcgtgctgcggcagccggccacgctcttcggcgaggatgacatcgcgcgcctccgccgcctccaggtcctgatcgaggactccggcgcgctcgccgacatcgacgcggcggagatcggggagggccagaccaacgacttcctccgcgacatccaggcgatgcgtgctaaagctgcgactgtcacgaagcccaaggcggccggcgcggaggccgagcgtggggagggcgacagcgtatcgatagatgtgccgttcgaggagctctgcgacgaggacaagatcactgcgttcttcaggagactgttggacgagtggacccaggaggtggacggtatgcctgaggcggaacggaggacggcaaaagggaaggccgcgatagccacctgcaagcagtgcacgcgatacctcgaccctctgttcaagcagtgcaagaagaagattcttacagcatcaagtaatcca

SEQ ID NO: 47911 - DNA, 7265 bp, Zea Mays
cagacaccagtgcaccaccaaatccgagccgaatcttctcgaccccgctcctcccccgccctccgacccagcgccattttcacgatcctaaggtccttgcccgaccaaacgacccgtgacctccgccacagctgctgcagagctaaccaatggacgtgctgaagcgcgagctgcagcgcaagcgccagctcctcaacgccgatttcggcggccgcaagatcatccgccgcgccgaaatcgaggcacgcgagctccagcgcatccgcgaggtcgagcgccagctcctcctccaaaagcagcacaggcattcccgcccgctgtcctccccctccagttcctcctcaagctcctcgcccacctccgcagccgctgacgccgacgccgacgcgtcgcgggcagagagcggctccaaggagtcgctcccgagggaggaggtcatccggcgcctgcgcgtgctgcggcagccggccacgctcttcggcgaggatgacatcgcgcgcctccgccgcctccaggtcctgatcgaggactccggcgcgctcgccgacatcgacgcggcggagatcggggagggccagaccaacgacttcctccgcgacatccaggcgatgcgtgctaaagctgcgactgtcacgaagcccaaggcggccggcgcggaggccgagcgtggggagggcgacagcgtatcgatagatgtgccgttcgaggagctctgcgacgaggacaagatcactgcgttcttcaggagactgttggacgagtggacccaggaggtggacggtatgcctgaggcggaacggaggacggcaaaagggaaggccgcgatagccacctgcaagcagtgcacgcgatacctcgaccctctgttcaagcagtgcaagaagaaggtatggagcatcaagtgtctcagtagtatcagtttgaatgacctaatgcttattgcgaacgtttggctggatgagttcataggtttgtcaacccgtctgatagcatgctttaatttgaacttttaatacggttttgcttaatttgtttacaccattgaatatctattatctactgcttagtgataaaggaagtgtaggaagcgtgaatattatatttgtcactagcggattgcgtgtgatatagtgaaggaatgatgatacaagttgttgttaatacttacatttaaattgatcttatcttttgtaaaaaatggatgctgtctacactctatctacgccttacccaatgaattggtgatgcagtttctgataaatatttgttcaaatctgtatctgaactatttcttctattggctgaagattcttacagcatcaagtaatccatttaaggaatacaaccatacagcgaagacaacagagatatggtgtatgctgtttctaaccgtatgggttctaatattattgatttgtcttctgagatgtttagagaggaaccctttgtaacataagaagggatttgtcgtaagaattcactgttgcccttgaataggagggcatcatcctaaatgcacaaacacaaccatcgacgatcagattacaacttgtgttctaagtaagcctgctgatttgtttaagatctgccctaccttccagtattggcaactagtttccatgtaaggttatttagttatttctgaatatctgtaaatttttgttaagagtcattatcacagccactttgaatcattgtaggcttagaataatgtttaaccggaggactgccttcttcatgtcttatatatgtttgttgagttattgcatatctaagaacaggggcaaatttaggtccattatcagggtccactgaccagataaaatctacagatcctttagtaaaacaccagataaaatctacaaatcctttagtagaacactgttaagacttaggacttaagaaaatccatataattgttagagtggacacactaatcagttcaacctaaaagcttaaactgggataatctagtctatccacttatacacttcaacactctcactctcgtgcacccagagagagatgcaaaccagatagaagggcgcaaacgtggaaggaaataaatgggtggaggcacaaataaagtctctgtcaggattcgaacttgagacctctggctttgatacctagtgtggatgcattaaccagtttaacccaaaatcttaaactgatgaagaatatagtctatccacttataaacttaaacaataatcatgttcctagctagattcaaccatctaaggagccatggaatgatgtttgtttcctatcagatttttaaattagccacacaagtgaactaggttaagcactgaagctattctaatttctaactacagcactttgcttccttcttattttataaaattagagtatggtaagtgcagattcttggcaactctagttagggatggtaatgggctctaggttttatactataaagtttaaggatcgaattaggattgggatctatttctattcattttttaactaaaaataattaatggcttaatcgaattgtgaagagattgtgatctattaccacccctaagtctagtagatcttatgttcctatgtgcagacaatcttgtatcacaggattcagttcattcttttgcaccaaattgtaggctctcccttctgatgtccgacaagcattgctggaggtggtcaggtgctgtaggagacgagactacttggctgcagtggacaactatatcaagctagcgataggtaactcgccctggccaattggtgtgaccatggttggtattcatgagcgatcggctcgcgaaaagatctacacgaacagcgtggctcacatcatgaatgatgagacgaccagaaagtacctgcagtctgtgaagaggctcataacattctgccagaggaagtaccccactgatccatcaaggtcggtagagttcaacagcctggcaaatggtagcgatctgcagtctctcctggcgcagcaaaacgcgaagaattcagaagaaacgcttcgaatgtcaaacttctctctgtctcttgctataatggtcaaatggactattcaaactgccttagatgttagtgcgcgtggagtccgttcctgcgctggtggccgtcgagcggattccgttcctgcgctggatatggacagagagcagtggatgtatggaattgatcggtctgatatcaattatttccgtcatgtgcaagggttcataaaggtggctgaaaaacatcgattagataataaggcaacagctatcttatgtccttgtgtggactgtagaaactttgatccaattatcgactcacgtgtaatcctcggacacttgataatgcgtggttttacatctgggtacacatgctggacaaatcatggcgagtgttctattggtgataacaatggaaacactgagggtcctttagatactaatggcggtcctatggatactaatgaggcgaatgaccattatgtgcatatccaagatacaaaaagtcattttgcggacgcgacgattgttgatgtgcccgtcgatcatctggaatacatgatacatgatgttactgtaactcgtaatttgagtgaggctcaagcatcacaagatcaaatgagttctgagtcatcttctgatacatctgggtcatcaacttcaaaaacctctgggtccacaagtacctcatcttccactagcttgcattcagaggacattgtcgaaaaaggttcttgtacttctgccaggcatagaacgaaacgaggtcacgccaaatgcaagaagctagaaaaaggaggtccccgtcgtcttacgtttgataaaaatgggattgcccagtcaccggtaaaacatgtcaatgaattctcaagttattgtggttatatagcacgcatgcgtgttgatattaggataaaggattggcgaaaagtgcctacagtggtaaaatcaaacctatgggaggatgtttcaaagaaatttgtcatgccaagggatgaaacccataccctcaatgttaagaaggtcgctttgaaatctatgagccatgcatggaaggatttcaagtggaaactaaatataaattatgtcaagaaggacaaaactccatttgaggactatccagaactcaagaaagagtggtggccagactttgtggagtgggttacctctgatgagtatattgctctaggagaaaagggcaagcaaagccaaagcatgaataagttccgacaaaaactaggtcggcgaagctatactgtacaaaagagaaaatgggcaaaggaagatgcacaagcattaaccgagggtaaatctattccatttcaagacatgccagatggtcgtcataaggattgggcaagggcgaggaatccttctggcgatgtgaacataacagagtcgcatccaatcatacagaaaattgtagatctaaatgaaaagtcagtagctggtacctttacaccattggataatatggacatactagcaacagcaatagggagtaatcatccagggaggacaacaggggtgagtgcttatgtgggtttagggatgggtcttgctcaaggtgatggccctcgtaagaagaaacgtagaagaacgaaagagtatgtcaagaggattgtggatgagtacgaggccaagtttgagaaactgacagccctgtgtcacagtatggagcgtcgattaaacaattctgagagttgctcatcttcaaaatttgttgatacaccagaccatgcaacacatcattcagttgactcattacaagaggtgatgaaatgcaagttggtggtgcagataggtccgcaatctgttgtggtcgctagagggcaggcttaccctccaaaggatgttgtaaccgtccatgggattgagcggcgagatgaccacacaaaagtgcaggttgattttgtgtttgacaacttcttggaatttccactccctattcctatcgctggtggtgatatgttcactcttggcgaagccaaaaattcatttgtgttatggcctaagtcaggcatacaactagcagaggaaacaacagttcatgcaaagcctcaacaagtcccacacacatcgcctcaggtactccatcacacacctgaaaaggataaaatgccaacaccaacaatgggtaccgaggatatagatgtcacacatagtgcctccaatgttagtaagaagaggaaacataagcatagaaaacataacaaaagcaaagagaaggagcaaaaaacttcacaacagaaaaacatagaagatgatggtcttgatcccctttggactcccccctttcatcaacgatctccaccaccagttccaaataataaacaatttgtgctagggcagcctttagtatctagtgcattgcttaagaggatgggtaaacagagccagtgtttccacaaatggtattttgctatgaccacgccaatatctcgaaggcaaagtgccacacacttcatggtacgatacgaagaacatgattttcttgaaaaatctggggtctatgcagtagaattcagtgatgtatttcacatctacaatgatcttgcccttgacatatccttacatcggagttggatgctatgcatgaggaagatagacaaatacagaggcatagttggctttttagatccagagatgatcattttaaagagaatcaatgaagaggctgatgaagtcgaagcatacattgtgaaagcattgcttgctcagcaggacaaggagtgcatatttgttgtttgccaggaaggggcttttggtgcttatgtcgacaaaaaaggtcgccataacaagaattttggtcgcacagttatatggaaacattttcagggtcgtgctggttttgcaacctgtccattattgcctgatgagatagcaaatgtccgagaacggttgctcgacttcttcatgaatgaggtgatagacattggtggatcatgcagggttgaggttgtcatgagtggacatgttgcacccccaaagtcatcgaacttctttgttgaatttgggatgggcagtggatatcacaaaaaatatacatccagttcatccaaagtgcaggggatactttttacctacacttttgtacaacatatgctctacagaatccttcaagtagcaggaactgtcacaaaggcaatggcagtgacgccttcgggaatattctctgtcctggcgctaggatggctaggggatcatatctgtgtttcctccgttcaaatgtctcccaccttgctccaaagtgggctttccactgctgctgtgtggtgtagggtgccagatactgtatcatcccaataccagcctcttcacagaactccactatctctttgttcaggttcattgaatgtgcaatgctgccgtaacctgagagaaacggcgctgaagaaaggaaccccactagctagagagttggatgaaaaggttcgtgatgcacttcatctttacattgaagcccgcggcataaatgagaagctcttccgttttctccaagcttggctttatgtaaaggatcactgcaatcttgtacgctggttcaagagcgttggttcattgatcagtgaccaaagccaaagcaagatgacaaacactgtgacaagcatgaaccagtatattctttcattatcagatgacaaacaattggtccccgagctcatttctctaatagaacagggaactgatgttctgcgtgtgaaggcccttttgtttgttgctctgctttgcaagaatagtcgaaggtggcttcctcatttcttttgcaatgcaaaattaatatcagctgttgatagactgggaaaggagaaggagggttttattcatcattgtacagaagcatttgtgcagttggttgcttccttggtccctggtattcttgacactgtctccagcgatatacagcaggttatggttggcaaacgccatggacctgttactgctttagctgggcgagctcatccaaagagcacaattcatctgttccctcttattcttcatcttctgggaagtgcatccttcaagcatagagttgtgacaggccatgtattgcttcagttggcaaatcttattaagattttggaggcaccatttcaggtgctatttaagaaccttactgttgacataaaggatgtgaaaccaacgtccctgctcaaagatcgtctgcgtgaagtcgagggaaatccaaagctcggctcccttggtccacaactgcaatatagcaagtatgcctccaagtttctgaaaggattgttatatttcatttcgtatttaatctga

SEQ ID NO: 47912 - DNA, 727 bp, Zea Mays
atcctaaatgcacaaacacaaccatcgacgatcagattacaacttgtgttctaagctctcccttctgatgtccgacaagcattgctggaggtggtcaggtgctgtaggagacgagactacttggctgcagtggacaactatatcaagctagcgataggtaactcgccctggccaattggtgtgaccatggttggtattcatgagcgatcggctcgcgaaaagatctacacgaacagcgtggctcacatcatgaatgatgagacgaccagaaagtacctgcagtctgtgaagaggctcataacattctgccagaggaagtaccccactgatccatcaaggtcggtagagttcaacagcctggcaaatggtagcgatctgcagtctctcctggcgcagcaaaacgcgaagaattcagaagaaacgcttcggttagtggcagcgtcatgaaaggttggattatatctgtcagcggaattctaggaacctaatttaactggagcacagcatactgatactgtttgtggacatggtgacggttcacgaaatgtaactgttgagcaccatattgagcgggcggacggtccggcctgtccgcggtccggacagtccgtgcctgtgggccggacggtccgcgcatgcgcagagcagtttagggttccgagttttgtgctatgtttgttggctagatttgcggaattaatctggaatccagtcatgtaaagggtcc

SEQ ID NO: 47913 - DNA, 771 bp, Zea Mays
taatgcaagataaatcagaaactgattattcagcaaagagacgatacataacaattagatgtcacaaattattcagcaagagaatacattgaccaattttccacaacagacgacgatcatacagctgatgcatgcacaacacaaccagtgaccagagtgcccagccacactagcaaagctcaaacattaccttccagacagacttatcacttattcccctagcaaagtatattcacatctacgacctggagcggcgatgaacagacaccggaattcaactggagcggcgatgaacacacacgacgaacaccaggacatacgtaacacacactcggggggagaaagacgaaggacggaaggacggtcacccacacgtacaggaacacagcattccgcgacgaccctgctggctgctgatactgatagacacgcacgcgcgcatctatccataatccatgcatggatgacttgcttacgaggaagccctcccgcccagcgggaacagcgtcgccaccgtcagcgcctgcgacgccgtcggccccttgtcgtggagcatgcccttcacctgctcacccatcgggcgcccgcctcctccctgctgctgctgctgcccgtaggtggcgtgggcgccgccgtagatgccgctgcggtcacggtccgccattgctgccgtctcgttggctagcccctgcgagcgcggtgccgccggccggtgcagtgatcgatggatcgaggaggagctttgcaaacaaagtgacggagtagttaagt

SEQ ID NO: 47914 - DNA, 774 bp, Zea Mays
taatgcaagataaatcagaaactgattattcagcaaagagacgatacataacaattagatgtcacaaattattcagcaagagaatacattgaccaattttccacaacagacgacgatcatacagctgatgcatgcacaacacaaccagtgaccagagtgcccagccacactagcaaagctcaaacattaccttccagacagacttatcacttattcccctagcaaagtatattcacatctacgacctggagcggcgatgaacagacaccggaattcaactggagcggcgatgaacacacacgacgaacaccaggacatacgtaacacacactcggggggagaaagacgaaggacggaaggacggtcacccacacgtacaggaacacagcattccgcgacgaccctgctggctgctgatactgatagacacgcacgcgcgcatctatccataatccatgcatggatgacttgcttacgaggaagccctgcccccgcccagcgggaacagcgtcgccaccgtcagcgcctgcgacgccgtcggccccttgtcgtggagcatgcccttcacctgctcacccatcgggcgcccgcctcctccctgctgctgctgctgcccgtaggtggcgtgggcgccgccgtagatgccgctgcggtcacggtccgccattgctgccgtctcgttggctagcccctgcgagcgcggtgccgccggccggtgcagtgatcgatggatcgaggaggagctttgcaaacaaagtgacggagtagttaagt

SEQ ID NO: 47915 - DNA, 1094 bp, Zea Mays
ggggagagacgcgggcgcgtctggaataccgccggatggggcaaagcgagcgctgccatgccgtgctgcccgtgcagcttgcaggtggctgtgcgagcgcccggcctcccacgcactcctcccatccgaaaaccgaaatcccccactcttctcacccgtttccccactcgctcgctgacacatcgcacattcgcaccataccagataccaccgccgctgcacacaaacccagaaaccaccggcaataaacaactcccgctcccagtctccgatccgaggaagccggaagaggggatttcgagccgcggcgatcggggctagagtggccctcgacgcgtccgcgggtggaattgccgagaagccgagagagagggcttggagcggagttgcgggaggtgggagagaaggcggcgatggggcgcctgttcctgatgcacctggacggcaacgtctacagctgcaaacactgcaagacccacctcggcgttgccagcgacatcatctccaaggccttccagtgcaagcacggcaaggcgtacctcttccataaggttgtcaacgtgacttctggagtaaaagaagaccgcatgatgatcacaggaatgcatactgtttctgatatcttctgtgttggctgtggatccatagttgggtggaaatatgatgcggcacatgagaagggccagagatacaaggaaggcaagtttattctggagaggtacaaggtgtcgggccctgacggaagccaatactgggttccacaagatgctcacttgggcggaagcgacgccgatgacatataaaacacgatccaacaagctcaagcctgtcgttgatcccctgtaaataacctgggtggcgttgctctttaggcagccgacagccggggattgctccattgaaataattcgccggcgtaaattgttgctgttccaggtgacatgatcgtatccctccctccctcccgttgtccctggaagtcattagatgttaccgctgtatatgtgcgtaacctgtgttgcttataagtccatctgagttgtatgccaagcactagtgaccaaataagtaaagtaaatttctcaaaaaaaaaa

SEQ ID NO: 47916 - DNA, 697 bp, Zea Mays
gtatttctttcctctattattctcttctttttaggatgcgctggatatgctggagtgtcaacgtgacttctggagtaaaagaagaccgcatgatgatcacaggaatgcatactgtttctgatatcttctgtgttggctgtggatccatagttgggtggaaatatgatgcggcacatgagaagggccagagatacaaggaaggcaagtttattctggagaggtacaaggtgtcgggccctgacggaagccaatactgggttccacaagatgctcacttgggcggaagcgacgccgatgacatataaaacacgatccaacaagctcaagcctgtcgttgatcccctgtaaataacctgggtggcgttgctctttaggcagccgacagccggggattgctccattgaaataattcgccggcgtaaattgttgctgttccaggtgacatgatcgtatccctccctccctcccgttgtccctggaagtcattagatgttaccgctgtatatgtgcgtaacctgtgttgcttataagtccatctgagttgtatgccaagcactagtgaccaaataagtaaagtaaatttctcaagtgtctggtcgacctgggtgtcaagcgagggcagtatgtacaaatctgcattgtattgtgtgttcggttccaacgtcactcttaaataaccgaatagctgcacgcttgt

SEQ ID NO: 47917 - DNA, 1436 bp, Zea Mays
agcattagtccatattgttctgccttacatcgacatgtaattaaagtgctgttgaatggacctcaacacgtatgcttgcagttcatgttggatacaattctagacttttaatttacttccagataataacactgtccagactcaggtggtcagtgaacctttttagagttttcatcctacttttcctaaccaaaagttaagtcataatctactctcctggttgcttcatttctcatgccatattaatgtatcagtacttacctttctttgtcaagaaaggaaatgtcaatgtgcacataaaatgttttttttcctgttactgaactcagcacacttgttcctaattcaaagcttcatttggaagtaacgaatcattatcttccgtcacaaaccggttatgtacttaggttttcctggggagtgtctgtaactcagttctcatagaagcccaatctaaactaggagacagttaacataggcacgtaagcctgatctcaggcaaagctctccgcagattaccaaattcgctagtactcaattattatcagaccagagcttctggtgtggcagaaaacagatgtacccaataatgcagcttggacaatttgatgtattaccaataagaggtctaaatttggtagttggtgatttgataccaaaaacagttcattagccccaatgttatgcatttcactgtttggtccgtaggatttaaggtctggagatgagttgtatttcttacagtattctgtcggacagcagatgtatcattaactcatgtctgttatgcccagtgtcaacgtgacttctggagtaaaagaagaccgcatgatgatcacaggaatgcatactgtttctgatatcttctgtgttggctgtggatccatagttgggtggaaatatgatgcggcacatgagaagggccagagatacaaggaaggcaagtttattctggagaggtacaaggtgtcgggccctgacggaagccaatactgggttccacaagatgctcacttgggcggaagcgacgccgatgacatataaaacacgatccaacaagctcaagcctgtcgttgatcccctgtaaataacctgggtggcgttgctctttaggcagccgacagccggggattgctccattgaaataattcgccggcgtaaattgttgctgttccaggtgacatgatcgtatccctccctccctcccgttgtccctggaagtcattagatgttaccgctgtatatgtgcgtaacctgtgttgcttataagtccatctgagttgtatgccaagcactagtgaccaaataagtaaagtaaatttctcaagtgtctggtcgacctgggtgtcaagcgagggcagtatgtacaaatctgcattgtattgtgtgttcggttccaacgtcactcttaaataaccgaatagctgcacgcttgt

SEQ ID NO: 47918 - DNA, 3062 bp, Zea Mays
cccacatctccctccgtcccacttccccggctatagagttcagtttctctccccactttccccatttttaccgcacctctctctttctctctcctccggtcctccctcaaccccagcagcttcgtctcccctcccctctccccagaaatcggaactagatagatagatcagccctatctttgcctcctcccggacgactcggcgcaagttcttccgatccgacgagccccggtgatggacggcacgccgatctctgcgtcctctacggcaggcgtcgacgttggcgcggtggcgaccggcacgcccatgaagaatgcgatgacggcggccgctgtcaccgagatggcgaggcatctcacagtcgacacggaagacgccttcgcgggcctgctggagctcgccgctgacgacaacgcggaggggctgcgacgcgcgctggagcgcgcgccgcctgccgccgcggacgaggccggcctctggtacggccgccggaaggtcctggagcaccgcactccgctgatggtcgccgccacctacgggagccttgctgcgctccgcctgctggtgtccctctcgtctgtcgacgtcaaccgccgttcgggcacggatggcaccactgccctccactgcgccgcctctggtgggtcacggtcggcggttgaggccgtaaagctgctgctaggagcgggggcagacactgacaccacggatgacgctgggcgtcgtccggctgatgtgatctctgtgccaccgaagatgtttgatgctaaattcgcccttcaagatcttcttggattcccgaagtctgagcacggcatgcttcgggtggtgacaagggttgcgacatcagagaagaaggaatacccagtggatccatcccttccggacatcaagaacagcatctatgcttctgatgagttccgcatgtactcgttcaaggtccgcccttgctcacgggcatactctcatgactggactgagtgcccctttgtccacccaggagagaatgctcggcgccgagacccccgcaagtaccactacagttgtgtgccatgcccagatttcaggaagggtgtgtgccgtcgcggagacatgtgtgaatatgctcatggagtgtttgagtgctggctccatccagcacaataccggacacgcctatgcaaggatggcacaagctgtaaccgccgcgtctgtttctttgcccacacaactgatgaactccgcccattgtatgtctccactggatcagcggtgccatccccaagggcttcagcaacagctgctatggagatggctgcagcaatgggcttaatgcccggttccccatcatcggtttcagcggtgatgtccccatttacccctccaatgtccccttcgggcaatgggatgcccccttcattgggctggcagcagccaaatgttccaacattacaccttcctggcagcagccttcagtcaagcaggctccgaacgtcactcagtgcaagggatatgcctgctgatgactactccctgatgccggacttcgattcccaacttatgaatgatctatgctattcccgtctcggttcatccacagggaaccactctgcacggaccaagtccctgaatccatcaaacctggatgatctcttctctgccgaactggtatcatccccgaggtatagtaatggtgatcagggtgctatgttttcaccttctcacaaggctgctatcctgaatcagttccagcagcagcagcaagcactgctttctccaatcaacacaggagtttactctccaaaggctgtggacaacaagcagttaccttcacacccatctctgctgcatgcatcgcttgggatgccctcccctggccggatgtctccacgatgtgtcgaatcaggctccccgatgaactcccacctagctgctgctcttgcccagcgtgagaagcaacagcagacgatgagaagcctcagttctcgtgaccttgggcccagtgcggcacgagcttcagctctcggctcccctctaagcacatcatggtctaagtggggatctccttcaggggtaccagattggggcgtagatggtgaagaattgggtaagctccgccgctcatcgtcgttcgagctcaggtctggcggcgatgaccctgatctctcctgggtgcatacactggtcaaggaatctccgccagagaagcaagttactacgtccgaatcaattaattccgttggaccctcaccactaatgcctcccagcatgaacaacggcggcgaaggttctggcctgaacacccagctggatgggcgtgaccaagccgcggttttaggggcactgcttgaacagatgcagcttgatcagcagattggtagtctagcaacataggcgtgcaacgagcctggaaggtgtgagggtactatattcttatctactgaattccaagttcttttccccctgtcaattatggtattcaacaaagatggatagctgaaggtggtggctcagagattggtttttctttaattttggaggtaaatcatacgcattattgaggtcccagtaggttaaaagaatgaagttcctcgtctggggttgttccaaggccaacccaggtagaactgcaccccggcagcatcggtctcattgattgaagttctctgttttgttaattaacccctgttaagaaaaaaagaaggcgtgttcgccgtgtcggaattctttccttcctcccctagtgtttatttcaatatgatatcgatacctgatgtactactggtggtgtaagaggttgcttgggatcctatagtagttctgtcgagttccaaaagtttttttttttgcggttccaccctttaccattcgtcgtggattatcttgtggccttgtttttttttgttagaccttgaggcctgcgtaatcctcctggatgatatttgcaataatgtaatattgttttcgaacttgttgctgttgttccagtctcgccatttgtattcatctggactatatcctcgcctgtgtatctcgtgatatgctgaggtgtcgcacagacggttggtggagttcggttggga

SEQ ID NO: 47919 - DNA, 3195 bp, Zea Mays
cccacatctccctccgtcccacttccccggctatagagttcagtttctctccccactttccccatttttaccgcacctctctctttctctctcctccggtcctccctcaaccccagcagcttcgtctcccctcccctctccccagaaatcggaactagatagatagatcagccctatctttgcctcctcccggacgactcggcgcaaggtcgcagcttttctctcgatctttcgcgcttcctctttttgacgcttgctccgcatggggttcctggagatctttggggcggttcgctgctgagatggttcgccgcatcacgcgctgctgtgactctcaacagttcttccgatccgacgagccccggtgatggacggcacgccgatctctgcgtcctctacggcaggcgtcgacgttggcgcggtggcgaccggcacgcccatgaagaatgcgatgacggcggccgctgtcaccgagatggcgaggcatctcacagtcgacacggaagacgccttcgcgggcctgctggagctcgccgctgacgacaacgcggaggggctgcgacgcgcgctggagcgcgcgccgcctgccgccgcggacgaggccggcctctggtacggccgccggaaggtcctggagcaccgcactccgctgatggtcgccgccacctacgggagccttgctgcgctccgcctgctggtgtccctctcgtctgtcgacgtcaaccgccgttcgggcacggatggcaccactgccctccactgcgccgcctctggtgggtcacggtcggcggttgaggccgtaaagctgctgctaggagcgggggcagacactgacaccacggatgacgctgggcgtcgtccggctgatgtgatctctgtgccaccgaagatgtttgatgctaaattcgcccttcaagatcttcttggattcccgaagtctgagcacggcatgcttcgggtggtgacaagggttgcgacatcagagaagaaggaatacccagtggatccatcccttccggacatcaagaacagcatctatgcttctgatgagttccgcatgtactcgttcaaggtccgcccttgctcacgggcatactctcatgactggactgagtgcccctttgtccacccaggagagaatgctcggcgccgagacccccgcaagtaccactacagttgtgtgccatgcccagatttcaggaagggtgtgtgccgtcgcggagacatgtgtgaatatgctcatggagtgtttgagtgctggctccatccagcacaataccggacacgcctatgcaaggatggcacaagctgtaaccgccgcgtctgtttctttgcccacacaactgatgaactccgcccattgtatgtctccactggatcagcggtgccatccccaagggcttcagcaacagctgctatggagatggctgcagcaatgggcttaatgcccggttccccatcatcggtttcagcggtgatgtccccatttacccctccaatgtccccttcgggcaatgggatgcccccttcattgggctggcagcagccaaatgttccaacattacaccttcctggcagcagccttcagtcaagcaggctccgaacgtcactcagtgcaagggatatgcctgctgatgactactccctgatgccggacttcgattcccaacttatgaatgatctatgctattcccgtctcggttcatccacagggaaccactctgcacggaccaagtccctgaatccatcaaacctggatgatctcttctctgccgaactggtatcatccccgaggtatagtaatggtgatcagggtgctatgttttcaccttctcacaaggctgctatcctgaatcagttccagcagcagcagcaagcactgctttctccaatcaacacaggagtttactctccaaaggctgtggacaacaagcagttaccttcacacccatctctgctgcatgcatcgcttgggatgccctcccctggccggatgtctccacgatgtgtcgaatcaggctccccgatgaactcccacctagctgctgctcttgcccagcgtgagaagcaacagcagacgatgagaagcctcagttctcgtgaccttgggcccagtgcggcacgagcttcagctctcggctcccctctaagcacatcatggtctaagtggggatctccttcaggggtaccagattggggcgtagatggtgaagaattgggtaagctccgccgctcatcgtcgttcgagctcaggtctggcggcgatgaccctgatctctcctgggtgcatacactggtcaaggaatctccgccagagaagcaagttactacgtccgaatcaattaattccgttggaccctcaccactaatgcctcccagcatgaacaacggcggcgaaggttctggcctgaacacccagctggatgggcgtgaccaagccgcggttttaggggcactgcttgaacagatgcagcttgatcagcagattggtagtctagcaacataggcgtgcaacgagcctggaaggtgtgagggtactatattcttatctactgaattccaagttcttttccccctgtcaattatggtattcaacaaagatggatagctgaaggtggtggctcagagattggtttttctttaattttggaggtaaatcatacgcattattgaggtcccagtaggttaaaagaatgaagttcctcgtctggggttgttccaaggccaacccaggtagaactgcaccccggcagcatcggtctcattgattgaagttctctgttttgttaattaacccctgttaagaaaaaaagaaggcgtgttcgccgtgtcggaattctttccttcctcccctagtgtttatttcaatatgatatcgatacctgatgtactactggtggtgtaagaggttgcttgggatcctatagtagttctgtcgagttccaaaagtttttttttttgcggttccaccctttaccattcgtcgtggattatcttgtggccttgtttttttttgttagaccttgaggcctgcgtaatcctcctggatgatatttgcaataatgtaatattgttttcgaacttgttgctgttgttccagtctcgccatttgtattcatctggactatatcctcgcctgtgtatctcgtgatatgctgaggtgtcgcacagacggttggtggagttcggttggga

SEQ ID NO: 47920 - DNA, 909 bp, Zea Mays
tttcctttccctccctcagcccgcgcctgtgcccatatctctctgactgtcatggcgacgcggcggcgcctctctccgactttcttcggcgggctccgggcccgtgagctcggcggcgccagtgtctcctcccgcgccacggcggggctcccgtatctcgctgacctctcctccgaccccggcggccgcggcggcggggtcatagccgtcgagcactccggcgatcccgccatccccttcgccatctccttcggcaagactgcacagacctgtaacctcttggcggtcgccgacgaagacgggtacgttggcctctacgacacccgccggcgcctcccttccgcctcctcgtcactagagaagtcagctgaaacgagggtgtgcgactgggttgctcacaacaatgcagtctttgacgtgtgctggatcaaggagggatcccaaatactgactgcatccggcgatcaaactgtcaaaatatggagtgtaggaaacaggaaatgcattggtgtcttgtcagggcatactgggagcgtgaagtcgctgtcttgtcattcttccaatcctgagctcattgtttccggttcaagggatggttcatttgctctttgggatttaagatgtgaccctaaatctccaaacagccatggtgaaacgtgtctcacgtcttctgctgttgtcagagaagcccacagtcccatactaaggagccgaacacggtctcgagcaaaggcggcttcaacaagtatcacatcagttctttatctgaaagatggtgtctccattgctacttctggagctgcagacaatgttgtgaaaatatgggatacacgaaacctgaaagtgccgttctccaacaaaaactctcaagcaggggcccaacctttgctcaaatctggacaatctctg

SEQ ID NO: 47921 - DNA, 2014 bp, Zea Mays
ctattgtcctagccagcaaatcaacacttatttgtgtagtccagggaattgcagtcgtgcctgccatgactgctactcatgaaaacgtagctttaatctcttcatttctttctttcttcaaacgacataaagcggcttacttccattattcttctggaaaacgcattactgcacacactataaattagtatgcatttggtaagaaatgcaaatatctgctttgacacaaaacaaggcatcaattgctttaggttcagttcttaaaaccggagaagatgggtttcctccggactggtgcgttgttcacttgtcatctgccattcccgttgaggcaaactgtcatacaaaaaaatccaaaaaggccattgtttcttgtatttcttacaattacgaagacatcgatgccttcctttgggaattgtagtaataatctatttgagcttcaaaacaaaaatagtggcctagtaactaaggcatgggcgcatggcaatttaagtcaaaggtgtgttggtcatatgcagactaaggctgtctccagcaacgtcccctaaattccatcctctaaaagaatattctctgtcctttacagcacactctaaaagattccgtcctctatatcttatcagtctccagcaacgtcctctaaatttggtcctctatatctacaatgctaccagatttcattatttatattgtttttacctatcgcttttataaaaagaatattttttgtacatcacaaaattgaaatacttattacaatatattttcattttatggagaaattactcatcattcatatatagcaaaacaatgtatcacaaatttgtattatatattttccttcttgtatacgcaaacaaaaaaccgttagtctctaccaaaattaaaaaagtttgactaagctattcgcaactgcattatgcaacaatccagcatcggacaccatttttttaacacaatatgcatgcatgcaacgtgggtaagtcaatcaacattggtcgtcacgtacacaagtgtcaggttgtagcgctttgattgcgggatagaggacgaacagtgtttctctacatatagcggctgaagcagagactctaaattttagagtgtcttttagggttccttgttgggtggataaaggagcacaatatcctctaaatttagagtacaggttgttttacagttcgttgctggagagagtctaagtaagcgcacactttgtctttttgacgtattaattttcctcctatcctattcatataggacctacaaattttagccacctgcttgtttttttccatggaggattttctcaagagtacatcaattttttgctaatatttccaacatatcaatttggtaataatgattttacacatatataccagttcactgaatatatgcactacacttgaaatatatcaggtcactgaatatatgcactgaaatatcaattcattgaatatatgtgctacacttcaaatatagttcactgaatatatacactacattttaatacaattttttaagccttgctgtgttctaatgtcatcacaatcggacttgtgaaatgtttccgttttctgtttggtggaaagggggccatcacattgccattactaaattgaacataaaaaatcaacaagaatgactaagattttagattgttacaagaccagctaccctttttgatgtacaacatcccatcacttaaaacaacacattagacatatttgttgtggcagcagcaactgagactctggttgtaacctggtatgatactagtggcaattgttctagatatgttgctgatataagtacaagaaagcatcagttgtacaaccaaccaaccaaccaactaaaccacttagaaacatggtgaaataacagccaactaagcatcacttgttttactaatagctatgctataacattgttttaataacacctatactactaacattgtttttactaacacctatgcattcctttgtgcaaaataatattttttctt

SEQ ID NO: 47922 - DNA, 2030 bp, Zea Mays
gcgcgagtacacgaatcccgtcggcaaggccgcgaggcaacaaagcagacctcccgtcccgatccccccaaactgtttggatttcggaccggacgcgtttctgaacttcttgcgccggaagaaagagaaaccgagaagaggagtcgcggctcccgacatatgtggcggcgggcggcgacagcggcgctgtcgctgggcgccggtgccggcgcggtctcgatcgccacctccgaggaccccgccgcgacgttcaaggtctgcgcgcacctgcctccgcgcctcctccgcgactctgtcacggccgccaccatcgcgtttgactacaagtggtccctctggggcctcgagccgggcacccccgtgtggcagagcgccaagcaccatgcccacctccgttccgccaaccgactccaggagctctgcttccgcaacggtggcatctacatcaagctcggccagcacatcgctcagctggagtatgtcgtgccggaggagtatgtgcaaacaatgagggaatccatgctgaagaggtgcccggtctcatcgtacgagcaggtccgcggggtgtttaccaaggatctcggtgaatcgccagaaactgtttttgcagaatttgatcctgctccatttgcaagtgcttcccttgcacaagtccatgttgcccgaacgcacgatgggcaaaaagttgctgttaaggttcaacatgaccacctcacaaatactggtgttgtagatatagccactgtggatttgttagtgaatgctctgcattatattttccctacatttgactacaggtggttagttgatgaagttcgagaaagtgcccctaaggaattggatttcttgaatgaagccaaaaacagcgaaagatgtttgaataactttagaaagctgtctcctcagattgctggtagcatatatgcccccaaggtttattggaatctcagcacatctagaattctcaccatggagtttatggatgccaaggaggtaactgatgttagtggcattaaatcaattggagttcaccctgttgatgtttcaaacctagtcagtaaagcatttgctgagatgattttcaagcatggctttgttcattgtgatccccatgctgccaatatgatggtccgaccaatgccacaagacagcagaaaactttttggccacagctggttcttcttgaccacggcctctacaaagagcttgattataatactaggataagctacgcttctctttggaaggcacttgtttttgctgatgcaaaagcaattaaggagaacagtgccaaactgggtgctggggaggatcttcatgcactctttgctggtgttctcactatgagaccatggaaaagggtgattgacccatctcctgatcatcttgtactaggaaaaaatactgattattcagaattacagaattacgcctccttatattttactgagatctccgagctactgaggagattaccaagggttatattgttgatgcttaaaacaaatgactgtttacgtgcagtcagtcatgccctggttgggggcagttccttggagtcgtttatgattattggacgggtatcttctgaagctgtgctggatgctaaaaggatgaacaggaggtcctttctcgatggattgaagatatggctggaggaagccctgctggaagctcgattctttactttgaagctgatgctatgtgttatgcaacttaggaagttgttgcctggctaaaagcagttaggcgtatcagcagcctttttgaccggtagaactgcggagttgacatctagttccatatattttcttgagggcgaaacttgacattttgcttagaagattgcctttcttttcgtatacataattcttctgtcgatcattttctcaccatgagtggccatttttcatggtcgatacttgataccttcattgggtgaatacaagtatacaaactgctgacgtggacaaatgtaagagcaaaactgttttctttttggaagggaatcaacattgacgtgtagcaaa

SEQ ID NO: 47923 - DNA, 1913 bp, Zea Mays
cgcgagtacacgaatcccgtcggcaaggccgcgaggcaacaaagcagacctcccgtcccgatccccccaaactgtttggatttcggaccggacgcgtttctgaacttcttgcgccggaagaaagagaaaccgagaagaggagtcgcggctcccgacatatgtggcggcgggcggcgacagcggcgctgtcgctgggcgccggtgccggcgcggtctcgatcgccacctccgaggaccccgccgcgacgttcaaggtctgcgcgcacctgcctccgcgcctcctccgcgactctgtcacggccgccaccatcgcgtttgactacaagtggtccctctggggcctcgagccgggcacccccgtgtggcagagcgccaagcaccatgcccacctccgttccgccaaccgactccaggagctctgcttccgcaacggtggcatctacatcaagctcggccagcacatcgctcagctggtttttgcagaatttgatcctgctccatttgcaagtgcttcccttgcacaagtccatgttgcccgaacgcacgatgggcaaaaagttgctgttaaggttcaacatgaccacctcacaaatactggtgttgtagatatagccactgtggatttgttagtgaatgctctgcattatattttccctacatttgactacaggtggttagttgatgaagttcgagaaagtgcccctaaggaattggatttcttgaatgaagccaaaaacagcgaaagatgtttgaataactttagaaagctgtctcctcagattgctggtagcatatatgcccccaaggtttattggaatctcagcacatctagaattctcaccatggagtttatggatgccaaggaggtaactgatgttagtggcattaaatcaattggagttcaccctgttgatgtttcaaacctagtcagtaaagcatttgctgagatgattttcaagcatggctttgttcattgtgatccccatgctgccaatatgatggtccgaccaatgccacaagacagcagaaaactttttggatggaaaaggccacagctggttcttcttgaccacggcctctacaaagagcttgattataatactaggataagctacgcttctctttggaaggcacttgtttttgctgatgcaaaagcaattaaggagaacagtgccaaactgggtgctggggaggatcttcatgcactctttgctggtgttctcactatgagaccatggaaaagggtgattgacccatctcctgatcatcttgtactaggaaaaaatactgattattcagaattacagaattacgcctccttatattttactgagatctccgagctactgaggagattaccaagggttatattgttgatgcttaaaacaaatgactgtttacgtgcagtcagtcatgccctggttgggggcagttccttggagtcgtttatgattattggacgggtatcttctgaagctgtgctggatgctaaaaggatgaacaggaggtcctttctcgatggattgaagatatggctggaggaagccctgctggaagctcgattctttactttgaagctgatgctatgtgttatgcaacttaggaagttgttgcctggctaaaagcagttaggcgtatcagcagcctttttgaccggtagaactgcggagttgacatctagttccatatattttcttgagggcgaaacttgacattttgcttagaagattgcctttcttttcgtatacataattcttctgtcgatcattttctcaccatgagtggccatttttcatggtcgatacttgataccttcattgggtgaatacaagtatacaaactgctgacgtggacaaatgtaagagcaaaactgttttctttttggaagggaatcaacattgacgtgtagcaaa

SEQ ID NO: 47924 - DNA, 2015 bp, Zea Mays
gtttggatttcggaccggacgcgtttctgaacttcttgcgccggaagaaagagaaaccgagaagaggagtcgcggctcccgacatatgtggcggcgggcggcgacagcggcgctgtcgctgggcgccggtgccggcgcggtctcgatcgccacctccgaggaccccgccgcgacgttcaaggtctgcgcgcacctgcctccgcgcctcctccgcgactctgtcacggccgccaccatcgcgtttgactacaagtggtccctctggggcctcgagccgggcacccccgtgtggcagagcgccaagcaccatgcccacctccgttccgccaaccgactccaggagctctgcttccgcaacggtggcatctacatcaagctcggccagcacatcgctcagctggagtatgtcgtgccggaggagtatgtgcaaacaatgagggaatccatgctgaagaggtgcccggtctcatcgtacgagcaggtccgcggggtgtttaccaaggatctcggtgaatcgccagaaactgtttttgcagaatttgatcctgctccatttgcaagtgcttcccttgcacaagtccatgttgcccgaacgcacgatgggcaaaaagttgctgttaaggttcaacatgaccacctcacaaatactggtgttgtagatatagccactgtggatttgttagtgaatgctctgcattatattttccctacatttgactacagtgctcttgaatggttcgcctcgtaaccatatttcttaccggagaggtcttcggcagggagatcctttatctcccatattatttgtgttggttatggatgttcttagcagcatttagcgctgctgaaaaatagaggactgctgcaaagcctgggaggagctgctgtccgtagtagagtttccatttatgcggatgatgtggtcctttttatcaaaccaattgaagaagatctgaattgtgctaaaatgatattgaattgctttggttcagcctctggtctggtaacaaatatgcacaagagctgtgccattccaataagatgtgatggtcaagttgtgcaggctggatgcagtatgttgcaatgcagtcccacttcttttccttgcaagtatttggggctgcccatctctgataagaaattgaggaagactgatcttatgctgtggattgagaagattgcagatcgcctccctaattggaaggctcggcacctcaatctggctggacggacaacattggtgaagtttgttctttcagccataccaatctatcttcttattgctataaatatcccttagtgggtgattaaatcaattgacaaaattcaacgggggtttctttggaaagggagaaaagaggttactagtggaagttgtcttgtatcctgggaaataattacgaggcctctaagctatggtggtcttggtgtccctaacttgcaatttaaaagctgggctttacagtcaaaatggttatggctggaaaagacggacccgaacaggccctggcatgggatgtccctcccagtgcagcggcaggttagacagttctttgagttgtctgtgtttaccgtgataggaaatggggctactactctcttctggtcggatagatgggtgtatgggaatactatccatgacattgcccctgatgtggtacagatggttggtcgtagggccttttcttccagaactgtggcacaggctctagataactggcaatgggtcagcgacattgaaaaccctctttctttaaaagggataaaacaatatttgttgttatgggatactttgagaggggttttgctttctcaagatactgataagtatgtatggatgcacacttcttctggcagttctcttcaaaatcttgctataaggcattttcatgggatccatttcctttgagccatggaaacgattgtggaagacttgggctcccccaaaatgtaagttctttttgtggttggcaataaggaactagtgttggactgctgatagacttagaaggagg

SEQ ID NO: 47925 - DNA, 1854 bp, Zea Mays
gtttggatttcggaccggacgcgtttctgaacttcttgcgccggaagaaagagaaaccgagaagaggagtcgcggctcccgacatatgtggcggcgggcggcgacagcggcgctgtcgctgggcgccggtgccggcgcggtctcgatcgccacctccgaggaccccgccgcgacgttcaaggtctgcgcgcacctgcctccgcgcctcctccgcgactctgtcacggccgccaccatcgcgtttgactacaagtggtccctctggggcctcgagccgggcacccccgtgtggcagagcgccaagcaccatgcccacctccgttccgccaaccgactccaggagctctgcttccgcaacggtggcatctacatcaagctcggccagcacatcgctcagctggagtatgtcgtgccggaggagtatgtgcaaacaatgagggaatccatgctgaagaggtgcccggtctcatcgtacgagcaggtccgcggggtgtttaccaaggatctcggtgaatcgccagaaactgtttttgcagaatttgatcctgctccatttgcaagtgcttcccttgcacaagtccatgttgcccgaacgcacgatgggcaaaaagttgctgttaaggttcaacatgaccacctcacaaatactggtgttgtagatatagccactgtggatttgttagtgaatgctctgcattatattttccctacatttgactacaggtggttagttgatgaagttcgagaaagtgcccctaaggaattggatttcttgaatgaagccaaaaacagcgaaagatgtttgaataactttagaaagctgtctcctcagattgctggtagcatatatgcccccaaggtttattggaatctcagcacatctagaattctcaccatggagtttatggatgccaaggaggtaactgatgttagtggcattaaatcaattggagttcaccctgttgatgtttcaaacctagatggaaaaggccacagctggttcttcttgaccacggcctctacaaagagcttgattataatactaggataagctacgcttctctttggaaggcacttgtttttgctgatgcaaaagcaattaaggagaacagtgccaaactgggtgctggggaggatcttcatgcactctttgctggtgttctcactatgagaccatggaaaagggtgattgacccatctcctgatcatcttgtactaggaaaaaatactgattattcagaattacagaattacgcctccttatattttactgagatctccgagctactgaggagattaccaagggttatattgttgatgcttaaaacaaatgactgtttacgtgcagtcagtcatgccctggttgggggcagttccttggagtcgtttatgattattggacgggtatcttctgaagctgtgctggatgctaaaaggatgaacaggaggtcctttctcgatggattgaagatatggctggaggaagccctgctggaagctcgattctttactttgaagctgatgctatgtgttatgcaacttaggaagttgttgcctggctaaaagcagttaggcgtatcagcagcctttttgaccggtagaactgcggagttgacatctagttccatatattttcttgagggcgaaacttgacattttgcttagaagattgcctttcttttcgtatacataattcttctgtcgatcattttctcaccatgagtggccatttttcatggtcgatacttgataccttcattgggtgaatacaagtatacaaactgctgacgtggacaaatgtaagagcaaaactgttttctttttggaagggaatcaacattgacgtgtagcaaa

SEQ ID NO: 47926 - DNA, 1977 bp, Zea Mays
gtttggatttcggaccggacgcgtttctgaacttcttgcgccggaagaaagagaaaccgagaagaggagtcgcggctcccgacatatgtggcggcgggcggcgacagcggcgctgtcgctgggcgccggtgccggcgcggtctcgatcgccacctccgaggaccccgccgcgacgttcaaggtctgcgcgcacctgcctccgcgcctcctccgcgactctgtcacggccgccaccatcgcgtttgactacaagtggtccctctggggcctcgagccgggcacccccgtgtggcagagcgccaagcaccatgcccacctccgttccgccaaccgactccaggagctctgcttccgcaacggtggcatctacatcaagctcggccagcacatcgctcagctggagtatgtcgtgccggaggagtatgtgcaaacaatgagggaatccatgctgaagaggtgcccggtctcatcgtacgagcaggtccgcggggtgtttaccaaggatctcggtgaatcgccagaaactgtttttgcagaatttgatcctgctccatttgcaagtgcttcccttgcacaagtccatgttgcccgaacgcacgatgggcaaaaagttgctgttaaggttgcacaacattgtggttcaacatgaccacctcacaaatactggtgttgtagatatagccactgtggatttgttagtgaatgctctgcattatattttccctacatttgactacaggtggttagttgatgaagttcgagaaagtgcccctaaggaattggatttcttgaatgaagccaaaaacagcgaaagatgtttgaataactttagaaagctgtctcctcagattgctggtagcatatatgcccccaaggtttattggaatctcagcacatctagaattctcaccatggagtttatggatgccaaggaggtaactgatgttagtggcattaaatcaattggagttcaccctgttgatgtttcaaacctataaagcatttgctgagatgattttcaagcatggctttgttcattgtgatccccatgctgccaatatgatggtccgaccaatgccacaagacagcagaaaactttttggatggaaaaggccacagctggttcttcttgaccacggcctctacaaagagcttgattataatactaggataagctacgcttctctttggaaggcacttgtttttgctgatgcaaaagcaattaaggagaacagtgccaaactgggtgctggggaggatcttcatgcactctttgctggtgttctcactatgagaccatggaaaagggtgattgacccatctcctgatcatcttgtactaggaaaaaatactgattattcagaattacagaattacgcctccttatattttactgagatctccgagctactgaggagattaccaagggttatattgttgatgcttaaaacaaatgactgtttacgtgcagtcagtcatgccctggttgggggcagttccttggagtcgtttatgattattggacgggtatcttctgaagctgtgctggatgctaaaaggatgaacaggaggtcctttctcgatggattgaagatatggctggaggaagccctgctggaagctcgattctttactttgaagctgatgctatgtgttatgcaacttaggaagttgttgcctggctaaaagcagttaggcgtatcagcagcctttttgaccggtagaactgcggagttgacatctagttccatatattttcttgagggcgaaacttgacattttgcttagaagattgcctttcttttcgtatacataattcttctgtcgatcattttctcaccatgagtggccatttttcatggtcgatacttgataccttcattgggtgaatacaagtatacaaactgctgacgtggacaaatgtaagagcaaaactgttttctttttggaagggaatcaacattgacgtgtagcaaa

SEQ ID NO: 47927 - DNA, 1894 bp, Zea Mays
gtttggatttcggaccggacgcgtttctgaacttcttgcgccggaagaaagagaaaccgagaagaggagtcgcggctcccgacatatgtggcggcgggcggcgacagcggcgctgtcgctgggcgccggtgccggcgcggtctcgatcgccacctccgaggaccccgccgcgacgttcaaggtctgcgcgcacctgcctccgcgcctcctccgcgactctgtcacggccgccaccatcgcgtttgactacaagtggtccctctggggcctcgagccgggcacccccgtgtggcagagcgccaagcaccatgcccacctccgttccgccaaccgactccaggagctctgcttccgcaacggtggcatctacatcaagctcggccagcacatcgctcagctggagtatgtcgtgccggaggagtatgtgcaaacaatgagggaatccatgctgaagaggtgcccggtctcatcgtacgagcaggtccgcggggtgtttaccaaggatctcggtgaatcgccagaaactgtttttgcagaatttgatcctgctccatttgcaagtgcttcccttgcacaagtccatgttgcccgaacgcacgatgggcaaaaagttgctgttaaggttcaacatgaccacctcacaaatactggtgttgtagatatagccactgtggatttgttagtgaatgctctgcattatattttccctacatttgactacaggtggttagttgatgaagttcgagaaagtgcccctaagattgctggtagcatatatgcccccaaggtttattggaatctcagcacatctagaattctcaccatggagtttatggatgccaaggaggtaactgatgttagtggcattaaatcaattggagttcaccctgttgatgtttcaaacctagtcagtaaagcatttgctgagatgattttcaagcatggctttgttcattgtgatccccatgctgccaatatgatggtccgaccaatgccacaagacagcagaaaactttttggatggaaaaggccacagctggttcttcttgaccacggcctctacaaagagcttgattataatactaggataagctacgcttctctttggaaggcacttgtttttgctgatgcaaaagcaattaaggagaacagtgccaaactgggtgctggggaggatcttcatgcactctttgctggtgttctcactatgagaccatggaaaagggtgattgacccatctcctgatcatcttgtactaggaaaaaatactgattattcagaattacagaattacgcctccttatattttactgagatctccgagctactgaggagattaccaagggttatattgttgatgcttaaaacaaatgactgtttacgtgcagtcagtcatgccctggttgggggcagttccttggagtcgtttatgattattggacgggtatcttctgaagctgtgctggatgctaaaaggatgaacaggaggtcctttctcgatggattgaagatatggctggaggaagccctgctggaagctcgattctttactttgaagctgatgctatgtgttatgcaacttaggaagttgttgcctggctaaaagcagttaggcgtatcagcagcctttttgaccggtagaactgcggagttgacatctagttccatatattttcttgagggcgaaacttgacattttgcttagaagattgcctttcttttcgtatacataattcttctgtcgatcattttctcaccatgagtggccatttttcatggtcgatacttgataccttcattgggtgaatacaagtatacaaactgctgacgtggacaaatgtaagagcaaaactgttttctttttggaagggaatcaacattgacgtgtagcaaa

SEQ ID NO: 47928 - DNA, 2249 bp, Zea Mays
gtttggatttcggaccggacgcgtttctgaacttcttgcgccggaagaaagagaaaccgagaagaggagtcgcggctcccgacatatgtggcggcgggcggcgacagcggcgctgtcgctgggcgccggtgccggcgcggtctcgatcgccacctccgaggaccccgccgcgacgttcaaggtctgcgcgcacctgcctccgcgcctcctccgcgactctgtcacggccgccaccatcgcgtttgactacaagtggtccctctggggcctcgagccgggcacccccgtgtggcagagcgccaagcaccatgcccacctccgttccgccaaccgactccaggagctctgcttccgcaacggtggcatctacatcaagctcggccagcacatcgctcagctggagtatgtcgtgccggaggagtatgtgcaaacaatgagggaatccatgctgaagaggtgcccggtctcatcgtacgagcaggtccgcggggtgtttaccaaggatctcggtgaatcgccagaaactgtttttgcagaatttgatcctgctccatttgcaagtgcttcccttgcacaagtccatgttgcccgaacgcacgatgggcaaaaagttgctgttaaggttcaacatgaccacctcacaaatactggtgttgtagatatagccactgtggatttgttagtgaatgctctgcattatattttccctacatttgactacaggtggttagttgatgaagttcgagaaagtgcccctaaggtaccttcctagtcttgcctggaaatataagttctttgtgattgagtaatggattttgttttctttttgtttgttacaaaatgagttaaccttttgttctcacatgtcataactgttgtctattaatggctatgattgtcccctgttaaaactaagttttgtgctaatcaatattctttacaatagtatcatcattccaatcttgaatttttatgcaatttagggggaacaaatataataataagaaaaaatggagctggtgctaacttgttgtgattctcaggaattggatttcttgaatgaagccaaaaacagcgaaagatgtttgaataactttagaaagctgtctcctcagattgctggtagcatatatgcccccaaggtttattggaatctcagcacatctagaattctcaccatggagtttatggatgccaaggaggtaactgatgttagtggcattaaatcaattggagttcaccctgttgatgtttcaaacctagtcagtaaagcatttgctgagatgattttcaagcatggctttgttcattgtgatccccatgctgccaatatgatggtccgaccaatgccacaagacagcagaaaactttttggatggaaaaggccacagctggttcttcttgaccacggcctctacaaagagcttgattataatactaggataagctacgcttctctttggaaggcacttgtttttgctgatgcaaaagcaattaaggagaacagtgccaaactgggtgctggggaggatcttcatgcactctttgctggtgttctcactatgagaccatggaaaagggtgattgacccatctcctgatcatcttgtactaggaaaaaatactgattattcagaattacagaattacgcctccttatattttactgagatctccgagctactgaggagattaccaagggttatattgttgatgcttaaaacaaatgactgtttacgtgcagtcagtcatgccctggttgggggcagttccttggagtcgtttatgattattggacgggtatcttctgaagctgtgctggatgctaaaaggatgaacaggaggtcctttctcgatggattgaagatatggctggaggaagccctgctggaagctcgattctttactttgaagctgatgctatgtgttatgcaacttaggaagttgttgcctggctaaaagcagttaggcgtatcagcagcctttttgaccggtagaactgcggagttgacatctagttccatatattttcttgagggcgaaacttgacattttgcttagaagattgcctttcttttcgtatacataattcttctgtcgatcattttctcaccatgagtggccatttttcatggtcgatacttgataccttcattgggtgaatacaagtatacaaactgctgacgtggacaaatgtaagagcaaaactgttttctttttggaagggaatcaacattgacgtgtagcaaa

SEQ ID NO: 47929 - DNA, 2424 bp, Zea Mays
aaacaatccaacatcttctatgcacttgcagttttgccaggcagttttggcatgatatccttttgccattgagataaggatatcttttgctgagtggtggcgaaaggtgcataaaaaggtgcacaagaccaaaagaaaaggcttcaatagcctcataattttgggggcgtggtgcttatggcttcttcgaaacaaggctatttttgatggagtaaacccttcctttgagctctgttaaaagtttgtttttagatgagctgagttgctgggatatggctggtgctaaacagctaccaagtcttggcctagttgctgctattagtagggtctaggctgtttttcaatttggtctagttttatgcttgcccactggtcattgtactttggtcctctttggacctttttcctctcttaatataatgatgcgcagctctcctgcgcgtccgagaaaaaaaagataaagcacaccctagaggattgtcttcattgttagtcaaaacttcaaacaaggtggcaaatttcctgaattttcgtagatttacaactttaattatcaaattgaaattgaaattttgtctccaagctcccaggttttccagtcatcacacaattgaggacatgtttgttgttcttcataaagggtgttatgtaatttttaaattagagtaaatattccagattggatgatgatatgttttactatttatgtagttcctaataaatacacatattcatctgattcttaaggtagtcagttatatttcgtgatcttacattaatcttgatatctatttgtagcaaaagttggttcttaccatcaaaagtgttaggagaatgaaaccctaactctaatgcgggttaggaatatattaatataactgagtatgtaggccaaggcccattataggagagaaatacatagttacgctaacacccccctgcagtcggtgttagggagatttgttcctttgtttttgtgcacgggaaaaatcgggacatggtaaaaagtggagcggccaaaaaaaatctgaaaccagcagccagattgctggaaacagagaaaatcataaatagctgtaacgttgttaccttttgatggtaaatatctaaaaccgattcttttgatggtatatatctaaaaatgtgttcttttgatggtaaggatccaatttcccccaatgttgtaatagttgggcctagctttttgttgcattgcctgattcacatgcatgactcgtaacataatgttatgtcattgtgactgtgaatccttgattgcaatgctacttgtttagttttcacggcattcacgcgttcattttacattattgccaagttactgcttccatgcaggtggttagttgatgaagttcgagaaagtgcccctaaggaattggatttcttgaatgaagccaaaaacagcgaaagatgtttgaataactttagaaagctgtctcctcagattgctggtagcatatatgcccccaaggtttattggaatctcagcacatctagaattctcaccatggagtttatggatgccaaggaggatggaaaaggccacagctggttcttcttgaccacggcctctacaaagagcttgattataatactaggataagctacgcttctctttggaaggcacttgtttttgctgatgcaaaagcaattaaggagaacagtgccaaactgggtgctggggaggatcttcatgcactctttgctggtgttctcactatgagaccatggaaaagggtgattgacccatctcctgatcatcttgtactaggaaaaaatactgattattcagaattacagaattacgcctccttatattttactgagatctccgagctactgaggagattaccaagggttatattgttgatgcttaaaacaaatgactgtttacgtgcagtcagtcatgccctggttgggggcagttccttggagtcgtttatgattattggacgggtatcttctgaagctgtgctggatgctaaaaggatgaacaggaggtcctttctcgatggattgaagatatggctggaggaagccctgctggaagctcgattctttactttgaagctgatgctatgtgttatgcaacttaggaagttgttgcctggctaaaagcagttaggcgtatcagcagcctttttgaccggtagaactgcggagttgacatctagttccatatattttcttgagggcgaaacttgacattttgcttagaagattgcctttcttttcgtatacataattcttctgtcgatcattttctcaccatgagtggccatttttcatggtcgatacttgataccttcattgggtgaatacaagtatacaaactgctgacgtggacaaatgtaagagcaaaactgttttctttttggaagggaatcaacattgacgtgtagcaaa

SEQ ID NO: 47930 - DNA, 1361 bp, Zea Mays
aaacaatccaacatcttctatgcacttgcagttttgccaggcagttttggcatgatatccttttgccattgagataaggatatcttttgctgagtggtggcgaaaggtgcataaaaaggtggttagttgatgaagttcgagaaagtgcccctaaggaattggatttcttgaatgaagccaaaaacagcgaaagatgtttgaataactttagaaagctgtctcctcagattgctggtagcatatatgcccccaaggtttattggaatctcagcacatctagaattctcaccatggagtttatggatgccaaggaggtaactgatgttagtggcattaaatcaattggagttcaccctgttgatgtttcaaacctagtcagtaaagcatttgctgagatgattttcaagcatggctttgttcattgtgatccccatgctgccaatatgatggtccgaccaatgccacaagacagcagaaaactttttggatggaaaaggccacagctggttcttcttgaccacggcctctacaaagagcttgattataatactaggataagctacgcttctctttggaaggcacttgtttttgctgatgcaaaagcaattaaggagaacagtgccaaactgggtgctggggaggatcttcatgcactctttgctggtgttctcactatgagaccatggaaaagggtgattgacccatctcctgatcatcttgtactaggaaaaaatactgattattcagaattacagaattacgcctccttatattttactgagatctccgagctactgaggagattaccaagggttatattgttgatgcttaaaacaaatgactgtttacgtgcagtcagtcatgccctggttgggggcagttccttggagtcgtttatgattattggacgggtatcttctgaagctgtgctggatgctaaaaggatgaacaggaggtcctttctcgatggattgaagatatggctggaggaagccctgctggaagctcgattctttactttgaagctgatgctatgtgttatgcaacttaggaagttgttgcctggctaaaagcagttaggcgtatcagcagcctttttgaccggtagaactgcggagttgacatctagttccatatattttcttgagggcgaaacttgacattttgcttagaagattgcctttcttttcgtatacataattcttctgtcgatcattttctcaccatgagtggccatttttcatggtcgatacttgataccttcattgggtgaatacaagtatacaaactgctgacgtggacaaatgtaagagcaaaactgttttctttttggaagggaatcaacattgacgtgtagcaaa

SEQ ID NO: 47931 - DNA, 2484 bp, Zea Mays
aaacaatccaacatcttctatgcacttgcagttttgccaggcagttttggcatgatatccttttgccattgagataaggatatcttttgctgagtggtggcgaaaggtgcataaaaaggtgcacaagaccaaaagaaaaggcttcaatagcctcataattttgggggcgtggtgcttatggcttcttcgaaacaaggctatttttgatggagtaaacccttcctttgagctctgttaaaagtttgtttttagatgagctgagttgctgggatatggctggtgctaaacagctaccaagtcttggcctagttgctgctattagtagggtctaggctgtttttcaatttggtctagttttatgcttgcccactggtcattgtactttggtcctctttggacctttttcctctcttaatataatgatgcgcagctctcctgcgcgtccgagaaaaaaaagataaagcacaccctagaggattgtcttcattgttagtcaaaacttcaaacaaggtggcaaatttcctgaattttcgtagatttacaactttaattatcaaattgaaattgaaattttgtctccaagctcccaggttttccagtcatcacacaattgaggacatgtttgttgttcttcataaagggtgttatgtaatttttaaattagagtaaatattccagattggatgatgatatgttttactatttatgtagttcctaataaatacacatattcatctgattcttaaggtagtcagttatatttcgtgatcttacattaatcttgatatctatttgtagcaaaagttggttcttaccatcaaaagtgttaggagaatgaaaccctaactctaatgcgggttaggaatatattaatataactgagtatgtaggccaaggcccattataggagagaaatacatagttacgctaacacccccctgcagtcggtgttagggagatttgttcctttgtttttgtgcacgggaaaaatcgggacatggtaaaaagtggagcggccaaaaaaaatctgaaaccagcagccagattgctggaaacagagaaaatcataaatagctgtaacgttgttaccttttgatggtaaatatctaaaaccgattcttttgatggtatatatctaaaaatgtgttcttttgatggtaaggatccaatttcccccaatgttgtaatagttgggcctagctttttgttgcattgcctgattcacatgcatgactcgtaacataatgttatgtcattgtgactgtgaatccttgattgcaatgctacttgtttagttttcacggcattcacgcgttcattttacattattgccaagttactgcttccatgcaggtggttagttgatgaagttcgagaaagtgcccctaaggaattggatttcttgaatgaagccaaaaacagcgaaagatgtttgaataactttagaaagctgtctcctcagattgctggtagcatatatgcccccaaggtttattggaatctcagcacatctagaattctcaccatggagtttatggatgccaaggaggtaactgatgttagtggcattaaatcaattggagttcaccctgttgatgtttcaaacctagatggaaaaggccacagctggttcttcttgaccacggcctctacaaagagcttgattataatactaggataagctacgcttctctttggaaggcacttgtttttgctgatgcaaaagcaattaaggagaacagtgccaaactgggtgctggggaggatcttcatgcactctttgctggtgttctcactatgagaccatggaaaagggtgattgacccatctcctgatcatcttgtactaggaaaaaatactgattattcagaattacagaattacgcctccttatattttactgagatctccgagctactgaggagattaccaagggttatattgttgatgcttaaaacaaatgactgtttacgtgcagtcagtcatgccctggttgggggcagttccttggagtcgtttatgattattggacgggtatcttctgaagctgtgctggatgctaaaaggatgaacaggaggtcctttctcgatggattgaagatatggctggaggaagccctgctggaagctcgattctttactttgaagctgatgctatgtgttatgcaacttaggaagttgttgcctggctaaaagcagttaggcgtatcagcagcctttttgaccggtagaactgcggagttgacatctagttccatatattttcttgagggcgaaacttgacattttgcttagaagattgcctttcttttcgtatacataattcttctgtcgatcattttctcaccatgagtggccatttttcatggtcgatacttgataccttcattgggtgaatacaagtatacaaactgctgacgtggacaaatgtaagagcaaaactgttttctttttggaagggaatcaacattgacgtgtagcaaa

SEQ ID NO: 47932 - DNA, 2524 bp, Zea Mays
aaacaatccaacatcttctatgcacttgcagttttgccaggcagttttggcatgatatccttttgccattgagataaggatatcttttgctgagtggtggcgaaaggtgcataaaaaggtgcacaagaccaaaagaaaaggcttcaatagcctcataattttgggggcgtggtgcttatggcttcttcgaaacaaggctatttttgatggagtaaacccttcctttgagctctgttaaaagtttgtttttagatgagctgagttgctgggatatggctggtgctaaacagctaccaagtcttggcctagttgctgctattagtagggtctaggctgtttttcaatttggtctagttttatgcttgcccactggtcattgtactttggtcctctttggacctttttcctctcttaatataatgatgcgcagctctcctgcgcgtccgagaaaaaaaagataaagcacaccctagaggattgtcttcattgttagtcaaaacttcaaacaaggtggcaaatttcctgaattttcgtagatttacaactttaattatcaaattgaaattgaaattttgtctccaagctcccaggttttccagtcatcacacaattgaggacatgtttgttgttcttcataaagggtgttatgtaatttttaaattagagtaaatattccagattggatgatgatatgttttactatttatgtagttcctaataaatacacatattcatctgattcttaaggtagtcagttatatttcgtgatcttacattaatcttgatatctatttgtagcaaaagttggttcttaccatcaaaagtgttaggagaatgaaaccctaactctaatgcgggttaggaatatattaatataactgagtatgtaggccaaggcccattataggagagaaatacatagttacgctaacacccccctgcagtcggtgttagggagatttgttcctttgtttttgtgcacgggaaaaatcgggacatggtaaaaagtggagcggccaaaaaaaatctgaaaccagcagccagattgctggaaacagagaaaatcataaatagctgtaacgttgttaccttttgatggtaaatatctaaaaccgattcttttgatggtatatatctaaaaatgtgttcttttgatggtaaggatccaatttcccccaatgttgtaatagttgggcctagctttttgttgcattgcctgattcacatgcatgactcgtaacataatgttatgtcattgtgactgtgaatccttgattgcaatgctacttgtttagttttcacggcattcacgcgttcattttacattattgccaagttactgcttccatgcaggtggttagttgatgaagttcgagaaagtgcccctaagattgctggtagcatatatgcccccaaggtttattggaatctcagcacatctagaattctcaccatggagtttatggatgccaaggaggtaactgatgttagtggcattaaatcaattggagttcaccctgttgatgtttcaaacctagtcagtaaagcatttgctgagatgattttcaagcatggctttgttcattgtgatccccatgctgccaatatgatggtccgaccaatgccacaagacagcagaaaactttttggatggaaaaggccacagctggttcttcttgaccacggcctctacaaagagcttgattataatactaggataagctacgcttctctttggaaggcacttgtttttgctgatgcaaaagcaattaaggagaacagtgccaaactgggtgctggggaggatcttcatgcactctttgctggtgttctcactatgagaccatggaaaagggtgattgacccatctcctgatcatcttgtactaggaaaaaatactgattattcagaattacagaattacgcctccttatattttactgagatctccgagctactgaggagattaccaagggttatattgttgatgcttaaaacaaatgactgtttacgtgcagtcagtcatgccctggttgggggcagttccttggagtcgtttatgattattggacgggtatcttctgaagctgtgctggatgctaaaaggatgaacaggaggtcctttctcgatggattgaagatatggctggaggaagccctgctggaagctcgattctttactttgaagctgatgctatgtgttatgcaacttaggaagttgttgcctggctaaaagcagttaggcgtatcagcagcctttttgaccggtagaactgcggagttgacatctagttccatatattttcttgagggcgaaacttgacattttgcttagaagattgcctttcttttcgtatacataattcttctgtcgatcattttctcaccatgagtggccatttttcatggtcgatacttgataccttcattgggtgaatacaagtatacaaactgctgacgtggacaaatgtaagagcaaaactgttttctttttggaagggaatcaacattgacgtgtagcaaa

SEQ ID NO: 47933 - DNA, 2591 bp, Zea Mays
aaacaatccaacatcttctatgcacttgcagttttgccaggcagttttggcatgatatccttttgccattgagataaggatatcttttgctgagtggtggcgaaaggtgcataaaaaggtgcacaagaccaaaagaaaaggcttcaatagcctcataattttgggggcgtggtgcttatggcttcttcgaaacaaggctatttttgatggagtaaacccttcctttgagctctgttaaaagtttgtttttagatgagctgagttgctgggatatggctggtgctaaacagctaccaagtcttggcctagttgctgctattagtagggtctaggctgtttttcaatttggtctagttttatgcttgcccactggtcattgtactttggtcctctttggacctttttcctctcttaatataatgatgcgcagctctcctgcgcgtccgagaaaaaaaagataaagcacaccctagaggattgtcttcattgttagtcaaaacttcaaacaaggtggcaaatttcctgaattttcgtagatttacaactttaattatcaaattgaaattgaaattttgtctccaagctcccaggttttccagtcatcacacaattgaggacatgtttgttgttcttcataaagggtgttatgtaatttttaaattagagtaaatattccagattggatgatgatatgttttactatttatgtagttcctaataaatacacatattcatctgattcttaaggtagtcagttatatttcgtgatcttacattaatcttgatatctatttgtagcaaaagttggttcttaccatcaaaagtgttaggagaatgaaaccctaactctaatgcgggttaggaatatattaatataactgagtatgtaggccaaggcccattataggagagaaatacatagttacgctaacacccccctgcagtcggtgttagggagatttgttcctttgtttttgtgcacgggaaaaatcgggacatggtaaaaagtggagcggccaaaaaaaatctgaaaccagcagccagattgctggaaacagagaaaatcataaatagctgtaacgttgttaccttttgatggtaaatatctaaaaccgattcttttgatggtatatatctaaaaatgtgttcttttgatggtaaggatccaatttcccccaatgttgtaatagttgggcctagctttttgttgcattgcctgattcacatgcatgactcgtaacataatgttatgtcattgtgactgtgaatccttgattgcaatgctacttgtttagttttcacggcattcacgcgttcattttacattattgccaagttactgcttccatgcaggtggttagttgatgaagttcgagaaagtgcccctaaggaattggatttcttgaatgaagccaaaaacagcgaaagatgtttgaataactttagaaagctgtctcctcagattgctggtagcatatatgcccccaaggtttattggaatctcagcacatctagaattctcaccatggagtttatggatgccaaggaggtaactgatgttagtggcattaaatcaattggagttcaccctgttgatgtttcaaacctataaagcatttgctgagatgattttcaagcatggctttgttcattgtgatccccatgctgccaatatgatggtccgaccaatgccacaagacagcagaaaactttttggatggaaaaggccacagctggttcttcttgaccacggcctctacaaagagcttgattataatactaggataagctacgcttctctttggaaggcacttgtttttgctgatgcaaaagcaattaaggagaacagtgccaaactgggtgctggggaggatcttcatgcactctttgctggtgttctcactatgagaccatggaaaagggtgattgacccatctcctgatcatcttgtactaggaaaaaatactgattattcagaattacagaattacgcctccttatattttactgagatctccgagctactgaggagattaccaagggttatattgttgatgcttaaaacaaatgactgtttacgtgcagtcagtcatgccctggttgggggcagttccttggagtcgtttatgattattggacgggtatcttctgaagctgtgctggatgctaaaaggatgaacaggaggtcctttctcgatggattgaagatatggctggaggaagccctgctggaagctcgattctttactttgaagctgatgctatgtgttatgcaacttaggaagttgttgcctggctaaaagcagttaggcgtatcagcagcctttttgaccggtagaactgcggagttgacatctagttccatatattttcttgagggcgaaacttgacattttgcttagaagattgcctttcttttcgtatacataattcttctgtcgatcattttctcaccatgagtggccatttttcatggtcgatacttgataccttcattgggtgaatacaagtatacaaactgctgacgtggacaaatgtaagagcaaaactgttttctttttggaagggaatcaacattgacgtgtagcaaa

SEQ ID NO: 47934 - DNA, 2596 bp, Zea Mays
aaacaatccaacatcttctatgcacttgcagttttgccaggcagttttggcatgatatccttttgccattgagataaggatatcttttgctgagtggtggcgaaaggtgcataaaaaggtgcacaagaccaaaagaaaaggcttcaatagcctcataattttgggggcgtggtgcttatggcttcttcgaaacaaggctatttttgatggagtaaacccttcctttgagctctgttaaaagtttgtttttagatgagctgagttgctgggatatggctggtgctaaacagctaccaagtcttggcctagttgctgctattagtagggtctaggctgtttttcaatttggtctagttttatgcttgcccactggtcattgtactttggtcctctttggacctttttcctctcttaatataatgatgcgcagctctcctgcgcgtccgagaaaaaaaagataaagcacaccctagaggattgtcttcattgttagtcaaaacttcaaacaaggtggcaaatttcctgaattttcgtagatttacaactttaattatcaaattgaaattgaaattttgtctccaagctcccaggttttccagtcatcacacaattgaggacatgtttgttgttcttcataaagggtgttatgtaatttttaaattagagtaaatattccagattggatgatgatatgttttactatttatgtagttcctaataaatacacatattcatctgattcttaaggtagtcagttatatttcgtgatcttacattaatcttgatatctatttgtagcaaaagttggttcttaccatcaaaagtgttaggagaatgaaaccctaactctaatgcgggttaggaatatattaatataactgagtatgtaggccaaggcccattataggagagaaatacatagttacgctaacacccccctgcagtcggtgttagggagatttgttcctttgtttttgtgcacgggaaaaatcgggacatggtaaaaagtggagcggccaaaaaaaatctgaaaccagcagccagattgctggaaacagagaaaatcataaatagctgtaacgttgttaccttttgatggtaaatatctaaaaccgattcttttgatggtatatatctaaaaatgtgttcttttgatggtaaggatccaatttcccccaatgttgtaatagttgggcctagctttttgttgcattgcctgattcacatgcatgactcgtaacataatgttatgtcattgtgactgtgaatccttgattgcaatgctacttgtttagttttcacggcattcacgcgttcattttacattattgccaagttactgcttccatgcaggtggttagttgatgaagttcgagaaagtgcccctaaggaattggatttcttgaatgaagccaaaaacagcgaaagatgtttgaataactttagaaagctgtctcctcagattgctggtagcatatatgcccccaaggtttattggaatctcagcacatctagaattctcaccatggagtttatggatgccaaggaggtaactgatgttagtggcattaaatcaattggagttcaccctgttgatgtttcaaacctagtcagtaaagcatttgctgagatgattttcaagcatggctttgttcattgtgatccccatgctgccaatatgatggtccgaccaatgccacaagacagcagaaaactttttggatggaaaaggccacagctggttcttcttgaccacggcctctacaaagagcttgattataatactaggataagctacgcttctctttggaaggcacttgtttttgctgatgcaaaagcaattaaggagaacagtgccaaactgggtgctggggaggatcttcatgcactctttgctggtgttctcactatgagaccatggaaaagggtgattgacccatctcctgatcatcttgtactaggaaaaaatactgattattcagaattacagaattacgcctccttatattttactgagatctccgagctactgaggagattaccaagggttatattgttgatgcttaaaacaaatgactgtttacgtgcagtcagtcatgccctggttgggggcagttccttggagtcgtttatgattattggacgggtatcttctgaagctgtgctggatgctaaaaggatgaacaggaggtcctttctcgatggattgaagatatggctggaggaagccctgctggaagctcgattctttactttgaagctgatgctatgtgttatgcaacttaggaagttgttgcctggctaaaagcagttaggcgtatcagcagcctttttgaccggtagaactgcggagttgacatctagttccatatattttcttgagggcgaaacttgacattttgcttagaagattgcctttcttttcgtatacataattcttctgtcgatcattttctcaccatgagtggccatttttcatggtcgatacttgataccttcattgggtgaatacaagtatacaaactgctgacgtggacaaatgtaagagcaaaactgttttctttttggaagggaatcaacattgacgtgtagcaaa

SEQ ID NO: 47935 - DNA, 1630 bp, Zea Mays
gtagcgccttaccgctttaaaaaccatgcaccactttagtaagcagcatccctgcagtctttagaagctcaatttcctactattgtccttctgaagcagaatcctgaaatggcataatggttctgcaggtttaatttagaaaactaagtgtagatcggttgtgaagccgagagccacccattccaactccatgcattattattttatttgttgtaactgataggcaaggatgaattttcctgttttcttaatcatattgtccatatctacaggctttcagaaattcgcttagatgtccgtagaagaatcttagggaaactaatgatggggttttgccagttgaggggctgttaattactttttactattataaagcattagtcttgacagttctacggtcgtccagcgtaatccttttacaaccatgggtggcaagtttgaccatgtagatcgtttgttccaaagcatggagagcgcttacataaatagcttatcaaatacaagtgacgtcaaagagcttattccagaattcttttacatgtgatggggaacctaataggcgatgttgctctccctccatgggcaaagggttaacctgaagaatccatccacataaacaaagaagcccttgaaagtgaatatgtgagctctaatctccatatctggattgacctcatagatcaggaggtgttgatcaggagcagctaatcaggagcctcatcaaccaaactgcagggaaagcattataataccatagcaacactatgtgacatatcaggtgttgatcacgagcagttgatcaggagcctcatcaaccatactgtagggaagcattcgctgacaacattggtccgtgagaggcaaatgttggggattgtcgtgcagtcctgtgttggaaaggaataacagtggagatgtcaaaggatcacaagccgacatatgacgcagagcgtcaaaggcatcaaagatggctacctcaacggcgtactgcctgtgacctaggctttgggggactgggacctgaaactacatcaaggctcgccatcgcctcttattgctaaaccagagatccgctagatgatcctgatggaagatgacgagttcctcatcattggctacgatgggatattcatgatgactagccagaatgttatgagcagtccgcaagggactccggaggcatgatgatttgtgttccgtcgcaacgtatggtcactctattatcacatatatataagtccgcatgatactaatggttgtaatgtagtggtgaaatggctagattaagggcccgtttggttcctttagttcaaggattaaagtttagttagaagactaaagtttagtccctatcctatttggttctaaagactaaaagtattcaaaacatactacatgaatcataagagaaccaaaataccccttaacattcttccttctcccgtcattagtgcaaccgaaataaaggaggggtaaaaagtggaatttatatggtttagtcccttttagtcacctcttgagaaactagagactaaaacagtttagtccctgttttagtcccatcgtttggcaatttagggactaaatgagactaaaatgaagggactaatctttagtcactcaaaccaag

SEQ ID NO: 47936 - DNA, 2166 bp, Zea Mays
gtagcgccttaccgctttaaaaaccatgcaccactttagtaagcagcatccctgcagtctttagaagctcaatttcctactattgtccttctgaagcagaatcctgaaatggcataatggttctgcaggtttaatttagaaaactaagtgtagatcggttgtgaagccgagagccacccattccaactccatgcattattattttatttgttgtaactgataggcaaggatgaattttcctgttttcttaatcatattgtccatatctacaggctttcagaaattcgcttagatgtccgtagaagaatcttagggaaactaatgatggggttttgccagttgaggggctgttaattactttttactattataaagcattagtcttgacagttctacggtcgtccagcgtaatccttttacaaccatggttaggctcctaaagtttttattacggatctcactactctaacatgggaatcattcttcatttacatgcttaggctcaagccatttacatctctgcatctaaattttcaggttgtcactttgctcatagggtggcaagtttgaccatgtagatcgtttgttccaaagcatggagagcgcttacataaatagcttatcaaatacaagtgacgtcaaagagcttattccagaattcttttacatgtgatggggaacctaataggcgatgttgctctccctccatgggcaaagggttaacctgaagaatccatccacataaacaaagaagcccttgaaagtgaatatgtgagctctaatctccatatctggattgacctcatagatcaggaggtgttgatcaggagcagctaatcaggagcctcatcaaccaaactgcagggaaagcattataataccatagcaacactatgtgacatgtatgctttcttggtgttcctttttgtcatttttatctggtgttatcatctagccatatctatcgtaacaacacccaagaggtccgtgaatatgatgggttagcgtttagtactctatacaagagtactggactgcaagccattgatgagattgtccccaaatctatgacgagttcctcaagctctataagtttctggatggattcagttttatttacatcggtgcatggttgccttcagttttaaatcactatctatctactgacggcgagcagttgatcgtcatttgttggtttagttttcacagattcaccaaaaatccttttcaagtcccccccttttgaccaactcactgttgttttctattgttgtaatctagatcaggtgttgatcacgagcagttgatcaggagcctcatcaaccatactgtagggaagcattgtaatatcataacaacactatgtgacagcgctgacaacattggtccgtgagaggcaaatgttggggattgtcgtgcagtcctgtgttggaaaggaataacagtggagatgtcaaaggatcacaagccgacatatgacgcagagcgtcaaaggcatcaaagatggctacctcaacggcgtactgcctgtgacctaggctttgggggactgggacctgaaactacatcaaggctcgccatcgcctcttattgctaaaccagagatccgctagatgatcctgatggaagatgacgagttcctcatcattggctacgatgggatattcatgatgactagccagaatgttatgagcagtccgcaagggactccggaggcatgatgatttgtgttccgtcgcaacgtatggtcactctattatcacatatatataagtccgcatgatactaatggttgtaatgtagtggtgaaatggctagattaagggcccgtttggttcctttagttcaaggattaaagtttagttagaagactaaagtttagtccctatcctatttggttctaaagactaaaagtattcaaaacatactacatgaatcataagagaaccaaaataccccttaacattcttccttctcccgtcattagtgcaaccgaaataaaggaggggtaaaaagtggaatttatatggtttagtcccttttagtcacctcttgagaaactagagactaaaacagtttagtccctgttttagtcccatcgtttggcaatttagggactaaatgagactaaaatgaagggactaatctttagtcactcaaaccaag

SEQ ID NO: 47937 - DNA, 1616 bp, Zea Mays
gtagcgccttaccgctttaaaaaccatgcaccactttagtaagcagcatccctgcagtctttagaagctcaatttcctactattgtccttctgaagcagaatcctgaaatggcataatggttctgcaggtttaatttagaaaactaagtgtagatcggttgtgaagccgagagccacccattccaactccatgcattattattttatttgttgtaactgataggcaaggatgaattttcctgttttcttaatcatattgtccatatctacaggctttcagaaattcgcttagatgtccgtagaagaatcttagggaaactaatgatggggttttgccagttgaggggctgttaattactttttactattataaagcattagtcttgacagttctacggtcgtccagcgtaatccttttacaaccatgggtggcaagtttgaccatgtagatcgtttgttccaaagcatggagagcgcttacataaatagcttatcaaatacaagtgacgtcaaagagcttattccagaattcttttacatgtgatggggaacctaataggcgatgttgctctccctccatgggcaaagggttaacctgaagaatccatccacataaacaaagaagcccttgaaagtgaatatatcaggaggtgttgatcaggagcagctaatcaggagcctcatcaaccaaactgcagggaaagcattataataccatagcaacactatgtgacatgtgttgatcacgagcagttgatcaggagcctcatcaaccatactgtagggaagcattgtaatatcataacaacactatgtgacagcgctgacaacattggtccgtgagaggcaaatgttggggattgtcgtgcagtcctgtgttggaaaggaataacagtggagatgtcaaaggatcacaagccgacatatgacgcagagcgtcaaaggcatcaaagatggctacctcaacggcgtactgcctgtgacctaggctttgggggactgggacctgaaactacatcaaggctcgccatcgcctcttattgctaaaccagagatccgctagatgatcctgatggaagatgacgagttcctcatcattggctacgatgggatattcatgatgactagccagaatgttatgagcagtccgcaagggactccggaggcatgatgatttgtgttccgtcgcaacgtatggtcactctattatcacatatatataagtccgcatgatactaatggttgtaatgtagtggtgaaatggctagattaagggcccgtttggttcctttagttcaaggattaaagtttagttagaagactaaagtttagtccctatcctatttggttctaaagactaaaagtattcaaaacatactacatgaatcataagagaaccaaaataccccttaacattcttccttctcccgtcattagtgcaaccgaaataaaggaggggtaaaaagtggaatttatatggtttagtcccttttagtcacctcttgagaaactagagactaaaacagtttagtccctgttttagtcccatcgtttggcaatttagggactaaatgagactaaaatgaagggactaatctttagtcactcaaaccaag

SEQ ID NO: 47938 - DNA, 2081 bp, Zea Mays
gtagcgccttaccgctttaaaaaccatgcaccactttagtaagcagcatccctgcagtctttagaagctcaatttcctactattgtccttctgaagcagaatcctgaaatggcataatggttctgcaggtttaatttagaaaactaagtgtagatcggttgtgaagccgagagccacccattccaactccatgcattattattttatttgttgtaactgataggcaaggatgaattttcctgttttcttaatcatattgtccatatctacaggctttcagaaattcgcttagatgtccgtagaagaatcttagggaaactaatgatggggttttgccagttgaggggctgttaattactttttactattataaagcattagtcttgacagttctacggtcgtccagcgtaatccttttacaaccatgggtggcaagtttgaccatgtagatcgtttgttccaaagcatggagagcgcttacataaatagcttatcaaatacaagtgacgtcaaagagcttattccagaattcttttacatgtgatggggaacctaataggcgatgttgctctccctccatgggcaaagggttaacctgaagaatccatccacataaacaaagaagcccttgaaagtgaatatatcaggaggtgttgatcaggagcagctaatcaggagcctcatcaaccaaactgcagggaaagcattataataccatagcaacactatgtgacatgtatgctttcttggtgttcctttttgtcatttttatctggtgttatcatctagccatatctatcgtaacaacacccaagaggtccgtgaatatgatgggttagcgtttagtactctatacaaggtatttaatctcaaacatattctgaatttctgatattagagataattttctttttctttttaatttattcaccttatatagagtactggactgcaagccattgatgagattgtccccaaatctatgacgagttcctcaagctctataagtttctggatggattcagttttatttacatcggtgcatggttgccttcagttttaaatcactatctatctactgacggcgagcagttgatcgtcatttgttggtttagttttcacagattcaccaaaaatccttttcaagtcccccccttttgaccaactcactgttgttttctattgttgtaatctagatcaggtgttgatcacgagcagttgatcaggagcctcatcaaccatactgtagggaagcattgtaatatcataacaacactatgtgacagcgctgacaacattggtccgtgagaggcaaatgttggggattgtcgtgcagtcctgtgttggaaaggaataacagtggagatgtcaaaggatcacaagccgacatatgacgcagagcgtcaaaggcatcaaagatggctacctcaacggcgtactgcctgtgacctaggctttgggggactgggacctgaaactacatcaaggctcgccatcgcctcttattgctaaaccagagatccgctagatgatcctgatggaagatgacgagttcctcatcattggctacgatgggatattcatgatgactagccagaatgttatgagcagtccgcaagggactccggaggcatgatgatttgtgttccgtcgcaacgtatggtcactctattatcacatatatataagtccgcatgatactaatggttgtaatgtagtggtgaaatggctagattaagggcccgtttggttcctttagttcaaggattaaagtttagttagaagactaaagtttagtccctatcctatttggttctaaagactaaaagtattcaaaacatactacatgaatcataagagaaccaaaataccccttaacattcttccttctcccgtcattagtgcaaccgaaataaaggaggggtaaaaagtggaatttatatggtttagtcccttttagtcacctcttgagaaactagagactaaaacagtttagtccctgttttagtcccatcgtttggcaatttagggactaaatgagactaaaatgaagggactaatctttagtcactcaaaccaag

SEQ ID NO: 47939 - DNA, 2377 bp, Zea Mays
gtagcgccttaccgctttaaaaaccatgcaccactttagtaagcagcatccctgcagtctttagaagctcaatttcctactattgtccttctgaagcagaatcctgaaatggcataatggttctgcaggtttaatttagaaaactaagtgtagatcggttgtgaagccgagagccacccattccaactccatgcattattattttatttgttgtaactgataggcaaggatgaattttcctgttttcttaatcatattgtccatatctacaggctttcagaaattcgcttagatgtccgtagaagaatcttagggaaactaatgatggggttttgccagttgaggggctgttaattactttttactattataaagcattagtcttgacagttctacggtcgtccagcgtaatccttttacaaccatggttaggctcctaaagtttttattacggatctcactactctaacatgggaatcattcttcatttacatgcttaggctcaagccatttacatctctgcatctaaattttcaggttgtcactttgctcataggtatcattgtttccttaaaattgagcacatagctattatttaaaacattattcacgaatttgtcaatacataatttctcttgtcgtatttcactacaattcaaaataagggatcttgtcatattatttacatttatgtttgtctgacacttgtgcagggtggcaagtttgaccatgtagatcgtttgttccaaagcatggagagcgcttacataaatagcttatcaaatacaagtgacgtcaaagagcttattccagaattcttttacatgatggggaacctaataggcgatgttgctctccctccatgggcaaagggttaacctgaagaatccatccacataaacaaagaagcccttgaaagtgaatatgtgagctctaatctccatatctggattgacctcatagatcaggaggtgttgatcaggagcagctaatcaggagcctcatcaaccaaactgcagggaaagcattataataccatagcaacactatgtgacatgtatgctttcttggtgttcctttttgtcatttttatctggtgttatcatctagccatatctatcgtaacaacacccaagaggtccgtgaatatgatgggttagcgtttagtactctatacaaggtatttaatctcaaacatattctgaatttctgatattagagataattttctttttctttttaatttattcaccttatatagagtactggactgcaagccattgatgagattgtccccaaatctatgacgagttcctcaagctctataagtttctggatggattcagttttatttacatcggtgcatggttgccttcagttttaaatcactatctatctactgacggcgagcagttgatcgtcatttgttggtttagttttcacagattcaccaaaaatccttttcaagtcccccccttttgaccaactcactgttgttttctattgttgtaatctagatcaggtgttgatcacgagcagttgatcaggagcctcatcaaccatactgtagggaagcattgtaatatcataacaacactatgtgacaggcaaatgttggggattgtcgtgcagtcctgtgttggaaaggaataacagtggagatgtcaaaggatcacaagccgacatatgacgcagagcgtcaaaggcatcaaagatggctacctcaacggcgtactgcctgtgacctaggctttgggggactgggacctgaaactacatcaaggctcgccatcgcctcttattgctaaaccagagatccgctagatgatcctgatggaagatgacgagttcctcatcattggctacgatgggatattcatgatgactagccagaatgttatgagcagtccgcaagggactccggaggcatgatgatttgtgttccgtcgcaacgtatggtcactctattatcacatatatataagtccgcatgatactaatggttgtaatgtagtggtgaaatggctagattaagggcccgtttggttcctttagttcaaggattaaagtttagttagaagactaaagtttagtccctatcctatttggttctaaagactaaaagtattcaaaacatactacatgaatcataagagaaccaaaataccccttaacattcttccttctcccgtcattagtgcaaccgaaataaaggaggggtaaaaagtggaatttatatggtttagtcccttttagtcacctcttgagaaactagagactaaaacagtttagtccctgttttagtcccatcgtttggcaatttagggactaaatgagactaaaatgaagggactaatctttagtcactcaaaccaag

SEQ ID NO: 47940 - DNA, 1418 bp, Zea Mays
ctcaagccatttacatctctgcatctaaattttcaggttgtcactttgctcataggtatcattgtttccttaaaattgagcacatagctattatttaaaacattattcacgaatttgtcaatacataatttctcttgtcgtatttcactacaattcaaaataagggatcttgtcatattatttacatttatgtttgtctgacacttgtgcagggtggcaagtttgaccatgtagatcgtttgttccaaagcatggagagcgcttacataaatagcttatcaaatacaagtgacgtcaaagagcttattccagaattcttttacatgtgatggggaacctaataggcgatgttgctctccctccatgggcaaagggttaacctgaagaatccatccacataaacaaagaagcccttgaaagtgaatatgtgagctctaatctccatatctggattgacctcatagatcaggaggtgttgatcaggagcagctaatcaggagcctcatcaaccaaactgcagggaaagcattataataccatagcaacactatgtgacatatcaggtgttgatcacgagcagttgatcaggagcctcatcaaccatactgtagggaagcattgtaatatcataacaacactatgtgacaggcaaatgttggggattgtcgtgcagtcctgtgttggaaaggaataacagtggagatgtcaaaggatcacaagccgacatatgacgcagagcgtcaaaggcatcaaagatggctacctcaacggcgtactgcctgtgacctaggctttgggggactgggacctgaaactacatcaaggctcgccatcgcctcttattgctaaaccagagatccgctagatgatcctgatggaagatgacgagttcctcatcattggctacgatgggatattcatgatgactagccagaatgttatgagcagtccgcaagggactccggaggcatgatgatttgtgttccgtcgcaacgtatggtcactctattatcacatatatataagtccgcatgatactaatggttgtaatgtagtggtgaaatggctagattaagggcccgtttggttcctttagttcaaggattaaagtttagttagaagactaaagtttagtccctatcctatttggttctaaagactaaaagtattcaaaacatactacatgaatcataagagaaccaaaataccccttaacattcttccttctcccgtcattagtgcaaccgaaataaaggaggggtaaaaagtggaatttatatggtttagtcccttttagtcacctcttgagaaactagagactaaaacagtttagtccctgttttagtcccatcgtttggcaatttagggactaaatgagactaaaatgaagggactaatctttagtcactcaaaccaag

SEQ ID NO: 47941 - DNA, 1318 bp, Zea Mays
gtttccttaaaattgagcacatagctattatttaaaacattattcacgaatttgtcaatacataatttctcttgtcgtatttcactacaattcaaaataagggatcttgtcatattatttacatttatgtttgtctgacacttgtgcagggtggcaagtttgaccatgtagatcgtttgttccaaagcatggagagcgcttacataaatagcttatcaaatacaagtgacgtcaaagagcttattccagaattcttttacatgtgatggggaacctaataggcgatgttgctctccctccatgggcaaagggttaacctgaagaatccatccacataaacaaagaagcccttgaaagtgaatatatcaggaggtgttgatcaggagcagctaatcaggagcctcatcaaccaaactgcagggaaagcattataataccatagcaacactatgtgacatatcaggtgttgatcacgagcagttgatcaggagcctcatcaaccatactgtagggaagcattgtaatatcataacaacactatgtgacaggcaaatgttggggattgtcgtgcagtcctgtgttggaaaggaataacagtggagatgtcaaaggatcacaagccgacatatgacgcagagcgtcaaaggcatcaaagatggctacctcaacggcgtactgcctgtgacctaggctttgggggactgggacctgaaactacatcaaggctcgccatcgcctcttattgctaaaccagagatccgctagatgatcctgatggaagatgacgagttcctcatcattggctacgatgggatattcatgatgactagccagaatgttatgagcagtccgcaagggactccggaggcatgatgatttgtgttccgtcgcaacgtatggtcactctattatcacatatatataagtccgcatgatactaatggttgtaatgtagtggtgaaatggctagattaagggcccgtttggttcctttagttcaaggattaaagtttagttagaagactaaagtttagtccctatcctatttggttctaaagactaaaagtattcaaaacatactacatgaatcataagagaaccaaaataccccttaacattcttccttctcccgtcattagtgcaaccgaaataaaggaggggtaaaaagtggaatttatatggtttagtcccttttagtcacctcttgagaaactagagactaaaacagtttagtccctgttttagtcccatcgtttggcaatttagggactaaatgagactaaaatgaagggactaatctttagtcactcaaaccaag

SEQ ID NO: 47942 - DNA, 1708 bp, Zea Mays
attatttaaaacattattcacgaatttgtcaatacataatttctcttgtcgtatttcactacaattcaaaataagggatcttgtcatattatttacatttatgtttgtctgacacttgtgcagggtggcaagtttgaccatgtagatcgtttgttccaaagcatggagagcgcttacataaatagcttatcaaatacaagtgacgtcaaagagcttattccagaattcttttacatgtgatggggaacctaataggcgatgttgctctccctccatgggcaaagggttaacctgaagaatccatccacataaacaaagaagcccttgaaagtgaatatgtgagctctaatctccatatctggattgacctcatagatcaggaggtgttgatcaggagcagctaatcaggagcctcatcaaccaaactgcagggaaagcattataataccatagcaacactatgtgacatgtatgctttcttggtgttcctttttgtcatttttatctggtgttatcatctagccatatctatcgtaacaacacccaagaggtccgtgaatatgatgggttagcgtttagtactctatacaagagtactggactgcaagccattgatgagattgtccccaaatctatgacgagttcctcaagctctataagtttctggatggattcagttttatttacatcggtgcatggttgccttcagttttaaatcactatctatctactgacggcgagcagttgatcgtcatttgttggtttagttttcacagattcaccaaaaatccttttcaagtcccccccttttgaccaactcactgttgttttctattgttgtaatctagatcaggtgttgatcacgagcagttgatcaggagcctcatcaaccatactgtagggaagcattgtaatatcataacaacactatgtgacaggcaaatgttggggattgtcgtgcagtcctgtgttggaaaggaataacagtggagatgtcaaaggatcacaagccgacatatgacgcagagcgtcaaaggcatcaaagatggctacctcaacggcgtactgcctgtgacctaggctttgggggactgggacctgaaactacatcaaggctcgccatcgcctcttattgctaaaccagagatccgctagatgatcctgatggaagatgacgagttcctcatcattggctacgatgggatattcatgatgactagccagaatgttatgagcagtccgcaagggactccggaggcatgatgatttgtgttccgtcgcaacgtatggtcactctattatcacatatatataagtccgcatgatactaatggttgtaatgtagtggtgaaatggctagattaagggcccgtttggttcctttagttcaaggattaaagtttagttagaagactaaagtttagtccctatcctatttggttctaaagactaaaagtattcaaaacatactacatgaatcataagagaaccaaaataccccttaacattcttccttctcccgtcattagtgcaaccgaaataaaggaggggtaaaaagtggaatttatatggtttagtcccttttagtcacctcttgagaaactagagactaaaacagtttagtccctgttttagtcccatcgtttggcaatttagggactaaatgagactaaaatgaagggactaatctttagtcactcaaaccaag

SEQ ID NO: 47943 - DNA, 1316 bp, Zea Mays
acataatttctcttgtcgtatttcactacaattcaaaataagggatcttgtcatattatttacatttatgtttgtctgacacttgtgcagggtggcaagtttgaccatgtagatcgtttgttccaaagcatggagagcgcttacataaatagcttatcaaatacaagtgacgtcaaagagcttattccagaattcttttacatgtgatggggaacctaataggcgatgttgctctccctccatgggcaaagggttaacctgaagaatccatccacataaacaaagaagcccttgaaagtgaatatgtgagctctaatctccatatctggattgacctcatagatcaggaggtgttgatcaggagcagctaatcaggagcctcatcaaccaaactgcagggaaagcattataataccatagcaacactatgtgacatgtgttgatcacgagcagttgatcaggagcctcatcaaccatactgtagggaagcattgtaatatcataacaacactatgtgacagcgctgacaacattggtccgtgagaggcaaatgttggggattgtcgtgcagtcctgtgttggaaaggaataacagtggagatgtcaaaggatcacaagccgacatatgacgcagagcgtcaaaggcatcaaagatggctacctcaacggcgtactgcctgtgacctaggctttgggggactgggacctgaaactacatcaaggctcgccatcgcctcttattgctaaaccagagatccgctagatgatcctgatggaagatgacgagttcctcatcattggctacgatgggatattcatgatgactagccagaatgttatgagcagtccgcaagggactccggaggcatgatgatttgtgttccgtcgcaacgtatggtcactctattatcacatatatataagtccgcatgatactaatggttgtaatgtagtggtgaaatggctagattaagggcccgtttggttcctttagttcaaggattaaagtttagttagaagactaaagtttagtccctatcctatttggttctaaagactaaaagtattcaaaacatactacatgaatcataagagaaccaaaataccccttaacattcttccttctcccgtcattagtgcaaccgaaataaaggaggggtaaaaagtggaatttatatggtttagtcccttttagtcacctcttgagaaactagagactaaaacagtttagtccctgttttagtcccatcgtttggcaatttagggactaaatgagactaaaatgaagggactaatctttagtcactcaaaccaag

SEQ ID NO: 47944 - DNA, 1222 bp, Zea Mays
ttcactacaattcaaaataagggatcttgtcatattatttacatttatgtttgtctgacacttgtgcagggtggcaagtttgaccatgtagatcgtttgttccaaagcatggagagcgcttacataaatagcttatcaaatacaagtgacgtcaaagagcttattccagaattcttttacatgtgatggggaacctaataggcgatgttgctctccctccatgggcaaagggttaacctgaagaatccatccacataaacaaagaagcccttgaaagtgaatatatcaggaggtgttgatcaggagcagctaatcaggagcctcatcaaccaaactgcagggaaagcattataataccatagcaacactatgtgacatatcaggtgttgatcacgagcagttgatcaggagcctcatcaaccatactcgctgacaacattggtccgtgagaggcaaatgttggggattgtcgtgcagtcctgtgttggaaaggaataacagtggagatgtcaaaggatcacaagccgacatatgacgcagagcgtcaaaggcatcaaagatggctacctcaacggcgtactgcctgtgacctaggctttgggggactgggacctgaaactacatcaaggctcgccatcgcctcttattgctaaaccagagatccgctagatgatcctgatggaagatgacgagttcctcatcattggctacgatgggatattcatgatgactagccagaatgttatgagcagtccgcaagggactccggaggcatgatgatttgtgttccgtcgcaacgtatggtcactctattatcacatatatataagtccgcatgatactaatggttgtaatgtagtggtgaaatggctagattaagggcccgtttggttcctttagttcaaggattaaagtttagttagaagactaaagtttagtccctatcctatttggttctaaagactaaaagtattcaaaacatactacatgaatcataagagaaccaaaataccccttaacattcttccttctcccgtcattagtgcaaccgaaataaaggaggggtaaaaagtggaatttatatggtttagtcccttttagtcacctcttgagaaactagagactaaaacagtttagtccctgttttagtcccatcgtttggcaatttagggactaaatgagactaaaatgaagggactaatctttagtcactcaaaccaag

SEQ ID NO: 47945 - DNA, 1620 bp, Zea Mays
gtttgttccaaagcatggagagcgcttacataaatagcttatcaaatacaagtgacgtcaaagagcttattccagaattcttttacatgtgatggggaacctaataggcgatgttgctctccctccatgggcaaagggttaacctgaagaatccatccacataaacaaagaagcccttgaaagtgaatatgtgagctctaatctccatatctggattgacctcataggaggtgttgatcaggagcagctaatcaggagcctcatcaaccaaactgcagggaaagcattataataccatagcaacactatgtgacatgtatgctttcttggtgttcctttttgtcatttttatctggtgttatcatctagccatatctatcgtaacaacacccaagaggtccgtgaatatgatgggttagcgtttagtactctatacaaggtatttaatctcaaacatattctgaatttctgatattagagataattttctttttctttttaatttattcaccttatatagagtactggactgcaagccattgatgagattgtccccaaatctatgacgagttcctcaagctctataagtttctggatggattcagttttatttacatcggtgcatggttgccttcagttttaaatcactatctatctactgacggcgagcagttgatcgtcatttgttggtttagttttcacagattcaccaaaaatccttttcaagtcccccccttttgaccaactcactgttgttttctattgttgtaatctagatcaggtgttgatcacgagcagttgatcaggagcctcatcaaccatactcgctgacaacattggtccgtgagaggcaaatgttggggattgtcgtgcagtcctgtgttggaaaggaataacagtggagatgtcaaaggatcacaagccgacatatgacgcagagcgtcaaaggcatcaaagatggctacctcaacggcgtactgcctgtgacctaggctttgggggactgggacctgaaactacatcaaggctcgccatcgcctcttattgctaaaccagagatccgctagatgatcctgatggaagatgacgagttcctcatcattggctacgatgggatattcatgatgactagccagaatgttatgagcagtccgcaagggactccggaggcatgatgatttgtgttccgtcgcaacgtatggtcactctattatcacatatatataagtccgcatgatactaatggttgtaatgtagtggtgaaatggctagattaagggcccgtttggttcctttagttcaaggattaaagtttagttagaagactaaagtttagtccctatcctatttggttctaaagactaaaagtattcaaaacatactacatgaatcataagagaaccaaaataccccttaacattcttccttctcccgtcattagtgcaaccgaaataaaggaggggtaaaaagtggaatttatatggtttagtcccttttagtcacctcttgagaaactagagactaaaacagtttagtccctgttttagtcccatcgtttggcaatttagggactaaatgagactaaaatgaagggactaatctttagtcactcaaaccaag

SEQ ID NO: 47946 - DNA, 1724 bp, Zea Mays
tgttccaaagcatggagagcgcttacataaatagcttatcaaatacaagtgacgtcaaagagcttattccagaattcttttacatgtgatggggaacctaataggcgatgttgctctccctccatgggcaaaggaggtgttgatcaggagcagctaatcaggagcctcatcaaccaaactgcagggaaagcattataataccatagcaacactatgtgacatgtatgctttcttggtgttcctttttgtcatttttatctggtgttatcatctagccatatctatcgtaacaacacccaagaggtccgtgaatatgatgggttagcgtttagtactctatacaaggtatttaatctcaaacatattctgaatttctgatattagagataattttctttttctttttaatttattcaccttatatagagtactggactgcaagccattgatgagattgtccccaaatctatgacgagttcctcaagctctataagtttctggatggattcagttttatttacatcggtgcatggttgccttcagttttaaatcactatctatctactgacggcgagcagttgatcgtcatttgttggtttagttttcacagattcaccaaaaatccttttcaagtcccccccttttgaccaactcactgttgttttctattgttgtaatctagatcaggtgttgatcacgagcagttgatcaggagcctcatcaaccatactgtagggaagcattgtaatatcataacaacactatgtgacaggtatgctttattgttgttcctttttgtcatttttatctgatattcgttcttctggtatcacagcgctgacaacattggtccgtgagaggtaagttgataatggaactcaagcctctgcagatgttaacggttgtttcagtgctatgatttaaaccattctaatattcgttcatatcttgcaggcaaatgttggggattgtcgtgcagtcctgtgttggaaaggaataacagtggagatgtcaaaggatcacaagccgacatatgacgcagagcgtcaaaggcatcaaagatggctacctcaacggcgtactgcctgtgacctaggctttgggggactgggacctgaaactacatcaaggctcgccatcgcctcttattgctaaaccagagatccgctagatgatcctgatggaagatgacgagttcctcatcattggctacgatgggatattcatgatgactagccagaatgttatgagcagtccgcaagggactccggaggcatgatgatttgtgttccgtcgcaacgtatggtcactctattatcacatatatataagtccgcatgatactaatggttgtaatgtagtggtgaaatggctagattaagggcccgtttggttcctttagttcaaggattaaagtttagttagaagactaaagtttagtccctatcctatttggttctaaagactaaaagtattcaaaacatactacatgaatcataagagaaccaaaataccccttaacattcttccttctcccgtcattagtgcaaccgaaataaaggaggggtaaaaagtggaatttatatggtttagtcccttttagtcacctcttgagaaactagagactaaaacagtttagtccctgttttagtcccatcgtttggcaatttagggactaaatgagactaaaatgaagggactaatctttagtcactcaaaccaag

SEQ ID NO: 47947 - DNA, 1193 bp, Zea Mays
ggaacctaataggcgatgttgctctccctccatgggcaaagggttaacctgaagaatccatccacataaacaaagaagcccttgaaagtgaatatgtgagctctaatctccatatctggattgacctcatagatcaggaggtgttgatcaggagcagctaatcaggagcctcatcaaccaaactgcagggaaagcattataataccatagcaacactatgtgacatgtatgctttcttggtgttcctttttgtcatttttatctggtgttatcatctagccatatctatcgtaacaacacccaagaggtccgtgaatatgatgggttagcgtttagtactctatacaagatcaggtgttgatcacgagcagttgatcaggagcctcatcaaccatactcgctgacaacattggtccgtgagaggcaaatgttggggattgtcgtgcagtcctgtgttggaaaggaataacagtggagatgtcaaaggatcacaagccgacatatgacgcagagcgtcaaaggcatcaaagatggctacctcaacggcgtactgcctgtgacctaggctttgggggactgggacctgaaactacatcaaggctcgccatcgcctcttattgctaaaccagagatccgctagatgatcctgatggaagatgacgagttcctcatcattggctacgatgggatattcatgatgactagccagaatgttatgagcagtccgcaagggactccggaggcatgatgatttgtgttccgtcgcaacgtatggtcactctattatcacatatatataagtccgcatgatactaatggttgtaatgtagtggtgaaatggctagattaagggcccgtttggttcctttagttcaaggattaaagtttagttagaagactaaagtttagtccctatcctatttggttctaaagactaaaagtattcaaaacatactacatgaatcataagagaaccaaaataccccttaacattcttccttctcccgtcattagtgcaaccgaaataaaggaggggtaaaaagtggaatttatatggtttagtcccttttagtcacctcttgagaaactagagactaaaacagtttagtccctgttttagtcccatcgtttggcaatttagggactaaatgagactaaaatgaagggactaatctttagtcactcaaaccaag

SEQ ID NO: 47948 - DNA, 1351 bp, Zea Mays
aataggcgatgttgctctccctccatgggcaaagatcaggaggtgttgatcaggagcagctaatcaggagcctcatcaaccaaactgcagggaaagcattataataccatagcaacactatgtgacatgtatgctttcttggtgttcctttttgtcatttttatctggtgttatcatctagccatatctatcgtaacaacacccaagaggtccgtgaatatgatgggttagcgtttagtactctatacaagagtactggactgcaagccattgatgagattgtccccaaatctatgacgagttcctcaagctctataagtttctggatggattcagttttatttacatcggtgcatggttgccttcagttttaaatcactatctatctactgacggcgagcagttgatcgtcatttgttggtttagttttcacagattcaccaaaaatccttttcaagtcccccccttttgaccaactcactgttgttttctattgttgtaatctagatcaggtgttgatcacgagcagttgatcaggagcctcatcaaccatactcgctgacaacattggtccgtgagaggcaaatgttggggattgtcgtgcagtcctgtgttggaaaggaataacagtggagatgtcaaaggatcacaagccgacatatgacgcagagcgtcaaaggcatcaaagatggctacctcaacggcgtactgcctgtgacctaggctttgggggactgggacctgaaactacatcaaggctcgccatcgcctcttattgctaaaccagagatccgctagatgatcctgatggaagatgacgagttcctcatcattggctacgatgggatattcatgatgactagccagaatgttatgagcagtccgcaagggactccggaggcatgatgatttgtgttccgtcgcaacgtatggtcactctattatcacatatatataagtccgcatgatactaatggttgtaatgtagtggtgaaatggctagattaagggcccgtttggttcctttagttcaaggattaaagtttagttagaagactaaagtttagtccctatcctatttggttctaaagactaaaagtattcaaaacatactacatgaatcataagagaaccaaaataccccttaacattcttccttctcccgtcattagtgcaaccgaaataaaggaggggtaaaaagtggaatttatatggtttagtcccttttagtcacctcttgagaaactagagactaaaacagtttagtccctgttttagtcccatcgtttggcaatttagggactaaatgagactaaaatgaagggactaatctttagtcactcaaaccaag

SEQ ID NO: 47949 - DNA, 1493 bp, Zea Mays
ggcgatgttgctctccctccatgggcaaagggttaacctgaagaatccatccacataaacaaagaagcccttgaaagtgaatatgaggtgttgatcaggagcagctaatcaggagcctcatcaaccaaactgcagggaaagcattataataccatagcaacactatgtgacatgtatgctttcttggtgttcctttttgtcatttttatctggtgttatcatctagccatatctatcgtaacaacacccaagaggtccgtgaatatgatgggttagcgtttagtactctatacaaggtatttaatctcaaacatattctgaatttctgatattagagataattttctttttctttttaatttattcaccttatatagagtactggactgcaagccattgatgagattgtccccaaatctatgacgagttcctcaagctctataagtttctggatggattcagttttatttacatcggtgcatggttgccttcagttttaaatcactatctatctactgacggcgagcagttgatcgtcatttgttggtttagttttcacagattcaccaaaaatccttttcaagtcccccccttttgaccaactcactgttgttttctattgttgtaatctagatcaggtgttgatcacgagcagttgatcaggagcctcatcaaccatactgtagggaagcattgtaatatcataacaacactatgtgacaggcaaatgttggggattgtcgtgcagtcctgtgttggaaaggaataacagtggagatgtcaaaggatcacaagccgacatatgacgcagagcgtcaaaggcatcaaagatggctacctcaacggcgtactgcctgtgacctaggctttgggggactgggacctgaaactacatcaaggctcgccatcgcctcttattgctaaaccagagatccgctagatgatcctgatggaagatgacgagttcctcatcattggctacgatgggatattcatgatgactagccagaatgttatgagcagtccgcaagggactccggaggcatgatgatttgtgttccgtcgcaacgtatggtcactctattatcacatatatataagtccgcatgatactaatggttgtaatgtagtggtgaaatggctagattaagggcccgtttggttcctttagttcaaggattaaagtttagttagaagactaaagtttagtccctatcctatttggttctaaagactaaaagtattcaaaacatactacatgaatcataagagaaccaaaataccccttaacattcttccttctcccgtcattagtgcaaccgaaataaaggaggggtaaaaagtggaatttatatggtttagtcccttttagtcacctcttgagaaactagagactaaaacagtttagtccctgttttagtcccatcgtttggcaatttagggactaaatgagactaaaatgaagggactaatctttagtcactcaaaccaag

SEQ ID NO: 47950 - DNA, 1068 bp, Zea Mays
cgatgttgctctccctccatgggcaaagggttaacctgaagaatccatccacataaacaaagaagcccttgaaagtgaatatgtgagctctaatctccatatctggattgacctcataggaggtgttgatcaggagcagctaatcaggagcctcatcaaccaaactgcagggaaagcattataataccatagcaacactatgtgacatatcaggtgttgatcacgagcagttgatcaggagcctcatcaaccatactgtagggaagcattgtaatatcataacaacactatgtgacaggcaaatgttggggattgtcgtgcagtcctgtgttggaaaggaataacagtggagatgtcaaaggatcacaagccgacatatgacgcagagcgtcaaaggcatcaaagatggctacctcaacggcgtactgcctgtgacctaggctttgggggactgggacctgaaactacatcaaggctcgccatcgcctcttattgctaaaccagagatccgctagatgatcctgatggaagatgacgagttcctcatcattggctacgatgggatattcatgatgactagccagaatgttatgagcagtccgcaagggactccggaggcatgatgatttgtgttccgtcgcaacgtatggtcactctattatcacatatatataagtccgcatgatactaatggttgtaatgtagtggtgaaatggctagattaagggcccgtttggttcctttagttcaaggattaaagtttagttagaagactaaagtttagtccctatcctatttggttctaaagactaaaagtattcaaaacatactacatgaatcataagagaaccaaaataccccttaacattcttccttctcccgtcattagtgcaaccgaaataaaggaggggtaaaaagtggaatttatatggtttagtcccttttagtcacctcttgagaaactagagactaaaacagtttagtccctgttttagtcccatcgtttggcaatttagggactaaatgagactaaaatgaagggactaatctttagtcactcaaaccaag

SEQ ID NO: 47951 - DNA, 1093 bp, Zea Mays
cgatgttgctctccctccatgggcaaagggttaacctgaagaatccatccacataaacaaagaagcccttgaaagtgaatatgtgagctctaatctccatatctggattgacctcataggaggtgttgatcaggagcagctaatcaggagcctcatcaaccaaactgcagggaaagcattataataccatagcaacactatgtgacatatcaggtgttgatcacgagcagttgatcaggagcctcatcaaccatactgtagggaagcattgtaatatcataacaacactatgtgacagcgctgacaacattggtccgtgagaggcaaatgttggggattgtcgtgcagtcctgtgttggaaaggaataacagtggagatgtcaaaggatcacaagccgacatatgacgcagagcgtcaaaggcatcaaagatggctacctcaacggcgtactgcctgtgacctaggctttgggggactgggacctgaaactacatcaaggctcgccatcgcctcttattgctaaaccagagatccgctagatgatcctgatggaagatgacgagttcctcatcattggctacgatgggatattcatgatgactagccagaatgttatgagcagtccgcaagggactccggaggcatgatgatttgtgttccgtcgcaacgtatggtcactctattatcacatatatataagtccgcatgatactaatggttgtaatgtagtggtgaaatggctagattaagggcccgtttggttcctttagttcaaggattaaagtttagttagaagactaaagtttagtccctatcctatttggttctaaagactaaaagtattcaaaacatactacatgaatcataagagaaccaaaataccccttaacattcttccttctcccgtcattagtgcaaccgaaataaaggaggggtaaaaagtggaatttatatggtttagtcccttttagtcacctcttgagaaactagagactaaaacagtttagtccctgttttagtcccatcgtttggcaatttagggactaaatgagactaaaatgaagggactaatctttagtcactcaaaccaag

SEQ ID NO: 47952 - DNA, 1512 bp, Zea Mays
ccatgggcaaagggttaacctgaagaatccatccacataaacaaagaagcccttgaaagtgaatatgtgagctctaatctccatatctggattgacctcataggaggtgttgatcaggagcagctaatcaggagcctcatcaaccaaactgcagggaaagcattataataccatagcaacactatgtgacatgtatgctttcttggtgttcctttttgtcatttttatctggtgttatcatctagccatatctatcgtaacaacacccaagaggtccgtgaatatgatgggttagcgtttagtactctatacaaggtatttaatctcaaacatattctgaatttctgatattagagataattttctttttctttttaatttattcaccttatatagagtactggactgcaagccattgatgagattgtccccaaatctatgacgagttcctcaagctctataagtttctggatggattcagttttatttacatcggtgcatggttgccttcagttttaaatcactatctatctactgacggcgagcagttgatcgtcatttgttggtttagttttcacagattcaccaaaaatccttttcaagtcccccccttttgaccaactcactgttgttttctattgttgtaatctagatcaggtgttgatcacgagcagttgatcaggagcctcatcaaccatactgtagggaagcattgtaatatcataacaacactatgtgacaggcaaatgttggggattgtcgtgcagtcctgtgttggaaaggaataacagtggagatgtcaaaggatcacaagccgacatatgacgcagagcgtcaaaggcatcaaagatggctacctcaacggcgtactgcctgtgacctaggctttgggggactgggacctgaaactacatcaaggctcgccatcgcctcttattgctaaaccagagatccgctagatgatcctgatggaagatgacgagttcctcatcattggctacgatgggatattcatgatgactagccagaatgttatgagcagtccgcaagggactccggaggcatgatgatttgtgttccgtcgcaacgtatggtcactctattatcacatatatataagtccgcatgatactaatggttgtaatgtagtggtgaaatggctagattaagggcccgtttggttcctttagttcaaggattaaagtttagttagaagactaaagtttagtccctatcctatttggttctaaagactaaaagtattcaaaacatactacatgaatcataagagaaccaaaataccccttaacattcttccttctcccgtcattagtgcaaccgaaataaaggaggggtaaaaagtggaatttatatggtttagtcccttttagtcacctcttgagaaactagagactaaaacagtttagtccctgttttagtcccatcgtttggcaatttagggactaaatgagactaaaatgaagggactaatctttagtcactcaaaccaag

SEQ ID NO: 47953 - DNA, 1761 bp, Zea Mays
cttgaggatggattgtttgtccaccaggatagttctgttgcttttataatgacgattaatttagctttgcaaccgtgttagtaaaaacctgtactgttctcagatacacagggtatatctagctttctcaatataaaatagattttctcaaacattccaagcaaatttacttcacataatgttttatttatattctgactttggccatcttcagttcgcaaattcaaccctaataggtttagcattgcaaagaacaacttttgcatactattatgtagcccaacttcataacttgaaggtgatgatgtactagctttcgcatacatgttacattttctatcccatttaatgttttccttgtgctatatgattaatccatacaaattgtagggttaacctgaagaatccatccacataaacaaagaagcccttgaaagtgaatatatcaggaggtgttgatcaggagcagctaatcaggagcctcatcaaccaaactgcagggaaagcattataataccatagcaacactatgtgacatgtatgctttcttggtgttcctttttgtcatttttatctggtgttatcatctagccatatctatcgtaacaacacccaagaggtccgtgaatatgatgggttagcgtttagtactctatacaagagtactggactgcaagccattgatgagattgtccccaaatctatgacgagttcctcaagctctataagtttctggatggattcagttttatttacatcggtgcatggttgccttcagttttaaatcactatctatctactgacggcgagcagttgatcgtcatttgttggtttagttttcacagattcaccaaaaatccttttcaagtcccccccttttgaccaactcactgttgttttctattgttgtaatctagatcaggtgttgatcacgagcagttgatcaggagcctcatcaaccatactcgctgacaacattggtccgtgagaggcaaatgttggggattgtcgtgcagtcctgtgttggaaaggaataacagtggagatgtcaaaggatcacaagccgacatatgacgcagagcgtcaaaggcatcaaagatggctacctcaacggcgtactgcctgtgacctaggctttgggggactgggacctgaaactacatcaaggctcgccatcgcctcttattgctaaaccagagatccgctagatgatcctgatggaagatgacgagttcctcatcattggctacgatgggatattcatgatgactagccagaatgttatgagcagtccgcaagggactccggaggcatgatgatttgtgttccgtcgcaacgtatggtcactctattatcacatatatataagtccgcatgatactaatggttgtaatgtagtggtgaaatggctagattaagggcccgtttggttcctttagttcaaggattaaagtttagttagaagactaaagtttagtccctatcctatttggttctaaagactaaaagtattcaaaacatactacatgaatcataagagaaccaaaataccccttaacattcttccttctcccgtcattagtgcaaccgaaataaaggaggggtaaaaagtggaatttatatggtttagtcccttttagtcacctcttgagaaactagagactaaaacagtttagtccctgttttagtcccatcgtttggcaatttagggactaaatgagactaaaatgaagggactaatctttagtcactcaaaccaag

SEQ ID NO: 47954 - DNA, 1837 bp, Zea Mays
tgaggatggattgtttgtccaccaggatagttctgttgcttttataatgacgattaatttagctttgcaaccgtgttagtaaaaacctgtactgttctcagatacacagggtatatctagctttctcaatataaaatagattttctcaaacattccaagcaaatttacttcacataatgttttatttatattctgactttggccatcttcagttcgcaaattcaaccctaataggtttagcattgcaaagaacaacttttgcatactattatgtagcccaacttcataacttgaaggtgatgatgtactagctttcgcatacatgttacattttctatcccatttaatgttttccttgtgctatatgattaatccatacaaattgtagggttaacctgaagaatccatccacataaacaaagaagcccttgaaagtgaatatgtgagctctaatctccatatctggattgacctcatagatcaggaggtgttgatcaggagcagctaatcaggagcctcatcaaccaaactgcagggaaagcattataataccatagcaacactatgtgacatgtatgctttcttggtgttcctttttgtcatttttatctggtgttatcatctagccatatctatcgtaacaacacccaagaggtccgtgaatatgatgggttagcgtttagtactctatacaagagtactggactgcaagccattgatgagattgtccccaaatctatgacgagttcctcaagctctataagtttctggatggattcagttttatttacatcggtgcatggttgccttcagttttaaatcactatctatctactgacggcgagcagttgatcgtcatttgttggtttagttttcacagattcaccaaaaatccttttcaagtcccccccttttgaccaactcactgttgttttctattgttgtaatctagatcaggtgttgatcacgagcagttgatcaggagcctcatcaaccatactgtagggaagcattgtaatatcataacaacactatgtgacagcgctgacaacattggtccgtgagaggcaaatgttggggattgtcgtgcagtcctgtgttggaaaggaataacagtggagatgtcaaaggatcacaagccgacatatgacgcagagcgtcaaaggcatcaaagatggctacctcaacggcgtactgcctgtgacctaggctttgggggactgggacctgaaactacatcaaggctcgccatcgcctcttattgctaaaccagagatccgctagatgatcctgatggaagatgacgagttcctcatcattggctacgatgggatattcatgatgactagccagaatgttatgagcagtccgcaagggactccggaggcatgatgatttgtgttccgtcgcaacgtatggtcactctattatcacatatatataagtccgcatgatactaatggttgtaatgtagtggtgaaatggctagattaagggcccgtttggttcctttagttcaaggattaaagtttagttagaagactaaagtttagtccctatcctatttggttctaaagactaaaagtattcaaaacatactacatgaatcataagagaaccaaaataccccttaacattcttccttctcccgtcattagtgcaaccgaaataaaggaggggtaaaaagtggaatttatatggtttagtcccttttagtcacctcttgagaaactagagactaaaacagtttagtccctgttttagtcccatcgtttggcaatttagggactaaatgagactaaaatgaagggactaatctttagtcactcaaaccaag

SEQ ID NO: 47955 - DNA, 1409 bp, Zea Mays
gattgtttgtccaccaggatagttctgttgcttttataatgacgattaatttagctttgcaaccgtgttagtaaaaacctgtactgttctcagatacacagggtatatctagctttctcaatataaaatagattttctcaaacattccaagcaaatttacttcacataatgttttatttatattctgactttggccatcttcagttcgcaaattcaaccctaataggtttagcattgcaaagaacaacttttgcatactattatgtagcccaacttcataacttgaaggtgatgatgtactagctttcgcatacatgttacattttctatcccatttaatgttttccttgtgctatatgattaatccatacaaattgtagggttaacctgaagaatccatccacataaacaaagaagcccttgaaagtgaatatgtgagctctaatctccatatctggattgacctcatagatcaggaggtgttgatcaggagcagctaatcaggagcctcatcaaccaaactgcagggaaagcattataataccatagcaacactatgtgacatatcaggtgttgatcacgagcagttgatcaggagcctcatcaaccatactcgctgacaacattggtccgtgagaggcaaatgttggggattgtcgtgcagtcctgtgttggaaaggaataacagtggagatgtcaaaggatcacaagccgacatatgacgcagagcgtcaaaggcatcaaagatggctacctcaacggcgtactgcctgtgacctaggctttgggggactgggacctgaaactacatcaaggctcgccatcgcctcttattgctaaaccagagatccgctagatgatcctgatggaagatgacgagttcctcatcattggctacgatgggatattcatgatgactagccagaatgttatgagcagtccgcaagggactccggaggcatgatgatttgtgttccgtcgcaacgtatggtcactctattatcacatatatataagtccgcatgatactaatggttgtaatgtagtggtgaaatggctagattaagggcccgtttggttcctttagttcaaggattaaagtttagttagaagactaaagtttagtccctatcctatttggttctaaagactaaaagtattcaaaacatactacatgaatcataagagaaccaaaataccccttaacattcttccttctcccgtcattagtgcaaccgaaataaaggaggggtaaaaagtggaatttatatggtttagtcccttttagtcacctcttgagaaactagagactaaaacagtttagtccctgttttagtcccatcgtttggcaatttagggactaaatgagactaaaatgaagggactaatctttagtcactcaaaccaag

SEQ ID NO: 47956 - DNA, 1822 bp, Zea Mays
gttgcttttataatgacgattaatttagctttgcaaccgtgttagtaaaaacctgtactgttctcagatacacagggtatatctagctttctcaatataaaatagattttctcaaacattccaagcaaatttacttcacataatgttttatttatattctgactttggccatcttcagttcgcaaattcaaccctaataggtttagcattgcaaagaacaacttttgcatactattatgtagcccaacttcataacttgaaggtgatgatgtactagctttcgcatacatgttacattttctatcccatttaatgttttccttgtgctatatgattaatccatacaaattgtagggttaacctgaagaatccatccacataaacaaagaagcccttgaaagtgaatatatcaggaggtgttgatcaggagcagctaatcaggagcctcatcaaccaaactgcagggaaagcattataataccatagcaacactatgtgacatgtatgctttcttggtgttcctttttgtcatttttatctggtgttatcatctagccatatctatcgtaacaacacccaagaggtccgtgaatatgatgggttagcgtttagtactctatacaaggtatttaatctcaaacatattctgaatttctgatattagagataattttctttttctttttaatttattcaccttatatagagtactggactgcaagccattgatgagattgtccccaaatctatgacgagttcctcaagctctataagtttctggatggattcagttttatttacatcggtgcatggttgccttcagttttaaatcactatctatctactgacggcgagcagttgatcgtcatttgttggtttagttttcacagattcaccaaaaatccttttcaagtcccccccttttgaccaactcactgttgttttctattgttgtaatctagatcaggtgttgatcacgagcagttgatcaggagcctcatcaaccatactgtagggaagcattgtaatatcataacaacactatgtgacaggcaaatgttggggattgtcgtgcagtcctgtgttggaaaggaataacagtggagatgtcaaaggatcacaagccgacatatgacgcagagcgtcaaaggcatcaaagatggctacctcaacggcgtactgcctgtgacctaggctttgggggactgggacctgaaactacatcaaggctcgccatcgcctcttattgctaaaccagagatccgctagatgatcctgatggaagatgacgagttcctcatcattggctacgatgggatattcatgatgactagccagaatgttatgagcagtccgcaagggactccggaggcatgatgatttgtgttccgtcgcaacgtatggtcactctattatcacatatatataagtccgcatgatactaatggttgtaatgtagtggtgaaatggctagattaagggcccgtttggttcctttagttcaaggattaaagtttagttagaagactaaagtttagtccctatcctatttggttctaaagactaaaagtattcaaaacatactacatgaatcataagagaaccaaaataccccttaacattcttccttctcccgtcattagtgcaaccgaaataaaggaggggtaaaaagtggaatttatatggtttagtcccttttagtcacctcttgagaaactagagactaaaacagtttagtccctgttttagtcccatcgtttggcaatttagggactaaatgagactaaaatgaagggactaatctttagtcactcaaaccaag

SEQ ID NO: 47957 - DNA, 1941 bp, Zea Mays
gttgcttttataatgacgattaatttagctttgcaaccgtgttagtaaaaacctgtactgttctcagatacacagggtatatctagctttctcaatataaaatagattttctcaaacattccaagcaaatttacttcacataatgttttatttatattctgactttggccatcttcagttcgcaaattcaaccctaataggtttagcattgcaaagaacaacttttgcatactattatgtagcccaacttcataacttgaaggtgatgatgtactagctttcgcatacatgttacattttctatcccatttaatgttttccttgtgctatatgattaatccatacaaattgtagggttaacctgaagaatccatccacataaacaaagaagcccttgaaagtgaatatatcaggaggtgttgatcaggagcagctaatcaggagcctcatcaaccaaactgcagggaaagcattataataccatagcaacactatgtgacatgtatgctttcttggtgttcctttttgtcatttttatctggtgttatcatctagccatatctatcgtaacaacacccaagaggtccgtgaatatgatgggttagcgtttagtactctatacaaggtatttaatctcaaacatattctgaatttctgatattagagataattttctttttctttttaatttattcaccttatatagagtactggactgcaagccattgatgagattgtccccaaatctatgacgagttcctcaagctctataagtttctggatggattcagttttatttacatcggtgcatggttgccttcagttttaaatcactatctatctactgacggcgagcagttgatcgtcatttgttggtttagttttcacagattcaccaaaaatccttttcaagtcccccccttttgaccaactcactgttgttttctattgttgtaatctagatcaggtgttgatcacgagcagttgatcaggagcctcatcaaccatactgtagggaagcattgtaatatcataacaacactatgtgacagcgctgacaacattggtccgtgagaggtaagttgataatggaactcaagcctctgcagatgttaacggttgtttcagtgctatgatttaaaccattctaatattcgttcatatcttgcaggcaaatgttggggattgtcgtgcagtcctgtgttggaaaggaataacagtggagatgtcaaaggatcacaagccgacatatgacgcagagcgtcaaaggcatcaaagatggctacctcaacggcgtactgcctgtgacctaggctttgggggactgggacctgaaactacatcaaggctcgccatcgcctcttattgctaaaccagagatccgctagatgatcctgatggaagatgacgagttcctcatcattggctacgatgggatattcatgatgactagccagaatgttatgagcagtccgcaagggactccggaggcatgatgatttgtgttccgtcgcaacgtatggtcactctattatcacatatatataagtccgcatgatactaatggttgtaatgtagtggtgaaatggctagattaagggcccgtttggttcctttagttcaaggattaaagtttagttagaagactaaagtttagtccctatcctatttggttctaaagactaaaagtattcaaaacatactacatgaatcataagagaaccaaaataccccttaacattcttccttctcccgtcattagtgcaaccgaaataaaggaggggtaaaaagtggaatttatatggtttagtcccttttagtcacctcttgagaaactagagactaaaacagtttagtccctgttttagtcccatcgtttggcaatttagggactaaatgagactaaaatgaagggactaatctttagtcactcaaaccaag

SEQ ID NO: 47958 - DNA, 2523 bp, Zea Mays
cttcttcgtgcacggctgggagcaagctgctgcccctctccctggccggcgccctctcccgaggccaccccctccctcagcttcgtcttcagccgccgccgaaccagggcgacctccccacgcccgctgccactcccatccctcccctctctgcttatggtcgcgtgccctagcatccgctcgcccctgcgcgcaatcctcccccatggcgagctcgccctcaactccctaccacggtgctcgccaggctcgctggcgtccatagccgcacctccctagacgccgccagttcgccggtctccggaccgttgctcctccatcgccaggctgtgagctctctgccccatcaccagcaccactgccggcgctccctgctcacgcgcgccgtgctgcccgtgccggtgcatgcttgcctcgccgcccgcgcgctcagccgtgcttgctcaccagctcgcccatcgccgctcgcgtgctctgctgctagcagcagtcgagtgcatgcgtgtgggatacgaccatctgcttgctcctgcaactctgctgctactgtgtgactacgtgcgtggatatggcaaagcccaaaccggccctcggccgagaagatagaccacagggatccgaatcttttctcgaccagtgccgacgatgctatcagcgtgctccctctcaccttgtttgtttgtttctgctgccatggtagtactttatttgatcgatttctgctgccatgtttgctatctccggtgtgtctattgtgttcctttttttctcttttaatcttgtatacaatctattttttgtacttattttattattattattatcagcaaagtgcgagtgttggtgtagtgggctagtgcgtagtggttgtaggcttagcgcttaagcatgtggttatttctttatttgaagggtccagtagtaatgcaagtgtcgtgggggtgctggctaagcatgagatgctgctaggtgtttgtgtgtattgattaattagtgaaatgcaagtgctaagtgcaccggtgtgtggtgacaaaaattccttagtatcttctgtgcctgagcatttagaggagtaatacaacatttcatatattttataagaatttgtctttgacaatagatcattttaagcttgcacaacattacacaaagagtgtaaaataattttggaagtcagattatattcatattagccttgttgactacctttccttttgcttcctatttttagcactctcatggattgtgcttcaatgatgaaagaagtccagactccacatttccatacattatttcacaatgcctctataagtgtactgaaactgtattttttctcagttaaacttgggaattaccattcatccgtggccgctgttgtaaataatgatacttctgctcaagaggatgaacaacacactattcgaagtatacttgatcagggcaagacaacaactacaataggaaaagcttctcacagagtacttgggaatggataatatgcttgctcttgtttgcaagacttatgatggtgttaagggtcttgagaaatatgacaaggatgacatcattgataagactagtggcattcatggacttggtcgctctgttggaaaatttgtagatggaagatttattgtcttttgtcttgaaaacttgaggccattttctagtgatgttatcattgacgatccacaaagaaagcttattttacatagaccaaggttgcctggaggagagtcgcctcctggttttctggattttgtagtaaatatgatccacctggaccgagcacacttgaggttcctcatagccagtggccatggtcttagggaaactttgttttcccatttacaagtttataagactagaactaacattcaaagttcccttcctctgataaaagatggtgttgtttctctagatggtggtctactgagacccaatggctcattctgccttggccatagcaagaatcttgaagtgaaatttgctgtaaccactgatgtttcaagtttacttgaaaatgtcgttgaaatggaggaacaagttaaacgtaagaattgggagaaggaaatggtttgaaaagggaggaagatctgctgaaacaagttaaggaattatacaggaagcaaaaacaagagctcatggattatgtcactcaaccagcagtgacacatacgtcacgtgattcgccagcaactcattcacccgcaactcctgggagtaatctgtttggagccaagctctccaacaagtggcggtaacattttggtggcgtacgtccctattttgttggggcttattgcttgttctggcatcagcacgacgtaactagcttttgccacaagcttggtgttagtttgtgagggtgataggccagtgaaattgttttgctgcttagcttagttggccctatggataccaattgatctatagacagccgggaacttggctaatttattatgactatggatgagacttttgtgatgtaattgatgagattattgatttaaatattgttat

SEQ ID NO: 47959 - DNA, 2546 bp, Zea Mays
cttcttcgtgcacggctgggagcaagctgctgcccctctccctggccggcgccctctcccgaggccaccccctccctcagcttcgtcttcagccgccgccgaaccagggcgacctccccacgcccgctgccactcccatccctcccctctctgcttatggtcgcgtgccctagcatccgctcgcccctgcgcgcaatcctcccccatggcgagctcgccctcaactccctaccacggtgctcgccaggctcgctggcgtccatagccgcacctccctagacgccgccagttcgccggtctccggaccgttgctcctccatcgccaggctgtgagctctctgccccatcaccagcaccactgccggcgctccctgctcacgcgcgccgtgctgcccgtgccggtgcatgcttgcctcgccgcccgcgcgctcagccgtgcttgctcaccagctcgcccatcgccgctcgcgtgctctgctgctagcagcagtcgagtgcatgcgtgtgggatacgaccatctgcttgctcctgcaactctgctgctactgtgtgactacgtgcgtggatatggcaaagcccaaaccggccctcggccgagaagatagaccacagggatccgaatcttttctcgaccagtgccgacgatgctatcagcgtgctccctctcaccttgtttgtttgtttctgctgccatggtagtactttatttgatcgatttctgctgccatgtttgctatctccggtgtgtctattgtgttcctttttttctcttttaatcttgtatacaatctattttttgtacttattttattattattattatcagcaaagtgcgagtgttggtgtagtgggctagtgcgtagtggttgtaggcttagcgcttaagcatgtggttatttctttatttgaagggtccagtagtaatgcaagtgtcgtgggggtgctggctaagcatgagatgctgctaggtgtttgtgtgtattgattaattagtgaaatgcaagtgctaagtgcaccggtgtgtggtgacaaaaattccttagtatcttctgtgcctgagcatttagaggagtaatacaacatttcatatattttataagaatttgtctttgacaatagatcattttaagcttgcacaacattacacaaagagtgtaaaataattttggaagtcagattatattcatattagccttgttgactacctttccttttgcttcctatttttagcactctcatggattgtgcttcaatgatgaaagaagtccagactccacatttccatacattatttcacaatgcctctataagtgtactgaaactgtattttttctcagttaaacttgggaattaccattcatccgtggccgctgttgtaaataatgatacttctgctcaagaggatgaacaacacactattcgaagtatacttgatcagggcaagacaacaactacaataggaaaagtaaataatgataacctcagcaggcttctcacagagtacttgggaatggataatatgcttgctcttgtttgcaagacttatgatggtgttaagggtcttgagaaatatgacaaggatgacatcattgataagactagtggcattcatggacttggtcgctctgttggaaaatttgtagatggaagatttattgtcttttgtcttgaaaacttgaggccattttctagtgatgttatcattgacgatccacaaagaaagcttattttacatagaccaaggttgcctggaggagagtcgcctcctggttttctggattttgtagtaaatatgatccacctggaccgagcacacttgaggttcctcatagccagtggccatggtcttagggaaactttgttttcccatttacaagtttataagactagaactaacattcaaagttcccttcctctgataaaagatggtgttgtttctctagatggtggtctactgagacccaatggctcattctgccttggccatagcaagaatcttgaagtgaaatttgctgtaaccactgatgtttcaagtttacttgaaaatgtcgttgaaatggaggaacaagttaaacgtaagaattgggagaaggaaatggtttgaaaagggaggaagatctgctgaaacaagttaaggaattatacaggaagcaaaaacaagagctcatggattatgtcactcaaccagcagtgacacatacgtcacgtgattcgccagcaactcattcacccgcaactcctgggagtaatctgtttggagccaagctctccaacaagtggcggtaacattttggtggcgtacgtccctattttgttggggcttattgcttgttctggcatcagcacgacgtaactagcttttgccacaagcttggtgttagtttgtgagggtgataggccagtgaaattgttttgctgcttagcttagttggccctatggataccaattgatctatagacagccgggaacttggctaatttattatgactatggatgagacttttgtgatgtaattgatgagattattgatttaaatattgttat

SEQ ID NO: 47960 - DNA, 1904 bp, Zea Mays
cttcttcgtgcacggctgggagcaagctgctgcccctctccctggccggcgccctctcccgaggccaccccctccctcagcttcgtcttcagccgccgccgaaccagggcgacctccccacgcccgctgccactcccatccctcccctctctgcttatggtcgcgtgccctagcatccgctcgcccctgcgcgcaatcctcccccatggcgagctcgccctcaactccctaccacggtgctcgccaggctcgctggcgtccatagccgcacctccctagacgccgccagttcgccggtctccggaccgttgctcctccatcgccaggctgtgagctctctgccccatcaccagcaccactgccggcgctccctgctcacgcgcgccgtgctgcccgtgccggtgcatgcttgcctcgccgcccgcgcgctcagccgtgcttgctcaccagctcgcccatcgccgctcgcgtgctctgctgctagcagcagtcgagtgcatgcgtgtgggatacgaccatctgcttgctcctgcaactctgctgctactgtgtgactacgtgcgtggatatggcaaagcccaaaccggccctcggccgagaagatagaccacagggatccgaatcttttctcgaccagtgccgacgatgctatcagcgtgctccctctcaccttgtttgtttgtttctgctgccatgttaaacttgggaattaccattcatccgtggccgctgttgtaaataatgatacttctgctcaagaggatgaacaacacactattcgaagtatacttgatcagggcaagacaacaactacaataggaaaagtaaataatgataacctcagcaggcttctcacagagtacttgggaatggataatatgcttgctcttgtttgcaagacttatgatggtgttaagggtcttgagaaatatgacaaggatgacatcattgataagactagtggcattcatggacttggtcgctctgttggaaaatttgtagatggaagatttattgtcttttgtcttgaaaacttgaggccattttctagtgatgttatcattgacgatccacaaagaaagcttattttacatagaccaaggttgcctggaggagagtcgcctcctggttttctggattttgtagtaaatatgatccacctggaccgagcacacttgaggttcctcatagccagtggccatggtcttagggaaactttgttttcccatttacaagtttataagactagaactaacattcaaagttcccttcctctgataaaagatggtgttgtttctctagatggtggtctactgagacccaatggctcattctgccttggccatagcaagaatcttgaagtgaaatttgctgtaaccactgatgtttcaagtttacttgaaaatgtcgttgaaatggaggaacaagttaaacgtaagaattgggagaaggaaatggtttgaaaagggaggaagatctgctgaaacaagttaaggaattatacaggaagcaaaaacaagagctcatggattatgtcactcaaccagcagtgacacatacgtcacgtgattcgccagcaactcattcacccgcaactcctgggagtaatctgtttggagccaagctctccaacaagtggcggtaacattttggtggcgtacgtccctattttgttggggcttattgcttgttctggcatcagcacgacgtaactagcttttgccacaagcttggtgttagtttgtgagggtgataggccagtgaaattgttttgctgcttagcttagttggccctatggataccaattgatctatagacagccgggaacttggctaatttattatgactatggatgagacttttgtgatgtaattgatgagattattgatttaaatattgttat

SEQ ID NO: 47961 - DNA, 675 bp, Zea Mays
ggaaactttgttttcccatttacaagtttataagactagaactaacattcaaagttcccttcctctgataaaagatggtgttgtttctctagatggtggtctactgagacccaatggctcattctgccttggccatagcaagaatcttgaagtgaaatttgctgtaaccactgatgtttcaagtttacttgaaaatgtcgttgaaatggaggaacaagttaaacgtaagaattgggagaaggaaatggtttgaaaagggaggaagatctgctgaaacaagttaaggaattatacaggaagcaaaaacaagagctcatggattatgtcactcaaccagcagtgacacatcaactcattcacccgcaactcctgggagtaatctgtttggagccaagctctccaacaagtggcggtaacattttggtggcgtacgtccctattttgttggggcttattgcttgttctggcatcagcacgacgtaactagcttttgccacaagcttggtgttagtttgtgagggtgataggccagtgaaattgttttgctgcttagcttagttggccctatggataccaattgatctatagacagccgggaacttggctaatttattatgactatggatgagacttttgtgatgtaattgatgagattattgatttaaatattgttat

SEQ ID NO: 47962 - DNA, 2159 bp, Zea Mays
aaggaccgcgtccatgcgtgtggcgacgacgcctacccccgcgcaggccgcagccccaccgccgcgttccctcctccccactcgtgtgggaagctcagcacaaagttcgcgttgcgccgggcggctcgtccttcttggaaatcctcccacgcaatcgcctccccgccccgcacccgcgtgcgtgagacgccgcctcgcactgccacagtgccaccgccgccccccaccccggggcgccgatctcgcgtcgcgtcgccctggcgaggtggtggcgggaggatgggggcgtgcgtgtcgcggcccagcgcgtgcgtgggcaagccccacacgccgcggtccggcgacgccagcggccgctcgggcggcgggggtggggcgcggcggaggcgcagccgccgtgtcgggaaggggcggaggacggcgccatcgcgcgccgcgtcgatggagaccatccaggaggccgaggtgcccggttcgacgtccgccgccgcggccgatcaccggacgtacagcaaccccgcgttccaagtgtccgggaacattgaggaggcttggtacgattccttggcgatgagcgagtcggatgccgaagacgatttccacagcgtgcaagatgattctttttcattgaatggcttcgagaacgaagctgcattgagcatgagagatggcaacggtgggagcttcaatggagctgcgcaatcaggcgagcagcaacataaaaagccaaagtccagcgaactgtcaaaggggagcttggagaatggtgtgaggtcgtccatgagcaacgaggatgcggtgagtttttctggtgcggacaacactcacggtggagagaggatactggaagtttgcgggcttctgccaaataattgtctaccctgcattgcctctgctgttggggtaagcgagaagaagagaactctttcctcgagccctactcattcaatgaggatgccttctttgaagctttccttcaagaagaagtcaggggaagctcatccatcttccacactacgtgccattgtatccagcttcattatttcagaatgagactgatggggaagggatgagctttgttttgtactttaggctttctgatggttactcgaaagagcttccaccttcattcattgaaagtattagaaggttgattgacgaccatgtagagaagataaaagcatttccaatggaaacgactataccattccgagagcggctgaagatacttggcagggtggctaatctggaggatcttcctttgagtgcagcggagaggaagctaatgcatgcgtataacgagaagcctgtcctttctagaccacagcatgagttttacctgggtgataactacttcgagatcgacattgacatgcacagatttagctacatctcaaggaaaggttttgcaacatttttggacaggctaaaagcatgtgttctagatgttgggctaactattcagggaaataaagctgaagaactgccggaacaaatcttatgctgtgttaggttgaatgggatagattacaccaaataccagcctcttttgactcacgctgcctgaaataaacgcttacaagaaccagctaaccgtcatttggaattggatgctgagaggtaaccataccaggacccagactcctggagatttcagaccagagccgctgtcgattatcacagcttctgctgaaacgccatcatccgagcttaggtggggcaggtgactcattgacaactggctgctcccgttcgaatccgtggtgctaatgtagtcgtttctttctgaacacggggggaaaaggcggagactgcggtacatgtaaatctgtaaatcattgctggatagctccggttgcctcccttttactacccaacattctagatttagtaaatataactaattctgactatggtcgagtaggtttaggcgttaaagacctctacaacaatttcactatatccgtacaggaacaggatgtcgtcttggcccaaaatatcgtgtacaacttgcatgatgatgtgttgttaactttggaagctctatatggttcagggctatcgtcccaaattatcgtgtacaagtacaatttttatgatgttgagttcgtaacaatgcgaggttgtcggatggtaagagcaactaaaaaaccatcttt

SEQ ID NO: 47963 - DNA, 1581 bp, Zea Mays
atgctttctgtatctacgaaggatttcctggaaaggcctctagcaggttctcaagtacagttgtgcttgctggaaacaaatatgcccaacagttggactcatattgatcctggtacattccgagtccgtggagcaaactattttagggataagaaaaaagagcttgctccaaattatgctgcatattatccatttggagttgatgtgtacttatcgccacagaaactcaatcatatatctcgatttgttgaacttcctgatattcaactctccagcaagctcccacctcttttggtggtcaatgtacaggtgccattgtatccagcttcattatttcagaatgagactgatggggaagggatgagctttgttttgtactttaggctttctgatggttactcgaaagagcttccaccttcattcattgaaagtattagaaggttgattgacgaccatgtagagaagataaaagcatttccaatggaaacgactataccattccgagagcggctgaagatacttggcagggtggctaatctggaggatcttcctttgagtgcagcggagaggaagctaatgcatgcgtataacgagaagcctgtcctttctagaccacagcatgagttttacctgggtgataactacttcgagatcgacattgacatgcacagatttagctacatctcaaggaaaggttttgcaacatttttggacaggctaaaagcatgtgttctagatgttgggctaactattcagggaaataaagctgaagaactgccggaacaaatcttatgctgtgttaggttgaatgggatagattacaccaaataccagcctcttttgactcacgctgcctgaaataaacgcttacaagaaccagctaaccgtcatttggaattggatgctgagaggtaaccataccaggacccagactcctggagatttcagaccagagccgctgtcgattatcacagcttctgctgaaacgccatcatccgagcttaggtggggcaggtgactcattgacaactggctgctcccgttcgaatccgtggtgctaatgtagtcgtttctttctgaacacggggggaaaaggcggagactgcggtacatgtaagggcatgtttggtttgtggctaaatgtgccacactttgcctaaggttagtcgttcgaattgaataactaaccttaggcagaaaagttaggcaaaatgtggcaattgaggtaaagaaccaaacatgccctaaatctgtaaatcattgctggatagctccggttgcctcccttttactacccaacattctagatttagtaaatataactaattctgactatggtcgagtaggtttaggcgttaaagacctctacaacaatttcactatatccgtacaggaacaggatgtcgtcttggcccaaaatatcgtgtacaacttgcatgatgatgtgttgttaactttggaagctctatatggttcagggctatcgtcccaaattatcgtgtacaagtacaatttttatgatgttgagttcgtaacaatgcgaggttgtcggatggtaagagcaactaaaaaaccatcttt

SEQ ID NO: 47964 - DNA, 1125 bp, Zea Mays
cagagacatcatgcctacgttttcagggttgtagctgaagtcccctttggggtcctgccattctttgaagtaaagagtccggatttaacttcttaggcatatagtcgttcaagaggttgattgacgaccatgtagagaagataaaagcatttccaatggaaacgactataccattccgagagcggctgaagatacttggcagggtggctaatctggaggatcttcctttgagtgcagcggagaggaagctaatgcatgcgtataacgagaagcctgtcctttctagaccacagcatgagttttacctgggtgataactacttcgagatcgacattgacatgcacagatttagctacatctcaaggaaaggttttgcaacatttttggacaggctaaaagcatgtgttctagatgttgggctaactattcagggaaataaagctgaagaactgccggaacaaatcttatgctgtgttaggttgaatgggatagattacaccaaataccagcctcttttgactcacgctgcctgaaataaacgcttacaagaaccagctaaccgtcatttggaattggatgctgagaggtaaccataccaggacccagactcctggagatttcagaccagagccgctgtcgattatcacagcttctgctgaaacgccatcatccgagcttaggtggggcaggtgactcattgacaactggctgctcccgttcgaatccgtggtgctaatgtagtcgtttctttctgaacacggggggaaaaggcggagactgcggtacatgtaaatctgtaaatcattgctggatagctccggttgcctcccttttactacccaacattctagatttagtaaatataactaattctgactatggtcgagtaggtttaggcgttaaagacctctacaacaatttcactatatccgtacaggaacaggatgtcgtcttggcccaaaatatcgtgtacaacttgcatgatgatgtgttgttaactttggaagctctatatggttcagggctatcgtcccaaattatcgtgtacaagtacaatttttatgatgttgagttcgtaacaatgcgaggttgtcggatggtaagagcaactaaaaaaccatcttt

SEQ ID NO: 47965 - DNA, 2862 bp, Zea Mays
acgatagtacctggacggctggacccaacataccgaatccgacgctccatcgagtgtgtgcggtggcggcgggaggagacgaaagagaaatatgcaggcggtggcacgggcggcgcgtgggctcgcggctgcggcggtggcacgggcggcgcgtgggctcgcggctgcggctgcggctgcgcggccgtcggtgatggaggcagggcacagcgggcaggtgcagcaagctcggggcatcgtggtgcaggtgagggacgggaatctggagccggcgctgtcgatcatggagcgcaagatgcggtccagcggcacggagcgcctcatccgggcgcacacccttctcgacatcaaggactcggagaaccgcttgctcgcgcttaaggagcttatgcagcgtgtccgttcccaggagctcatgctccgcaagatcgtcatcaagcagatcagaaccatggaggaggataatgcagactggtgcgatgaaaatgttaagatagcttgtgaaatatttgctgaggaagtaagagcaaagaacagatcaggttctcacttaaacaagcttgggtacaacaatgtaatggtcaagttcaaagagaggacagggaaaacttacagcgagctacagttcaaaaataaatgggacaagctgaaaaaagattatagtaattggaaacaattgggaaaagagacaggatgtggttgggaccctaacaagaagttgtatgttgctccagattggtggtgggagaaggcaaacatacaattcaaaggcattagcaagtttaaagacaagtcacttcaaaatgcagaagaattgagtgtcatgtttgaagatcttcggaacaccggtgatgatcactgggtcccaaccagtggtgagctaccccaagacactgaagcacaaatacacgatgccatcaacattgaagatgaaaatgctagtgattgtggggaagacacaccatctagttccacatccaagagacgtcgtgtggttgtgacagataaaggtaaaaaaccgaagactacgggaggacaatggatgcaagaccagatgtctaaactttttgaattgaataagcagacaacaacatcttgtgagtctatggtcctggcaagaacacaagagacacctggatcttctataaaagatgttatgcaattagataaaggtaaaaaaccgaagactacgggaggacaatggatgcaagaccaaatgtctaaacttgttgaattgaataagcagacaacatcttgtgagtctatgttcctggcaagaacacaagagacacctggatcttccataaaagatgttatgcaattggtgaaggcatgtggtgctatagctggcagcaaagagcacttcattgcaactcaagtctttacaaaaaaaaatgaaagagaaatgttcttgactttggatacacccgaggagcgctttcagtggttatcaatgaagtatgaatggatgacaatgaacaagaagggctagttagagctactttgttatgcatttatcgtgtcattttttgtttttaccttaccaaacttatctattagaataaattcaaacattctggggaaacaattagtagaaaatttatggaaattttctgttgtgtggtgggcatgtccaaccaatatacaaggcctaaagatccaaactttcgtaatgtgcacgataggataagaaatgatccaaggatatggccacactttaaagattgcattggagccattgatgggactcatatttgtgcaaatccacctccacaagattttcttaggtacctaggaagatctggtaaagcaacacaaaatgtgatggcagttgttgattttgacatgcgtttcacctttgcctctattggtcaacctggttccatgcatgatacaagtgttctctataatgctctacaaatagatgaagatatcttcccacatccacctctggggaaatattatgttgttgatgctggatattcgaatagacctggatacttatcaccatataaaggtcaaaggtaccacgttccagagtggagaagaggcccggctcctagtggcgagcaagagatgttcaaccatttgcactcaagtcttcgcaatgttgttgagcgtgtatttggtgtatggaagatgaaatggagaattcttctcaacatgccaaaatatccaatggtaaagcaaaagatgattgttgcagctaccatgtgtctccacaactttattcgtcaacatcatgcacttgacaaggattttgagagatgtgaccgagaccaagattatgtgcccactataccagcaagaggttaattgacgatcatgtagagaagataaaagcatttccaatggaaacgactataccattccgagaacggctgaagatacttggcagggtggctaatctggaggatcttcctttgagtgcagcggagaggaagctaatgcatgcgtataacgagaagcctgtcctttctagaccacaacatttgttttacctgggtgataactacttcgagatcgacattgatatgcacagatttagctacatctcgaggaaagggtttgaaacatttttggacaggctaaaagcatgtgttctagatgttgggctaactattcagggaaataaagctgaagagctgccggaacaaatcttatgctgtgttaggttgaatgggatagattacaccaaataccagcctcttttgactcacgctgcctgaaataaacgcttacaagaaccagctaaccgtcatttggatgctgagaggtaaccataccaggagtccaggaccagactccttgagatttcagaccagagccgctgtcgattatcacagcttctgctgaaacgcc

SEQ ID NO: 47966 - DNA, 2183 bp, Zea Mays
cttccgtccattactacgccatctcttcgtctcccgtcttctagtgtgcaagaaccatggaggaggataatgcagactggtgcgatgaaaatgttaagatagcttgtgaaatatttgctgaggaagtaagagcaaagaacagatcaggttctcacttaaacaagcttgggtacaacaatgtaatggtcaagttcaaagagaggacagggaaaacttacagcgagctacagttcaaaaataaatgggacaagctgaaaaaagattatagtaattggaaacaattgggaaaagagacaggatgtggttgggaccctaacaagaagttgtatgttgctccagattggtggtgggagaaggcaaacatacaattcaaaggcattagcaagtttaaagacaagtcacttcaaaatgcagaagaattgagtgtcatgtttgaagatcttcggaacaccggtgatgatcactgggtcccaaccagtggtgagctaccccaagacactgaagcacaaatacacgatgccatcaacattgaagatgaaaatgctagtgattgtggggaagacacaccatctagttccacatccaagagacgtcgtgtggttgtgacagataaaggtaaaaaaccgaagactacgggaggacaatggatgcaagaccagatgtctaaactttttgaattgaataagcagacaacaacatcttgtgagtctatggtcctggcaagaacacaagagacacctggatcttctataaaagatgttatgcaattagataaaggtaaaaaaccgaagactacgggaggacaatggatgcaagaccaaatgtctaaacttgttgaattgaataagcagacaacatcttgtgagtctatgttcctggcaagaacacaagagacacctggatcttccataaaagatgttatgcaattggtgaaggcatgtggtgctatagctggcagcaaagagcacttcattgcaactcaagtctttacaaaaaaaaatgaaagagaaatgttcttgactttggatacacccgaggagcgctttcagtggttatcaatgaagtatgaatggatgacaatgaacaagaagggctagttagagctactttgttatgcatttatcgtgtcattttttgtttttaccttaccaaacttatctattagaataaattcaaacattctggggaaacaattagtagaaaatttatggaaattttctgttgtgtggtgggcatgtccaaccaatatacaaggcctaaagatccaaactttcgtaatgtgcacgataggataagaaatgatccaaggatatggccacactttaaagattgcattggagccattgatgggactcatatttgtgcaaatccacctccacaagattttcttaggtacctaggaagatctggtaaagcaacacaaaatgtgatggcagttgttgattttgacatgcgtttcacctttgcctctattggtcaacctggttccatgcatgatacaagtgttctctataatgctctacaaatagatgaagatatcttcccacatccacctctggacctggatacttatcaccatataaaggtcaaaggtaccacgttccagagtggagaagaggcccggctcctagtggcgagcaagagatgttcaaccatttgcactcaagtcttcgcaatgttgttgagcgtgtatttggtgtatggaagatgaaatggagaattcttctcaacatgccaaaatatccaatggtaaagcaaaagatgattgttgcagctaccatgtgtctccacaactttattcgtcaacatcatgcacttgacaaggattttgagagatgtgaccgagaccaagattatgtgcccactataccagcaaggtataggaaccaagccctttctcaaagtttattggataccacatcacatgctaatgacaggacaatggacagattccgtgatgatcttgctcttgctattagttcatctagggcataagcttaaggatatttggattttattttagcctccttttgggcatgtggttgtattttgttggaccttaatgaacaataatggatgcatcctgccccgttgttccctttcgatcttcaatagaatctagaaattttcttctgcttgcttttgtctggcgcaatgggaaaatatagaaaatataaaaaaaa

SEQ ID NO: 47967 - DNA, 2814 bp, Zea Mays
tactacgccatctcttcgtctcccgtcttctagtgtgcaaggtgaagttgcattcctctctccctctaatctgtagccggttgaggtgaggactgaggacgcaagtgttttttccttctgctcaagctcctgcagtctctattggtttcttgatttgaaaatcatttttaagaaaatccttgcacacgagtatagtagctgtgaaaattcaaagctcacacgtccagcccaatagcaccgtttctagaaatgttctgcacgaaaaaataaataaaatcacaagtcgagaagctcatcatcaatctatgcttgctgctttatacctgttgttttccatgttagaagagctagcactttgatttatcttttctttattattcatggttgtggcaataacagaaccatggaggaggataatgcagactggtgcgatgaaaatgttaagatagcttgtgaaatatttgctgaggaagtaagagcaaagaacagatcaggttctcacttaaacaagcttgggtacaacaatgtaatggtcaagttcaaagagaggacagggaaaacttacagcgagctacagttcaaaaataaatgggacaagctgaaaaaagattatagtaattggaaacaattgggaaaagagacaggatgtggttgggaccctaacaagaagttgtatgttgctccagattggtggtgggagaaggcaaacatacaattcaaaggcattagcaagtttaaagacaagtcacttcaaaatgcagaagaattgagtgtcatgtttgaagatcttcggaacaccggtgatgatcactgggtcccaaccagtggtgagctaccccaagacactgaagcacaaatacacgatgccatcaacattgaagatgaaaatgctagtgattgtggggaagacacaccatctagttccacatccaagagacgtcgtgtggttgtgacagataaaggtaaaaaaccgaagactacgggaggacaatggatgcaagaccagatgtctaaactttttgaattgaataagcagacaacaacatcttgtgagtctatggtcctggcaagaacacaagagacacctggatcttctataaaagatgttatgcaattagataaaggtaaaaaaccgaagactacgggaggacaatggatgcaagaccaaatgtctaaacttgttgaattgaataagcagacaacatcttgtgagtctatgttcctggcaagaacacaagagacacctggatcttccataaaagatgttatgcaattggtgaaggcatgtggtgctatagctggcagcaaagagcacttcattgcaactcaagtctttacaaaaaaaaatgaaagagaaatgttcttgactttggatacacccgaggagcgctttcagtggttatcaatgaagtatgaatggatgacaatgaacaagaagggctagttagagctactttgttatgcatttatcgtgtcattttttgtttttaccttaccaaacttatctattagaataaattcaaacattctggggaaacaattagtagaaaatttatggaaattttctgttgtgtggtgggcatgtccaaccaatatacaaggcctaaagatccaaactttcgtaatgtgcacgataggataagaaatgatccaaggatatggccacactttaaagattgcattggagccattgatgggactcatatttgtgcaaatccacctccacaagattttcttaggtacctaggaagatctggtaaagcaacacaaaatgtgatggcagttgttgattttgacatgcgtttcacctttgcctctattggtcaacctggttccatgcatgatacaagtgttctctataatgctctacaaatagatgaagatatcttcccacatccacctctggggaaatattatgttgttgatgctggatattcgaatagacctggatacttatcaccatataaaggtcaaaggtaccacgttccagagtggagaagaggcccggctcctagtggcgagcaagagatgttcaaccatttgcactcaagtcttcgcaatgttgttgagcgtgtatttggtgtatggaagatgaaatggagaattcttctcaacatgccaaaatatccaatggtaaagcaaaagatgattgttgcagctaccatgtgtctccacaactttattcgtcaacatcatgcacttgacaaggattttgagagatgtgaccgagaccaagattatgtgcccactataccagcaagaggttaattgacgatcatgtagagaagataaaagcatttccaatggaaacgactataccattccgagaacggctgaagatacttggcagggtggctaatctggaggatcttcctttgagtgcagcggagaggaagctaatgcatgcgtataacgagaagcctgtcctttctagaccacaacatttgttttacctgggtgataactacttcgagatcgacattgatatgcacagatttagctacatctcgaggaaagggtttgaaacatttttggacaggctaaaagcatgtgttctagatgttgggctaactattcagggaaataaagctgaagagctgccggaacaaatcttatgctgtgttaggttgaatgggatagattacaccaaataccagcctcttttgactcacgctgcctgaaataaacgcttacaagaaccagctaaccgtcatttggatgctgagaggtaaccataccaggagtccaggaccagactccttgagatttcagaccagagccgctgtcgattatcacagcttctgctgaaacgcc

SEQ ID NO: 47968 - DNA, 498 bp, Zea Mays
gtgacactttggactgcacattttgggttgggacagaagggcgcagaagggcagaattgtctaaaatggcattgaaaccaaaggcctgaacgtgggttggagagtccacatacagtcccagagaaccgcaggaccttaccgtctgctgtcgcgtgtcgcctgagccctagacagccgtggtgtgttctgcttctgcctgtacgtaccagtgtctggttgttgctcccggtgtcaaatggacatggatgatctgtagaaatgtatgtctataatatgctgttactgaacatgcgtaggatgtaggcaaattaggccttcctcagtctcttgtagtcccggactatcgtgtcatcgtgtgtggcaccatgaacttcccaacaactagctagagtgcccgccttatggtttctgatgatgcaggctatgccgtttttcttcttcttttctgacactgcaaaaacttcgtcgcatctgaaatggaggataatggctgactac

SEQ ID NO: 47969 - DNA, 3196 bp, Zea Mays
ctccgatctccactaatcaatgccaccggctccgcctcgtacacctccctcctcccctgatcaaaaccgcccggcgccaccgccgtccactccgcttttctcttcccaccgcctgcttcggcagtcgtcactcccccgtcccagcagtaccggctgcttattcacctgtccgacactccgacctgcgccacgccaccctgccgtttgaggcgcagctgcggccgcagtcgagaggacggcggcgaatccctcccgcatcgggctcggccctgggccgcactcggaagaaggaaaaaaaaaacccattccctcgaatcccttccctgcttctgctcgcctgaaaaaagctctcgttttgcaggcccgtgcccgccattacgcgcccccgattcaatgccgtcttgagctcgtctcgtcgcacataacagtatcacgtcctccccgccccgctgcttgctccctctcgtgctcctcccacgcacggcacgcagcacgctctcatcctcctcctcacgcctcccgccccaccctcacaggccggaaagctccaaccgagaggcctctgtttgtatgtaggacacccagagcgcgtcaagaaaatatacgagagggaaggttgggagcagttcccctgtgtcccgtcccctcatgtgcctatacctgcctgccgattctatcttggccgaccactcccttgtcgtcccaattcaattctgattgccggcgcgcgagtggtgtggtgtgtcgtcttcgtgcgcgtgggaatgcaggttttggaggcaccagcccactaatcgcgacgctccacgggacttgcagctcgagtttctttcgaagaggagcgtgaaactgacgggagctgggcgtgggcgagaatggagagccgaggacggcggctgcggagccccgagcgccagaggccggcgtcgcggaaggtgccggtggtgtactacctcacccggagccgccacctcgagcacccgcacttcgtcgaggtgccgctggcctcgccggagcggctctatctcagagatgtcatcaaccacctcaacgtggtgcgcggcaagggcatggcggcgatgtactcgtggtcctgcaagagttttcttgaggtgatttttattggcgaactttttgggtggttgtttgttcccgtgttgatcggccggtcgaagggttgcaggagctacaagaacgggttcgtgtggcacgacctcgcggaggatgacctcgtcgtcccggcaaccgacggcgagtacgtgctcaagggctccgagctcgtcgaccagtcctcttcaggtccgttttaccctgtcactgtcagtaacggcagccagaagcaacagagcaggccgaaagagggcgcacggcaggcattgccaagagaccattcccacccgtcctgccctcccagtagcgtgacagttagagaagccaaggcccggcggtcaccttgtgtgcctccacaagacgaggacgacgacaccacctctccgcgccgggatcgctccttggagaccatgccgcagcaggagctggagccccagcagaggaacgagagggctcagccgccagccagcgggtctgcgagcccagtggagttcagagttcacaagcagcacgccggttgcatggacgctgcgactcaaaccgatgatcttggtcgcagaacacccgagctgcgcaagaagagtctgaggagcacagaccatgacgccgtcgttcgtgaagtcacagagtgctggcagaggcagagccatccttgcaggtcagcagacctcccaggggtgtccagggaagaactcctgcaccagtctactactccaccgagcacaccgtcgacccgtggcaagtccgcgagcttagagtcgctgatacgagcggacaacgcgacgagcagcttcaggatccttgaggaggaggaggaagaggaggaggaggaggaggaggaggaggaggaggatatcgtcgtgctcagtgcctgcccgaagctgaagccggcgaacgtgctggtgcagctcatcagttgcggctcgctttcggtgaaaggccacgaagacgccgccggacctgttcgggcatacaagcctaggctcccaagcatgaagctcccctccccgtttgtttctcgcgccatggcgatgggcgagcttgactacctgtcagagaaccccagcaggttggtgggagtgaggatggaggagaaggaatacttcagtgggagccttgttgagacgaagacgcaacgagatggtacggctgagaggtactcggcgctcaaacggtcttcttcctacaatgcagaaagagaaagggccagcgacgctctggattgcacaagacgtgaagagggtgaaacagacgacagatcgtcgtcgcgcgcgaggtgcctcccgcggacgccgatgatcctggcatccttcctgcacccgaggggcgacccgctcaagtctcccgtatcggactgccgccggaactcctcggcccgccggcaggactgcgacgcggcctccggcgacggcgggagcaggaggttcgccgccgacgcctctgtcgtcgcgtccgcggtggctgcagggacggaggaatccttcagagctaatttggtgacaaggggatcccgagaggatcggaggggattgagggggaaatgaactaatttccccctcaatccctccatctcccggatcggatcaccaaatcaaccctcaggaaggaggagaggctcgtcagggtcgaggaaagttaagtgccgcccgcccgtggcctttctttacctcaaacgtactgtgaactctgtcagtgctcggctgtcgtccggagcccgcgtcgtgatccactgcaccatcgcttgcaacgacagcgacgaaggctctgaacgctcagggtcaggggagtcacgatggctgcagggagatcatgctgctgctttggaaaattagtgagagtttacattgcttgaaacgtgtattcagctagatgatccttttcactttcttaatttctttccttagaaattttatttaggtccccttatcattgtatcagctatgcgtttcgccaaaaaaaaaagatgtgtcgtttatatactgtctccgccgtggtttcataaaatttacttgtattggtcaacgatacaagtgcggtgagttggcaattattattcgataaaaaaactgataaaatttactgcaac

SEQ ID NO: 47970 - DNA, 3028 bp, Zea Mays
ctccgatctccactaatcaatgccaccggctccgcctcgtacacctccctcctcccctgatcaaaaccgcccggcgccaccgccgtccactccgcttttctcttcccaccgcctgcttcggcagtcgtcactcccccgtcccagcagtaccggctgcttattcacctgtccgacactccgacctgcgccacgccaccctgccgtttgaggcgcagctgcggccgcagtcgagaggacggcggcgaatccctcccgcatcgggctcggccctgggccgcactcggaagaaggaaaaaaaaaacccattccctcgaatcccttccctgcttctgctcgcctgaaaaaagctctcgttttgcaggcccgtgcccgccattacgcgcccccgattcaatgccgtcttgagctcgtctcgtcgcacataacagtatcacgtcctccccgccccgctgcttgctccctctcgtgctcctcccacgcacggcacgcagcacgctctcatcctcctcctcacgcctcccgccccaccctcacaggccggaaagctccaaccgagaggcctctgtttgtatgtaggacacccagagcgcgtcaagaaaatatacgagagggaaggttgggagcagttcccctgtgtcccgtcccctcatgtgcctatacctgcctgccgattctatcttggccgaccactcccttgtcgtcccaattcaattctgattgccggcgcgcgagtggtgtggtgtgtcgtcttcgtgcgcgtgggaatgcaggttttggaggcaccagcccactaatcgcgacgctccacgggacttgcagctcgagtttctttcgaagaggagcgtgaaactgacgggagctgggcgtgggcgagaatggagagccgaggacggcggctgcggagccccgagcgccagaggccggcgtcgcggaaggtgccggtggtgtactacctcacccggagccgccacctcgagcacccgcacttcgtcgaggtgccgctggcctcgccggagcggctctatctcagagatgtcatcaaccacctcaacgtggtgcgcggcaagggcatggcggcgatgtactcgtggtcctgcaagagttttcttgaggtgatttttattggcgaactttttgggtggttgtttgttcccgtgttgatcggccggtcgaagggttgcaggagctacaagaacgggttcgtgtggcacgacctcgcggaggatgacctcgtcgtcccggcaaccgacggcgagtacgtgctcaagggctccgagctcgtcgaccagtcctcttcaggtccgttttaccctgtcactgtcagtaacggcagccagaagcaacagagcaggccgaaagagggcgcacggcaggcattgccaagagaccattcccacccgtcctgccctcccagtagcgtgacagttagagaagccaaggcccggcggtcaccttgtgtgcctccacaagacgaggacgacgacaccacctctccgcgccgggatcgctccttggagaccatgccgcagcaggagctggagccccagcagaggaacgagagggctcagccgccagccagcgggtctgcgagcccagtggagttcagagttcacaagcagcacgccggttgcatggacgctgcgactcaaaccgatgatcttggtcgcagaacacccgagctgcgcaagaagagtctgaggagcacagaccatgacgccgtcgttcgtgaagtcacagagtgctggcagaggcagagccatccttgcaggtcagcagacctcccaggggtgtccagggaagaactcctgcaccagtctactactccaccgagcacaccgtcgacccgtggcaagtccgcgagcttagagtcgctgatacgagcggacaacgcgacgagcagcttcaggatccttgaggaggaggaggaagaggaggaggaggaggaggaggaggaggaggaggatatcgtcgtgctcagtgcctgcccgaagctgaagccggcgaacgtgctggtgcagctcatcagttgcggctcgctttcggtgaaaggccacgaagacgccgccggacctgttcgggcatacaagcctaggctcccaagcatgaagctcccctccccgtttgtttctcgcgccatggcgatgggcgagcttgactacctgtcagagaaccccagcaggttggtgggagtgaggatggaggagaaggaatacttcagtgggagccttgttgagacgaagacgcaacgagatggtacggctgagaggtactcggcgctcaaacggtcttcttcctacaatgcagaaagagaaagggccagcgacgctctggattgcacaagacgtgaagagggtgaaacagacgacagatcgtcgtcgcgcgcgaggtgcctcccgcggacgccgatgatcctggcatccttcctgcacccgaggggcgacccgctcaagtctcccgtatcggactgccgccggaactcctcggcccgccggcaggactgcgacgcggcctccggcgacggcgggagcaggagtggactaagccaggcggcggtctcgtccgatccttctcgtattgagggctgtgctctgaacccttggtgttctcgtattgagggctgtgctctgaacccttggtgcaggctgtcgtccggagcccgcgtcgtgatccactgcaccatcgcttgcaacgacagcgacgaaggctctgaacgctcagggtcaggggagtcacgatggctgcagggagatcatgctgctgctttggaaaattagtgagagtttacattgcttgaaacgtgtattcagctagatgatccttttcactttcttaatttctttccttagaaattttatttaggtccccttatcattgtatcagctatgcgtttcgccaaaaaaaaaagatgtgtcgtttatatactgtctccgccgtggtttcataaaatttacttgtattggtcaacgatacaagtgcggtgagttggcaattattattcgataaaaaaactgataaaatttactgcaac

SEQ ID NO: 47971 - DNA, 2103 bp, Zea Mays
tgaaactgacgggagctgggcgtgggcgagaatggagagccgaggacggcggctgcggagccccgagcgccagaggccggcgtcgcggaaggtgccggtggtgtactacctcacccggagccgccacctcgagcacccgcacttcgtcgaggtgccgctggcctcgccggagcggctctatctcagagatgtcatcaaccacctcaacgtggtgcgcggcaagggcatggcggcgatgtactcgtggtcctgcaagaggagctacaagaacgggttcgtgtggcacgacctcgcggaggatgacctcgtcgtcccggcaaccgacggcgagtacgtgctcaagggctccgagctcgtcgaccagtcctcttcaggtccgttttaccctgtcactgtcagtaacggcagccagaagcaacagagcaggccgaaagagggcgcacggcaggcattgccaagagaccattcccacccgtcctgccctcccagtagcgtgacagttagagaagccaaggcccggcggtcaccttgtgtgcctccacaagacgaggacgacgacaccacctctccgcgccgggatcgctccttggagaccatgccgcagcaggagctggagccccagcagaggaacgagagggctcagccgccagccagcgggtctgcgagcccagtggagttcagagttcacaagcagcacgccggttgcatggacgctgcgactcaaaccgatgatcttggtcgcagaacacccgagctgcgcaagaagagtctgaggagcacagaccatgacgccgtcgttcgtgaagtcacagagtgctggcagaggcagagccatccttgcaggtcagcagacctcccaggggtgtccagggaagaactcctgcaccagtctactactccaccgagcacaccgtcgacccgtggcaagtccgcgagcttagagtcgctgatacgagcggacaacgcgacgagcagcttcaggatccttgaggaggaggaggaagaggaggaggaggaggaggaggaggaggaggaggatatcgtcgtgctcagtgcctgcccgaagctgaagccggcgaacgtgctggtgcagctcatcagttgcggctcgctttcggtgaaaggccacgaagacgccgccggacctgttcgggcatacaagcctaggctcccaagcatgaagctcccctccccgtttgtttctcgcgccatggcgatgggcgagcttgactacctgtcagagaaccccagcaggttggtgggagtgaggatggaggagaaggaatacttcagtgggagccttgttgagacgaagacgcaacgagatggtacggctgagaggtactcggcgctcaaacggtcttcttcctacaatgcagaaagagaaagggccagcgacgctctggattgcacaagacgtgaagagggtgaaacagacgacagatcgtcgtcgcgcgcgaggtgcctcccgcggacgccgatgatcctggcatccttcctgcacccgaggggcgacccgctcaagtctcccgtatcggactgccgccggaactcctcggcccgccggcaggactgcgacgcggcctccggcgacggcgggagcaggagtggactaagccaggcggcggtctcgtccgatccttctcgtattgagggctgtgctctgaacccttggtgttctcgtattgagggctgtgctctgaacccttggtgcaggctgtcgtccggagcccgcgtcgtgatccactgcaccatcgcttgcaacgacagcgacgaaggctctgaacgctcagggtcaggggagtcacgatggctgcagggagatcatgctgctgctttggaaaattagtgagagtttacattgcttgaaacgtgtattcagctagatgatccttttcactttcttaatttctttccttagaaattttatttaggtccccttatcattgtatcagctatgcgtttcgccaaaaaaaaaagatgtgtcgtttatatactgtctccgccgtggtttcataaaatttacttgtattggtcaacgatacaagtgcggtgagttggcaattattattcgataaaaaaactgataaaatttactgcaac

SEQ ID NO: 47972 - DNA, 2080 bp, Zea Mays
atggagagccgaggacggcggctgcggagccccgagcgccagaggccggcgtcgcggaaggtgccggtggtgtactacctcacccggagccgccacctcgagcacccgcacttcgtcgaggtgccgctggcctcgccggagcggctctatctcagagatgtcatcaaccacctcaacgtggtgcgcggcaagggcatggcggcgatgtactcgtggtcctgcaagagggttgcaggagctacaagaacgggttcgtgtggcacgacctcgcggaggatgacctcgtcgtcccggcaaccgacggcgagtacgtgctcaagggctccgagctcgtcgaccagtcctcttcaggtccgttttaccctgtcactgtcagtaacggcagccagaagcaacagagcaggccgaaagagggcgcacggcaggcattgccaagagaccattcccacccgtcctgccctcccagtagcgtgacagttagagaagccaaggcccggcggtcaccttgtgtgcctccacaagacgaggacgacgacaccacctctccgcgccgggatcgctccttggagaccatgccgcagcaggagctggagccccagcagaggaacgagagggctcagccgccagccagcgggtctgcgagcccagtggagttcagagttcacaagcagcacgccggttgcatggacgctgcgactcaaaccgatgatcttggtcgcagaacacccgagctgcgcaagaagagtctgaggagcacagaccatgacgccgtcgttcgtgaagtcacagagtgctggcagaggcagagccatccttgcaggtcagcagacctcccaggggtgtccagggaagaactcctgcaccagtctactactccaccgagcacaccgtcgacccgtggcaagtccgcgagcttagagtcgctgatacgagcggacaacgcgacgagcagcttcaggatccttgaggaggaggaggaagaggaggaggaggaggaggaggaggaggaggaggatatcgtcgtgctcagtgcctgcccgaagctgaagccggcgaacgtgctggtgcagctcatcagttgcggctcgctttcggtgaaaggccacgaagacgccgccggacctgttcgggcatacaagcctaggctcccaagcatgaagctcccctccccgtttgtttctcgcgccatggcgatgggcgagcttgactacctgtcagagaaccccagcaggttggtgggagtgaggatggaggagaaggaatacttcagtgggagccttgttgagacgaagacgcaacgagatggtacggctgagaggtactcggcgctcaaacggtcttcttcctacaatgcagaaagagaaagggccagcgacgctctggattgcacaagacgtgaagagggtgaaacagacgacagatcgtcgtcgcgcgcgaggtgcctcccgcggacgccgatgatcctggcatccttcctgcacccgaggggcgacccgctcaagtctcccgtatcggactgccgccggaactcctcggcccgccggcaggactgcgacgcggcctccggcgacggcgggagcaggagtggactaagccaggcggcggtctcgtccgatccttctcgtattgagggctgtgctctgaacccttggtgttctcgtattgagggctgtgctctgaacccttggtgcaggctgtcgtccggagcccgcgtcgtgatccactgcaccatcgcttgcaacgacagcgacgaaggctctgaacgctcagggtcaggggagtcacgatggctgcagggagatcatgctgctgctttggaaaattagtgagagtttacattgcttgaaacgtgtattcagctagatgatccttttcactttcttaatttctttccttagaaattttatttaggtccccttatcattgtatcagctatgcgtttcgccaaaaaaaaaagatgtgtcgtttatatactgtctccgccgtggtttcataaaatttacttgtattggtcaacgatacaagtgcggtgagttggcaattattattcgataaaaaaactgataaaatttactgcaac

SEQ ID NO: 47973 - DNA, 2058 bp, Zea Mays
cctgatcggccagacagataccgaaccgagaccgagagtgcaaaccttccttccaccttccaattccagtagtcccacgcacaaactttccccagctgcctgcgcccgcccaactaccccgcgcgcggcagccggcagcaggtcgtgccatggacgacgacgccacggtcggatcgcggcagcgccagcagcagccggcctcgccggcggcggctgattccagggccatgatggcggagctggacgcgccgctgcacgccctcgggttcgagatggaggagctctccccgtcgcggctcaccggccgcctccccatcactcccatctgctgccagccgttcaaggtgctgcacggcggcgtgtcggcgctggtggcggaggcgctggcgagcatgggcgcgcacatggcgtcggggtaccgccgcgtcgccggcgtgcagctcagcatcaaccacttccgcagcgccgccctcggcgacaccgtcctcgcgcaggccgtccccgtccacgtcggacgctccacacaggtgcgctgcccttggtttttcccttccacggtctatgattgcatcgtcctcgacctcgtcccctttacgaccatcgccagccatctcctcgaccacgcctccgcacgacgatcggcgaacaagctatctggtcaacgacgaccgctagccggctagccctgagtgggtttggtgcgttgaggccttagcatttattaacccatgatcaatctatatttagctcttttagaccttgcttgattattcccacgacagtatgaattggaagggattcggaataattttgatttgctagaaatttaaactctctcaatcttctctaattcattctaatttatatgtgttgagattgaggccctatttagacgcaatcagtttttaagaatccagtttctatctctagtttctagaaatcggtttataaagaaagaaaaaactggtttaggccttgttcgtttgtatcggattgctcccgaaatcgttccagctaatcaaagtttatataaattagagaagcaatccgggtagtaaacgttccgctccaccaatccggcacaaacgaacaagaccttatagtgtttggaaccggctcagtttttataaactagttttatctaggaggcgctagttttttggtttttaaaaaactaaaaattttcataaaccagtttctgtgttttcaaacaggccttaaaacgacacgtaacatgtaaaacgcggaactaatttatctcccgtccttccagcaacaatgcgaccgcaactgaacgtgcacacggcgagcccatcccatgcactggtgtacaggcagtagcggttagctgatctgtttgtgcgtgacgggacgcagcaccaaccaaccgggggctccgagaagatgcatggtccaccacgccaccccggcactaggccattgcccattggcatttggcaaggtttgggaggtgaagctctggaagatggatccgtccacaggagcgaagggacctcagatcgccgaatccagagtcacgctgctgtctaacctgccgttgccggaggagcacaagagggcaggagacgctctgaagaaatattcatcaaaactgtagagaagaaacttcatgctcatgaaagcccttgcatcttgcaggtttcacggatctgatggatgttgtaattaaaaagcattgcctataataaatatttcttatttaccaccagtttcttctgtacgcctgtaccatgtgtcccgttgagccttcatcacactaaacaaacaaagaaacagaagacctttcctgttgaaaataacgtcaggagcaagagcaagaggcgtgaggctggcactattcaccatccggcaacaaatcggaaggaggcggtcggtcattccatgcggagtgctatgtggctgagagatgggaccagcgatatgaatctgggagcgtcttatgagtgggccagtgttggcttatgtccgtgtgcgtgtctgactgtgccggtatagagaccggttgtaagggtaatttgccggcatgatggaacaacc

SEQ ID NO: 47974 - DNA, 795 bp, Zea Mays
gctcttctcattactgacaggcgccagagagagagagagagagaccacaactcctctcgcctcgcctcgcctcgcctcccccggggaagaagaggaggagagggagctgagcagcagccggccgacgcgggaatgctcgtcggcggcgggcgggacgacgaggaggtgctccggaagctcaagagcatggacgtggacaagatggagaacggcggcggcggcggtgaggcggagagcccgcgccccgccgtcaagtaccacggctggaaggccatgcccttcatcatcgggaacgagacgttcgagaagctggggacgctgggcacgtcggccaacctgctggtgtacctgacgcaggtgttccacatgcggagcgtggacgcggccacgctgctcaacgggctcaacggcaccaccagcctcgcccccatcgtcggcgccttcctctccgacgcctacctcggccgctacctcgcgctcgccatcgcttccatagcctccctcatcacaagatggcgggcggcacatgggacgagcgcacacgtgcacgctcgctcactggctcctcgtggtcgcttcttctccgagaatctggacgagcggcgggcgtgtttggttttgctgctgccttatactaccttagctcacctcgctctgggcgaggttagcttttaccaggtctggagagagctaatctggctagctcaagttggtttgcaaaaatcatgaaacacacgagcaacgagctgaccttgctgcacattcgaacaagctgcctgtgtactaatatttgat

SEQ ID NO: 47975 - DNA, 823 bp, Zea Mays
ctcgagtgccctctctgcctataaatcgaaccctaaccctttttcgtacctgtttgtgtccttagggtttagggttctctgctcattcgttcgccacctcgccccaagacgtctcgctagggtttcgccacagccgccgccatgcctcgccgcaagcttaggtccgcggctcacgcccggctccacatgctgctccagtgaggaacccaccacagcctgcgcgctaggctcgtcctccagctcctgttcgtgatggtggtggtggctccattcttggaggaattgggtccaccattgcttaaggtatgccatttggtacgagtagtgccatggcacacagggctgttgatgctgtaatgggtctccggactgttcggcatgagattgttatctcagaagctgctgctgctgcccctcctgctccagtgatgaacgctaatgcttgcagcatccattctaaggctttccaagattgtcttaacaactatggcagtgagatcagcaagtgccagttctaccttgacatgttgaacgagtgccgccgtggtgttgtctgcctgagcttttgctccaattgggattattcatggattctcttttcactcccatgtatctcattaataagacaccgtgaaacttttaaccctctccacgaatgcaccatggcatcacgggttcatcttgttgaatctgtggttacgttctctttatcctgtgttgttggaacagacttctgtctcttctggtgatcataaatatttaaatgaaccagttgtgttggaaaatgttgttttcttttgtctctagactggaaagcggagtt

SEQ ID NO: 47976 - DNA, 832 bp, Zea Mays
tacctgtttgtgtccttagggtttagggttctctgctcattcgttcgccacctcgccccaagacgtctcgctagggtttcgccacagccgccgccatgcctcgccgcaagcttaggaaggtccgcggctcacgcccggctccacatgctgctccagtgaggaacccaccacagcctggtaaagtgattcacgcagacaataagtatctttagaactgacattggcatgcgcgctaggctcgtcctccagctcctgttcgtgatggtggtggtggctccattcttggaggaattgggtccaccattgcttaaggtatgccatttggtacgagtagtgccatggcacacagggctgttgatgctgtaatgggtctccggactgttcggcatgagattgttatctcagaagctgctgctgctgcccctcctgctccagtgatgaacgctaatgcttgcagcatccattctaaggctttccaagattgtcttaacaactatggcagtgagatcagcaagtgccagttctaccttgacatgttgaacgagtgccgccgtggtgttgtctgcctgagcttttgctccaattgggattattcatggattctcttttcactcccatgtatctcattaataagacaccgtgaaacttttaaccctctccacgaatgcaccatggcatcacgggttcatcttgttgaatctgtggttacgttctctttatcctgtgttgttggaacagacttctgtctcttctggtgatcataaatatttaaatgaaccagttgtgttggaaaatgttgttttcttttgtctctagactggaaagcggagtt

SEQ ID NO: 47977 - DNA, 786 bp, Zea Mays
tacctgtttgtgtccttagggtttagggttctctgctcattcgttcgccacctcgccccaagacgtctcgctagggtttcgccacagccgccgccatgcctcgccgcaagcttaggaaggtccgcggctcacgcccggctccacatgctgctccagtgaggaacccaccacagcctggtaaacgcgctaggctcgtcctccagctcctgttcgtgatggtggtggtggctccattcttggaggaattgggtccaccattgcttaaggtatgccatttggtacgagtagtgccatggcacacagggctgttgatgctgtaatgggtctccggactgttcggcatgagattgttatctcagaagctgctgctgctgcccctcctgctccagtgatgaacgctaatgcttgcagcatccattctaaggctttccaagattgtcttaacaactatggcagtgagatcagcaagtgccagttctaccttgacatgttgaacgagtgccgccgtggtgttgtctgcctgagcttttgctccaattgggattattcatggattctcttttcactcccatgtatctcattaataagacaccgtgaaacttttaaccctctccacgaatgcaccatggcatcacgggttcatcttgttgaatctgtggttacgttctctttatcctgtgttgttggaacagacttctgtctcttctggtgatcataaatatttaaatgaaccagttgtgttggaaaatgttgttttcttttgtctctagactggaaagcggagtt

SEQ ID NO: 47978 - DNA, 1268 bp, Zea Mays
atctgttcgcaggcggttcagacaggggcatagaacaaatctgaatccccacgagggaaggtccgcggctcacgcccggctccacatgctgctccagtgaggaacccaccacagcctggtaaagtgattcacgcagacaataagtatctttagaactgacattggcatggtaatcatgcctcttttgactctgcagtattctattgtggacatgtgtttcaattatgtaactttagttatatttttgtataactgtttgctcagttgttgagaatgtgttcggtttgttactataacaatgttgatgacataaatatactgttaagtttatattggaatttgtggtacaagtctgaagttgttgattgtgtttgaagcagagtcaatggcatttcggtttatatagagaattacagttccttgttttttggtagaactggaacctgtttcagttctgttcctaatgcttacacatgggtttgtgctacaagtatagtattagtattacagagctcattgttttggaatcttgattgctttggaatcagaatcgtttatgtttagctcatattagtattagtattacagctcattgtgtttatataggagttttaatctgttctatttctgttcctaagtgtcttctgacttttctttttggcagcgcgctaggctcgtcctccagctcctgttcgtgatggtggtggtggctccattcttggaggaattgggtccaccattgcttaaggtatgccatttggtacgagtagtgccatggcacacagggctgttgatgctgtaatgggtctccggactgttcggcatgagattgttatctcagaagctgctgctgctgcccctcctgctccagtgatgaacgctaatgcttgcagcatccattctaaggctttccaagattgtcttaacaactatggcagtgagatcagcaagtgccagttctaccttgacatgttgaacgagtgccgccgtggtgttgtctgcctgagcttttgctccaattgggattattcatggattctcttttcactcccatgtatctcattaataagacaccgtgaaacttttaaccctctccacgaatgcaccatggcatcacgggttcatcttgttgaatctgtggttacgttctctttatcctgtgttgttggaacagacttctgtctcttctggtgatcataaatatttaaatgaaccagttgtgttggaaaatgttgttttcttttgtctctagactggaaagcggagtt

SEQ ID NO: 47979 - DNA, 1350 bp, Zea Mays
agaacagctgcgactctccagtctccacgccaccgaactccgaagaggccacctcccctcatggcctcatcacatcacagcgcctcctcaccttgtctgtcctcttcctctcgccccttatcttactcgtttacgtttcttctcgtggggagagagaaacagcagggctagattagataccacagagagagagagagagagagagagagagagagggagggagggtggagaggatggcttcgctgcagagccagagcctgctcggcattggcagcagcagcatcgtcttggcacgagcgagggtgcagcagtgtctggcagcggcgtctcgctcacacgcgcccctcctgcaggccaatggaggcaggacgggcctcccctcctcctcgatccttaacgctggcaatgcgatcagcttcagccggcggagaaggaaggacctgcgcgtcgtcgcggaggcggccgcggcggggccgaccaaggtcacgccggcctcgtctggcggcgtcagcatcagcgacgtgctctggccttccgccggagcattcttggccatggcggtacttgggaaaatggaccaggtggtggcgttcaagggagtatccttgacgattccgcccctgggagcagtctgctgcgtgcttttcagcgctccagactcgcctgcagccaagaaatataatatgttcgtcgcccagatcggttgtgcggctttgggcgtattagccctctcgttgtttgggcctggctggttagcaagaggtgcagccctttcagcctgtatagcattcatgaccatcacgggtgcctcacatcctccagctgcaagcttgcccctcctatttatcgatggcccgaagtttcacagtttgcaactttggtacgcgcttttccctggagctgtaggttgcatcgtcctttgcttgattaggtggtggtttacctgaagaagaacatcaaattttgactcaagtatcttgactctatggattcttgtggcaatgattctattaattattcaatcatgtaccataaattacattgccaacatttgccaagcatgttcggttgtcctgcagctgtaatccatagagataaaatattgtaaaatacacaaccacagtcggattaaagtcgcagcaagccgtagcgaacatggggaaagttgtgaaaatgaaggcctcctatctcttgtattagttaaagaagaaagaggactttccttgataccttgtgctcgtcaaaatgcagaggacacaaatgtgtatataccattatctctgtcactgtggacgcattaacccttagtgatgttttggtaattaatgacaaatatttgtggactaacaa

SEQ ID NO: 47980 - DNA, 4648 bp, Zea Mays
ccgcgagtcgcgtcgactcggtcactcggcagtcggcacgccccgtgaggccgtgacgacaacccgcccgtggtcgcagtctcgctctcgcagacgcgtccgtgatccgtccgtcgccctccccttcctgcgcaagcgtgcgcctacctgcatccgctatccgtcggcgatgtcggtgccccccgccggcaagcgccaggtgtccctgcggggctcgagcgcgaaggagatcacacgcgacgcgctgctgcagaaggtttccgaggagcgccagctccgcagccacctccgccgcgccgccgcggccgccttctccatccagcgaatatggagaaggtaccatgtgataagaatggtttcagaacagctccatgaagactgggaactattaatgaaccagcctaacatcgacttgactactcaatggatatccaaaaagatgcttagaccgtttcttttcttcattactcaaccttctagctggtatattggacaatggagcaagactgtggaatctatcttaacatgcttcaagattatcttgaatagtataaattcaatggatgcaaggaaaaacttctgctcctttgctgtgggtataccagaagagagatctatttggctttatcaggccaaaaagctgatttcactgtgctcttccattcttgccaggtacgaccattcctgttgcaaggatggaagcatagtcgacatgactgctattgctatgagattggctgtctctctaactgattgcaaaacatggaaaagtttgaacagtgagaacactagcgctgcagatgcttctgtacagagtttgattgaatttattggtacgtgccagagtggcatgtataattgtgttaggcaatatataaagtctcttggtcctcatgttacttcagcgaagaaaagttctgcaactgcaacagatgatgattttcttattactgctagtgcagtcactttagccttgcgcccattcgattctaagaaagcaaagggcggtgttgatctgaatggtgcttcaaagaaatacttcacacttatacttacaataccagatctgtgcaaacgcatgccacctcttttgttacctgctcttaaacatttttctgtgctgcaaccgagtctcaatattttactgatctccaaggataaaatatttgaagaaataataaaactggaacagtcagaggtttcagctagtattattccttgttctggttgggctcttggaaatatagtgaacttagctaccaatcatgatgacttatccaattcagggtgtttcattcaagagttagatttctgcttatatgttgatgttattaattgtatttctgaaaacttactggaaagttttgagaaaagcaagggaacgtctcaaaatgttggtaatatcactttccatgccgacacatctgttgcagaggaagaggataccaatgacgactgcagaatgagaacattatttatggaccttctgaagccaatttaccagcaatggcaccttagaaaacttttgatgttggcaaaagaggattttccatgccgcagggcaactgattatgatccaaacttgaagaatattcactttcgaatcctaaagttgtcagatgttatatgcttctactatcacatgcttagaattttctcatcacttaacccttctatcggtgcaatgcctattctcaacatgcttgcattctcacctggatttctagttgatttatgggaggcactagaaatgcccatttttggtccacctatccagaattcacaagaaacaggacacgagaaacagttggctacaagtagttcaggtgtgcaagtatcctccatgaggcaaagaaggaatgccaaggacacagcaaacaggtggtcaaatgtgctccagaagattactggaaaatccaatgattcagaggagggcactttatctgatagtattttattttctcatgagtctaatgatgatgcattaacttcatgggatattgaagccatgagacatgcatctgagggtattggaaaggacttaatgtgcattatgtatcttttctgtgctatatatggacacctattacttgtgctagatgatatcgagttttatgaaaagcaggttccttttactttagagcagcagcggaagattgcatcagcacttaatacatttgtatacaattctttcattcaaaatagtggaagctacagcaatcctcttgtggatgtagctgtcagatgtcttaatctactctatgaaagggacagtaggcataagttttgtcctatttccttgtggttggcacctgctagaaatggccgaattccaattgctgctgctgccaggtctcatgaggcagcatttggtatttttccagggattcctcatcggagctctgtacttaccacattaccacatgtatatccatttgaagagagagtgcaaatgtttagagaatttattgagtcagacaaagcatcgagaagggttactggtgaagtttctgggccaggcccgggatcgattgagatagttattcgtcgaggccatataattgatgatggatacaggcagttgaactgcctaagatcaaagttgaaatcttgcattcacgtgtcatttgtgagtgaatgcggtcttcctgaagctggtttggactatggtggtctgtcaaaagagttcctaacagatctctcaaagtccgcttttagtccagagtatggactattttcacaaacatcagcatctgatactagcttaattcccagcaattctgctaagcttctggataacggaattgatatgattgaatttcttggtcgagttgtcggcaaagcactctatgaggggattctgttggactattctttctcaccagtatttgtgcagaaacttcttggacggtataattttctggatgaactatcaactcttgatcccgagctttatagaaatcttatgcaactaaagcactatgatggagatgttgaggatctatttttggattttactgtaactgaagagttgggtggtaaaagaatcgtccatgagcttagacctggtggtaaaaatatatcagtgacgaacgaaaacaagttacactatgttcatgcaatggcagatttcaaacttaaccgacaggttcgtgacactgttttctcttgatttactaggttttgttcggtaccagtaaagttttttgttagcaccattgtccttgcagatacttccatttgcaaacgcattttatagaggactcagcgatctcatttcaccatattggctgagcctgtttaatgcaaatgaatttaatcagttactttcaggcggactacaggattttgacgttgatgatttgcggaacaacaccaagtatactggtggttatactgagtcaagtcgaactgttaaactcttctgggaggtatatgtatctgtacagttttgctcattttgcattaatggtttcttgctatttcctgttttgcattatatattttggggtgcatgtaacttggtaaggtcctaggattaccagcttggttacctatattcaatcaattacatacccaatttggaaatgtctggagcagtgcagttgttcatgtattttcttatctggtgataataacttttgaaaaaatatcatttgattttctgtaatataattatgaattgtgatcctgacatgctcacggatgaaacttgccttatacactcatgccatacttgcactgcatttctggcctatttgcttgtgtagcatgcacttgcccactcattttctatgctatataaacgattttctgtttgcctctgtcatttcagccaattttggtgatggtgaaataactatttttgttcaccaacagcaaatataaatattagtatggttcacacatttttactcgttatgcaggtcatcaaagcatttaagccaacagagcgttgtttgctcttaaagtttgtgacaagctgttcacgagctccactgcttggattcaagtacttgcaaccttctttcacaattcataaggttccatgtgatgtaacactttgggcatcaattggaggccaagatgtagatcgtcttccatctgcttccacatgctacaatacgctcaagcttcctacatacaagcggtcaagcacgctaaggagcaagctgctttacgccataagctcaaatactggatttgaactctcgtagaggtatattcagtggttttgtaaccctgctttggttttgctgtgaatagaggtatagcaaaattcgatcggatgtacaattgcatcttgattaatcggagtaacagcttctatgaaggtagcgcaatgcataaaaaatgtttgtttggccggcggggccgtttggatcgatcccaggcaaaatccgacgcctggggagctccgttcaccaggccggtttgcaattcaaacagccatacgtgtgtttctattgattgtgctgagagagagagagagagagagagagagagagagggaggggggagggagagggagatagagagagagtgagggaggagagagagagagagagagagagagagagagagagagagagagagagagagagagaaagagagagagagagagagagagagagagagagagagagag

SEQ ID NO: 47981 - DNA, 4493 bp, Zea Mays
gtcgcgtcgactcggtcactcggcagtcggcacgccccgtgaggccgtgacgacaacccgcccgtggtcgcagtctcgctctcgcagacgcgtccgtgatccgtccgtcgccctccccttcctgcgcaagcgtgcgcctacctgcatccgctatccgtcggcgatgtcggtgccccccgccggcaagcgccaggtgtccctgcggggctcgagcgcgaaggagatcacacgcgacgcgctgctgcagaaggtttccgaggagcgccagctccgcagccacctccgccgcgccgccgcggccgccttctccatccagcgaatatggagaaggtaccatgtgataagaatggtttcagaacagctccatgaagactgggaactattaatgaaccagcctaacatcgacttgactactcaatggatatccaaaaagatgcttagaccgtttcttttcttcattactcaaccttctagctggtatattggacaatggagcaagactgtggaatctatcttaacatgcttcaagattatcttgaatagtataaattcaatggatgcaaggaaaaacttctgctcctttgctgtgggtataccagaagagagatctatttggctttatcaggccaaaaagctgatttcactgtgctcttccattcttgccaggtacgaccattcctgttgcaaggatggaagcatagtcgacatgactgctattgctatgagattggctgtctctctaactgattgcaaaacatggaaaagtttgaacagtgagaacactagcgctgcagatgcttctgtacagagtttgattgaatttattggtacgtgccagagtggcatgtataattgtgttaggcaatatataaagtctcttggtcctcatgttacttcagcgaagaaaagttctgcaactgcaacagatgatgattttcttattactgctagtgcagtcactttagccttgcgcccattcgattctaagaaagcaaagggcggtgttgatctgaatggtgcttcaaagaaatacttcacacttatacttacaataccagatctgtgcaaacgcatgccacctcttttgttacctgctcttaaacatttttctgtgctgcaaccgagtctcaatattttactgatctccaaggataaaatatttgaagaaataataaaactggaacagtcagaggtttcagctagtattattccttgttctggttgggctcttggaaatatagtgaacttagctaccaatcatgatgacttatccaattcagggtgtttcattcaagagttagatttctgcttatatgttgatgttattaattgtatttctgaaaacttactggaaagttttgagaaaagcaagggaacgtctcaaaatgttggtaatatcactttccatgccgacacatctgttgcagaggaagaggataccaatgacgactgcagaatgagaacattatttatggaccttctgaagccaatttaccagcaatggcaccttagaaaacttttgatgttggcaaaagaggattttccatgccgcagggcaactgattatgatccaaacttgaagaatattcactttcgaatcctaaagttgtcagatgttatatgcttctactatcacatgcttagaattttctcatcacttaacccttctatcggtgcaatgcctattctcaacatgcttgcattctcacctggatttctagttgatttatgggaggcactagaaatgcccatttttggtccacctatccagaattcacaagaaacaggacacgagaaacagttggctacaagtagttcaggtgtgcaagtatcctccatgaggcaaagaaggaatgccaaggacacagcaaacaggtggtcaaatgtgctccagaagattactggaaaatccaatgattcagaggagggcactttatctgatagtattttattttctcatgagtctaatgatgatgcattaacttcatgggatattgaagccatgagacatgcatctgagggtattggaaaggacttaatgtgcattatgtatcttttctgtgctatatatggacacctattacttgtgctagatgatatcgagttttatgaaaagcaggttccttttactttagagcagcagcggaagattgcatcagcacttaatacatttgtatacaattctttcattcaaaatagtggaagctacagcaatcctcttgtggatgtagctgtcagatgtcttaatctactctatgaaagggacagtaggcataagttttgtcctatttccttgtggttggcacctgctagaaatggccgaattccaattgctgctgctgccaggtctcatgaggcagcatttggtatttttccagggattcctcatcggagctctgtacttaccacattaccacatgtatatccatttgaagagagagtgcaaatgtttagagaatttattgagtcagacaaagcatcgagaagggttactggtgaagtttctgggccaggcccgggatcgattgagatagttattcgtcgaggccatataattgatgatggatacaggcagttgaactgcctaagatcaaagttgaaatcttgcattcacgtgtcatttgtgagtgaatgcggtcttcctgaagctggtttggactatggtggtctgtcaaaagagttcctaacagatctctcaaagtccgcttttagtccagagtatggactattttcacaaacatcagcatctgatactagcttaattcccagcaattctgctaagcttctggataacggaattgatatgattgaatttcttggtcgagttgtcggcaaagcactctatgaggggattctgttggactattctttctcaccagtatttgtgcagaaacttcttggacgcactatgatggagatgttgaggatctatttttggattttactgtaactgaagagttgggtggtaaaagaatcgtccatgagcttagacctggtggtaaaaatatatcagtgacgaacgaaaacaagttacactatgttcatgcaatggcagatttcaaacttaaccgacagatacttccatttgcaaacgcattttatagaggactcagcgatctcatttcaccatattggctgagcctgtttaatgcaaatgaatttaatcagttactttcaggcggactacaggattttgacgttgatgatttgcggaacaacaccaagtatactggtggttatactgagtcaagtcgaactgttaaactcttctgggaggtatatgtatctgtacagttttgctcattttgcattaatggtttcttgctatttcctgttttgcattatatattttggggtgcatgtaacttggtaaggtcctaggattaccagcttggttacctatattcaatcaattacatacccaatttggaaatgtctggagcagtgcagttgttcatgtattttcttatctggtgataataacttttgaaaaaatatcatttgattttctgtaatataattatgaattgtgatcctgacatgctcacggatgaaacttgccttatacactcatgccatacttgcactgcatttctggcctatttgcttgtgtagcatgcacttgcccactcattttctatgctatataaacgattttctgtttgcctctgtcatttcagccaattttggtgatggtgaaataactatttttgttcaccaacagcaaatataaatattagtatggttcacacatttttactcgttatgcaggtcatcaaagcatttaagccaacagagcgttgtttgctcttaaagtttgtgacaagctgttcacgagctccactgcttggattcaagtacttgcaaccttctttcacaattcataaggttccatgtgatgtaacactttgggcatcaattggaggccaagatgtagatcgtcttccatctgcttccacatgctacaatacgctcaagcttcctacatacaagcggtcaagcacgctaaggagcaagctgctttacgccataagctcaaatactggatttgaactctcgtagaggtatattcagtggttttgtaaccctgctttggttttgctgtgaatagaggtatagcaaaattcgatcggatgtacaattgcatcttgattaatcggagtaacagcttctatgaaggtagcgcaatgcataaaaaatgtttgtttggccggcggggccgtttggatcgatcccaggcaaaatccgacgcctggggagctccgttcaccaggccggtttgcaattcaaacagccatacgtgtgtttctattgattgtgctgagagagagagagagagagagagagagagagagggaggggggagggagagggagatagagagagagtgagggaggagagagagagagagagagagagagagagagagagagagagagagagagagagagaaagagagagagagagagagagagagagagagagagagagag

SEQ ID NO: 47982 - DNA, 3975 bp, Zea Mays
acccgcccgtggtcgcagtctcgctctcgcagacgcgtccgtgatccgtccgtcgccctccccttcctgcgcaagcgtgcgcctacctgcatccgctatccgtcggcgatgtcggtgccccccgccggcaagcgccaggtgtccctgcggggctcgagcgcgaaggagatcacacgcgacgcgctgctgcagaaggtttccgaggagcgccagctccgcagccacctccgccgcgccgccgcggccgccttctccatccagctccatgaagactgggaactattaatgaaccagcctaacatcgacttgactactcaatggatatccaaaaagatgcttagaccgtttcttttcttcattactcaaccttctagctggtatattggacaatggagcaagactgtggaatctatcttaacatgcttcaagattatcttgaatagtataaattcaatggatgcaaggaaaaacttctgctcctttgctgtgggtataccagaagagagatctatttggctttatcaggccaaaaagctgatttcactgtgctcttccattcttgccaggtacgaccattcctgttgcaaggatggaagcatagtcgacatgactgctattgctatgagattggctgtctctctaactgattgcaaaacatggaaaagtttgaacagtgagaacactagcgctgcagatgcttctgtacagagtttgattgaatttattggtacgtgccagagtggcatgtataattgtgttaggcaatatataaagtctcttggtcctcatgttacttcagcgaagaaaagttctgcaactgcaacagatgatgattttcttattactgctagtgcagtcactttagccttgcgcccattcgattctaagaaagcaaagggcggtgttgatctgaatggtgcttcaaagaaatacttcacacttatacttacaataccagatctgtgcaaacgcatgccacctcttttgttacctgctcttaaacatttttctgtgctgcaaccgagtctcaatattttactggtggcggcagatctccaaggataaaatatttgaagaaataataaaactggaacagtcagaggtttcagctagtattattccttgttctggttgggctcttggaaatatagtgaacttagctaccaatcatgatgacttatccaattcagggtgtttcattcaagagttagatttctgcttatatgttgatgttattaattgtatttctgaaaacttactggaaagttttgagaaaagcaagggaacgtctcaaaatgttggtaatatcactttccatgccgacacatctgttgcagaggaagaggataccaatgacgactgcagaatgagaacattatttatggaccttctgaagccaatttaccagcaatggcaccttagaaaacttttgatgttggcaaaagaggattttccatgccgcagggcaactgattatgatccaaacttgaagaatattcactttcgaatcctaaagttgtcagatgttatatgcttctactatcacatgcttagaattttctcatcacttaacccttctatcggtgcaatgcctattctcaacatgcttgcattctcacctggatttctagttgatttatgggaggcactagaaatgcccatttttggtccacctatccagaattcacaagaaacaggacacgagaaacagttggctacaagtagttcaggtgtgcaagtatcctccatgaggcaaagaaggaatgccaaggacacagcaaacaggtggtcaaatgtgctccagaagattactggaaaatccaatgattcagaggagggcactttatctgatagtattttattttctcatgagtctaatgatgatgcattaacttcatgggatattgaagccatgagacatgcatctgagggtattggaaaggacttaatgtgcattatgtatcttttctgtgctatatatggacacctattacttgtgctagatgatatcgagttttatgaaaagcaggttccttttactttagagcagcagcggaagattgcatcagcacttaatacatttgtatacaattctttcattcaaaatagtggaagctacagcaatcctcttgtggatgtagctgtcagatgtcttaatctactctatgaaagggacagtaggcataagttttgtcctatttccttgtggttggcacctgctagaaatggccgaattccaattgctgctgctgccaggtctcatgaggcagcatttggtatttttccagggattcctcatcggagctctgtacttaccacattaccacatgtatatccatttgaagagagagtgcaaatgtttagagaatttattgagtcagacaaagcatcgagaagggttactggtgaagtttctgggccaggcccgggatcgattgagatagttattcgtcgaggccatataattgatgatggatacaggcagttgaactgcctaagatcaaagttgaaatcttgcattcacgtgtcatttgtgagtgaatgcggtcttcctgaagctggtttggactatggtggtctgtcaaaagagttcctaacagatctctcaaagtccgcttttagtccagagtatggactattttcacaaacatcagcatctgatactagcttaattcccagcaattctgctaagcttctggataacggaattgatatgattgaatttcttggtcgagttgtcggcaaagcactctatgaggggattctgttggactattctttctcaccagtatttgtgcagaaacttcttggacggtataattttctggatgaactatcaactcttgatcccgagctttatagaaatcttatgcaactaaagcactatgatggagatgttgaggatctatttttggattttactgtaactgaagagttgggtggtaaaagaatcgtccatgagcttagacctggtggtaaaaatatatcagtgacgaacgaaaacaagttacactatgttcatgcaatggcagatttcaaacttaaccgacagatacttccatttgcaaacgcattttatagaggactcagcgatctcatttcaccatattggctgagcctgtttaatgcaaatgaatttaatcagttactttcaggcggactacaggattttgacgttgatgatttgcggaacaacaccaagtatactggtggttatactgagtcaagtcgaactgttaaactcttctgggaggtcatcaaagcatttaagccaacagagcgttgtttgctcttaaagtttgtgacaagctgttcacgagctccactgcttggattcaagtacttgcaaccttctttcacaattcataaggttccatgtgatgtaacactttgggcatcaattggaggccaagatgtagatcgtcttccatctgcttccacatgctacaatacgctcaagcttcctacatacaagcggtcaagcacgctaaggagcaagctgctttacgccataagctcaaatactggatttgaactctcgtagaggtatattcagtggttttgtaaccctgctttggttttgctgtgaatagaggtatagcaaaattcgatcggatgtacaattgcatcttgattaatcggagtaacagcttctatgaaggtagcgcaatgcataaaaaatgtttgtttggccggcggggccgtttggatcgatcccaggcaaaatccgacgcctggggagctccgttcaccaggccggtttgcaattcaaacagccatacgtgtgtttctattgattgtgctgagagagagagagagagagagagagagagagagggaggggggagggagagggagatagagagagagtgagggaggagagagagagagagagagagagagagagagagagagagagagagagagagagagaaagagagagagagagagagagagagagagagagagagagag

SEQ ID NO: 47983 - DNA, 3771 bp, Zea Mays
gtggtcgcagtctcgctctcgcagacgcgtccgtgatccgtccgtcgccctccccttcctgcgcaagcgtgcgcctacctgcatccgctatccgtcggcgatgtcggtgccccccgccggcaagcgccaggtgtccctgcggggctcgagcgcgaaggagatcacacgcgacgcgctgctgcagaaggtttccgaggagcgccagctccgcagccacctccgccgcgccgccgcggccgccttctccatccagatgcaaggaaaaacttctgctcctttgctgtgggtataccagaagagagatctatttggctttatcaggccaaaaagctgatttcactgtgctcttccattcttgccaggtacgaccattcctgttgcaaggatggaagcatagtcgacatgactgctattgctatgagattggctgtctctctaactgattgcaaaacatggaaaagtttgaacagtgagaacactagcgctgcagatgcttctgtacagagtttgattgaatttattggtacgtgccagagtggcatgtataattgtgttaggcaatatataaagtctcttggtcctcatgttacttcagcgaagaaaagttctgcaactgcaacagatgatgattttcttattactgctagtgcagtcactttagccttgcgcccattcgattctaagaaagcaaagggcggtgttgatctgaatggtgcttcaaagaaatacttcacacttatacttacaataccagatctgtgcaaacgcatgccacctcttttgttacctgctcttaaacatttttctgtgctgcaaccgagtctcaatattttactggtggcggcagatctccaaggataaaatatttgaagaaataataaaactggaacagtcagaggtttcagctagtattattccttgttctggttgggctcttggaaatatagtgaacttagctaccaatcatgatgacttatccaattcagggtgtttcattcaagagttagatttctgcttatatgttgatgttattaattgtatttctgaaaacttactggaaagttttgagaaaagcaagggaacgtctcaaaatgttggtaatatcactttccatgccgacacatctgttgcagaggaagaggataccaatgacgactgcagaatgagaacattatttatggaccttctgaagccaatttaccagcaatggcaccttagaaaacttttgatgttggcaaaagaggattttccatgccgcagggcaactgattatgatccaaacttgaagaatattcactttcgaatcctaaagttgtcagatgttatatgcttctactatcacatgcttagaattttctcatcacttaacccttctatcggtgcaatgcctattctcaacatgcttgcattctcacctggatttctagttgatttatgggaggcactagaaatgcccatttttggtccacctatccagaattcacaagaaacaggacacgagaaacagttggctacaagtagttcaggtgtgcaagtatcctccatgaggcaaagaaggaatgccaaggacacagcaaacaggtggtcaaatgtgctccagaagattactggaaaatccaatgattcagaggagggcactttatctgatagtattttattttctcatgagtctaatgatgatgcattaacttcatgggatattgaagccatgagacatgcatctgagggtattggaaaggacttaatgtgcattatgtatcttttctgtgctatatatggacacctattacttgtgctagatgatatcgagttttatgaaaagcaggttccttttactttagagcagcagcggaagattgcatcagcacttaatacatttgtatacaattctttcattcaaaatagtggaagctacagcaatcctcttgtggatgtagctgtcagatgtcttaatctactctatgaaagggacagtaggcataagttttgtcctatttccttgtggttggcacctgctagaaatggccgaattccaattgctgctgctgccaggtctcatgaggcagcatttggtatttttccagggattcctcatcggagctctgtacttaccacattaccacatgtatatccatttgaagagagagtgcaaatgtttagagaatttattgagtcagacaaagcatcgagaagggttactggtgaagtttctgggccaggcccgggatcgattgagatagttattcgtcgaggccatataattgatgatggatacaggcagttgaactgcctaagatcaaagttgaaatcttgcattcacgtgtcatttgtgagtgaatgcggtcttcctgaagctggtttggactatggtggtctgtcaaaagagttcctaacagatctctcaaagtccgcttttagtccagagtatggactattttcacaaacatcagcatctgatactagcttaattcccagcaattctgctaagcttctggataacggaattgatatgattgaatttcttggtcgagttgtcggcaaagcactctatgaggggattctgttggactattctttctcaccagtatttgtgcagaaacttcttggacggtataattttctggatgaactatcaactcttgatcccgagctttatagaaatcttatgcaactaaagcactatgatggagatgttgaggatctatttttggattttactgtaactgaagagttgggtggtaaaagaatcgtccatgagcttagacctggtggtaaaaatatatcagtgacgaacgaaaacaagttacactatgttcatgcaatggcagatttcaaacttaaccgacagatacttccatttgcaaacgcattttatagaggactcagcgatctcatttcaccatattggctgagcctgtttaatgcaaatgaatttaatcagttactttcaggcggactacaggattttgacgttgatgatttgcggaacaacaccaagtatactggtggttatactgagtcaagtcgaactgttaaactcttctgggaggtcatcaaagcatttaagccaacagagcgttgtttgctcttaaagtttgtgacaagctgttcacgagctccactgcttggattcaagtacttgcaaccttctttcacaattcataaggttccatgtgatgtaacactttgggcatcaattggaggccaagatgtagatcgtcttccatctgcttccacatgctacaatacgctcaagcttcctacatacaagcggtcaagcacgctaaggagcaagctgctttacgccataagctcaaatactggatttgaactctcgtagaggtatattcagtggttttgtaaccctgctttggttttgctgtgaatagaggtatagcaaaattcgatcggatgtacaattgcatcttgattaatcggagtaacagcttctatgaaggtagcgcaatgcataaaaaatgtttgtttggccggcggggccgtttggatcgatcccaggcaaaatccgacgcctggggagctccgttcaccaggccggtttgcaattcaaacagccatacgtgtgtttctattgattgtgctgagagagagagagagagagagagagagagagagggaggggggagggagagggagatagagagagagtgagggaggagagagagagagagagagagagagagagagagagagagagagagagagagagagaaagagagagagagagagagagagagagagagagagagagag

SEQ ID NO: 47984 - DNA, 3721 bp, Zea Mays
ctctcgcagacgcgtccgtgatccgtccgtcgccctccccttcctgcgcaagcgtgcgcctacctgcatccgctatccgtcggcgatgtcggtgccccccgccggcaagcgccaggtgtccctgcggggctcgagcgcgaaggagatcacacgcgacgcgctgctgcagaaggtttccgaggagcgccagctccgcagccacctccgccgcgccgccgcggccgccttctccatccagcgaatatggagaaggtaccatgtgataagaatggtttcagaacagctccatgaagactgggaactattaatgaaccagcctaacatcgacttgactactcaatggatatccaaaaagatgcttagaccgtttcttttcttcattactcaaccttctagctggtatattggacaatggagcaagactgtggaatctatcttaacatgcttcaagattatcttgaatagtataaattcaatggatgcaaggaaaaacttctgctcctttgctgtgggtataccagaagagagatctatttggctttatcaggccaaaaagctgatttcactgtgctcttccattcttgccaggtacgaccattcctgttgcaaggatggaagcatagtcgacatgactgctattgctatgagattggctgtctctctaactgattgcaaaacatggaaaagtttgaacagtgagaacactagcgctgcagatgcttctgtacagagtttgattgaatttattggtacgtgccagagtggcatgtataattgtgttaggcaatatataaagtctcttggtcctcatgttacttcagcgaagaaaagttctgcaactgcaacagatgatgattttcttattactgctagtgcagtcactttagccttgcgcccattcgattctaagaaagcaaagggcggtgttgatctgaatggtgcttcaaagaaatacttcacacttatacttacaataccagatctgtgcaaacgcatgccacctcttttgttacctgctcttaaacatttttctgtgctgcaaccgagtctcaatattttactgatctccaaggataaaatatttgaagaaataataaaactggaacagtcagaggtttcagctagtattattccttgttctggttgggctcttggaaatatagtgaacttagctaccaatcatgatgacttatccaattcagggtgtttcattcaagagttagatttctgcttatatgttgatgttattaattgtatttctgaaaacttactggaaagttttgagaaaagcaagggaacgtctcaaaatgttggtaatatcactttccatgccgacacatctgttgcagaggaagaggataccaatgacgactgcagaatgagaacattatttatggaccttctgaagccaatttaccagcaatggcaccttagaaaacttttgatgttggcaaaagaggattttccatgccgcagggcaactgattatgatccaaacttgaagaatattcactttcgaatcctaaagttgtcagatgttatatgcttctactatcacatgcttagaattttctcatcacttaacccttctatcggtgcaatgcctattctcaacatgcttgcattctcacctggatttctagttgatttatgggaggcactagaaatgcccatttttggtccacctatccagaattcacaagaaacaggacacgagaaacagttggctacaagtagttcaggtgtgcaagtatcctccatgaggcaaagaaggaatgccaaggacacagcaaacaggtggtcaaatgtgctccagaagattactggaaaatccaatgattcagaggagggcactttatctgatagtattttattttctcatgagtctaatgatgatgcattaacttcatgggatattgaagccatgagacatgcatctgagggtattggaaaggacttaatgtgcattatgtatcttttctgtgctatatatggacacctattacttgtgctagatgatatcgagttttatgaaaagcaggttccttttactttagagcagcagcggaagattgcatcagcacttaatacatttgtatacaattctttcattcaaaatagtggaagctacagcaatcctcttgtggatgtagctgtcagatgtcttaatctactctatgaaagggacagtaggcataagttttgtcctatttccttgtggttggcacctgctagaaatggccgaattccaattgctgctgctgccaggtctcatgaggcagcatttggtatttttccagggattcctcatcggagctctgtacttaccacattaccacatgtatatccatttgaagagagagtgcaaatgtttagagaatttattgagtcagacaaagcatcgagaagggttactggtgaagtttctgggccaggcccgggatcgattgagatagttattcgtcgaggccatataattgatgatggatacaggcagttgaactgcctaagatcaaagttgaaatcttgcattcacgtgtcatttgtgagtgaatgcggtcttcctgaagctggtttggactatggtggtctgtcaaaagagttcctaacagatctctcaaagtccgcttttagtccagagtatggactattttcacaaacatcagcatctgatactagcttaattcccagcaattctgctaagcttctggataacggaattgatatgattgaatttcttggtcgagttgtcggcaaagcactctatgaggggattctgttggactattctttctcaccagtatttgtgcagaaacttcttggacggtataattttctggatgaactatcaactcttgatcccgagctttatagaaatcttatgcaactaaagcactatgatggagatgttgaggatctatttttggattttactgtaactgaagagttgggtggtaaaagaatcgtccatgagcttagacctggtggtaaaaatatatcagtgacgaacgaaaacaagttacactatgttcatgcaatggcagatttcaaacttaaccgacagatacttccatttgcaaacgcattttatagaggactcagcgatctcatttcaccatattggctgagcctgtttaatgcaaatgaatttaatcagttactttcaggcggactacaggattttgacgttgatgatttgcggaacaacaccaagtatactggtggttatactgagtcaagtcgaactgttaaactcttctgggaggtcatcaaagcatttaagccaacagagcgttgtttgctcttaaagtttgtgacaagctgttcacgagctccactgcttggattcaagtacttgcaaccttctttcacaattcataaggttccatgtgatgtaacactttgggcatcaattggaggccaagatgtagatcgtcttccatctgcttccacatgctacaatacgctcaagcttcctacatacaagcggtcaagcacgctaaggagcaagctgctttacgccataagctcaaatactggatttgaactctcgtagagtgtccagatgtcttgatgacgtcactgctaaacaacctctcttatgccgagtcatcgtcagagcatatcctgtaatgtcttcacgctatcgccgtgaccatatggtcttctatcaataacttcgacctctcaagacatcaggaaagttatgatattgatttct

SEQ ID NO: 47985 - DNA, 3600 bp, Zea Mays
ctctcgcagacgcgtccgtgatccgtccgtcgccctccccttcctgcgcaagcgtgcgcctacctgcatccgctatccgtcggcgatgtcggtgccccccgccggcaagcgccaggtgtccctgcggggctcgagcgcgaaggagatcacacgcgacgcgctgctgcagaaggtttccgaggagcgccagctccgcagccacctccgccgcgccgccgcggccgccttctccatccagcgaatatggagaaggtaccatgtgataagaatggtttcagaacagctccatgaagactgggaactattaatgaaccagcctaacatcgacttgactactcaatggatatccaaaaagatgcttagaccgtttcttttcttcattactcaaccttctagctggtatattggacaatggagcaagactgtggaatctatcttaacatgcttcaagattatcttgaatagtataaattcaatggatgcaaggaaaaacttctgctcctttgctgtgggtataccagaagagagatctatttggctttatcaggccaaaaagctgatttcactgtgctcttccattcttgccaggtacgaccattcctgttgcaaggatggaagcatagtcgacatgactgctattgctatgagattggctgtctctctaactgattgcaaaacatggaaaagtttgaacagtgagaacactagcgctgcagatgcttctgtacagagtttgattgaatttattggtacgtgccagagtggcatgtataattgtgttaggcaatatataaagtctcttggtcctcatgttacttcagcgaagaaaagttctgcaactgcaacagatgatgattttcttattactgctagtgcagtcactttagccttgcgcccattcgattctaagaaagcaaagggcggtgttgatctgaatggtgcttcaaagaaatacttcacacttatacttacaataccagatctgtgcaaacgcatgccacctcttttgttacctgctcttaaacatttttctgtgctgcaaccgagtctcaatattttactgatctccaaggataaaatatttgaagaaataataaaactggaacagtcagaggtttcagctagtattattccttgttctggttgggctcttggaaatatagtgaacttagctaccaatcatgatgacttatccaattcagggtgtttcattcaagagttagatttctgcttatatgttgatgttattaattgtatttctgaaaacttactggaaagttttgagaaaagcaagggaacgtctcaaaatgttggtaatatcactttccatgccgacacatctgttgcagaggaagaggataccaatgacgactgcagaatgagaacattatttatggaccttctgaagccaatttaccagcaatggcaccttagaaaacttttgatgttggcaaaagaggattttccatgccgcagggcaactgattatgatccaaacttgaagaatattcactttcgaatcctaaagttgtcagatgttatatgcttctactatcacatgcttagaattttctcatcacttaacccttctatcggtgcaatgcctattctcaacatgcttgcattctcacctggatttctagttgatttatgggaggcactagaaatgcccatttttggtccacctatccagaattcacaagaaacaggacacgagaaacagttggctacaagtagttcaggtgtgcaagtatcctccatgaggcaaagaaggaatgccaaggacacagcaaacaggtggtcaaatgtgctccagaagattactggaaaatccaatgattcagaggagggcactttatctgatagtattttattttctcatgagtctaatgatgatgcattaacttcatgggatattgaagccatgagacatgcatctgagggtattggaaaggacttaatgtgcattatgtatcttttctgtgctatatatggacacctattacttgtgctagatgatatcgagttttatgaaaagcaggttccttttactttagagcagcagcggaagattgcatcagcacttaatacatttgtatacaattctttcattcaaaatagtggaagctacagcaatcctcttgtggatgtagctgtcagatgtcttaatctactctatgaaagggacagtaggcataagttttgtcctatttccttgtggttggcacctgctagaaatggccgaattccaattgctgctgctgccaggtctcatgaggcagcatttggtatttttccagggattcctcatcggagctctgtacttaccacattaccacatgtatatccatttgaagagagagtgcaaatgtttagagaatttattgagtcagacaaagcatcgagaagggttactggtgaagtttctgggccaggcccgggatcgattgagatagttattcgtcgaggccatataattgatgatggatacaggcagttgaactgcctaagatcaaagttgaaatcttgcattcacgtgtcatttgtgagtgaatgcggtcttcctgaagctggtttggactatggtggtctgtcaaaagagttcctaacagatctctcaaagtccgcttttagtccagagtatggactattttcacaaacatcagcatctgatactagcttaattcccagcaattctgctaagcttctggataacggaattgatatgattgaatttcttggtcgagttgtcggcaaagcactctatgaggggattctgttggactattctttctcaccagtatttgtgcagaaacttcttggacggtataattttctggatgaactatcaactcttgatcccgagctttatagaaatcttatgcaactaaagcactatgatggagatgttgaggatctatttttggattttactgtaactgaagagttgggtggtaaaagaatcgtccatgagcttagacctggtggtaaaaatatatcagtgacgaacgaaaacaagttacactatgttcatgcaatggcagatttcaaacttaaccgacagatacttccatttgcaaacgcattttatagaggactcagcgatctcatttcaccatattggctgagcctgtttaatgcaaatgaatttaatcagttactttcaggcggactacaggattttgacgttgatgatttgcggaacaacaccaagtatactggtggttatactgagtcaagtcgaactgttaaactcttctgggaggtcatcaaagcatttaagccaacagagcgttgtttgctcttaaagtttgtgacaagctgttcacgagctccactgcttggattcaagtacttgcaaccttctttcacaattcataaggttccatgtgatgtaacactttgggcatcaattggaggccaagatgtagatcgtcttccatctgcttccacatgctacaatacgctcaagcttcctacatacaagcggtcaagcacgctaaggagcaagctgctttacgccataagctcaaatactggatttgaactctcgtagaggctcctagtccttgtcggtccaacaacggagatggtgacatg

SEQ ID NO: 47986 - DNA, 3927 bp, Zea Mays
acgcgtccgtgatccgtccgtcgccctccccttcctgcgcaagcgtgcgcctacctgcatccgctatccgtcggcgatgtcggtgccccccgccggcaagcgccaggtgtccctgcggggctcgagcgcgaaggagatcacacgcgacgcgctgctgcagaaggtttccgaggagcgccagctccgcagccacctccgccgcgccgccgcggccgccttctccatccagcgaatatggagaaggtaccatgtgataagaatggtttcagaacagctccatgaagactgggaactattaatgaaccagcctaacatcgacttgactactcaatggatatccaaaaagatgcttagaccgtttcttttcttcattactcaaccttctagctggtatattggacaatggagcaagactgtggaatctatcttaacatgcttcaagattatcttgaatagtataaattcaatggatgcaaggaaaaacttctgctcctttgctgtgggtataccagaagagagatctatttggctttatcaggccaaaaagctgatttcactgtgctcttccattcttgccaggtacgaccattcctgttgcaaggatggaagcatagtcgacatgactgctattgctatgagattggctgtctctctaactgattgcaaaacatggaaaagtttgaacagtgagaacactagcgctgcagatgcttctgtacagagtttgattgaatttattggtacgtgccagagtggcatgtataattgtgttaggcaatatataaagtctcttggtcctcatgttacttcagcgaagaaaagttctgcaactgcaacagatgatgattttcttattactgctagtgcagtcactttagccttgcgcccattcgattctaagaaagcaaagggcggtgttgatctgaatggtgcttcaaagaaatacttcacacttatacttacaataccagatctgtgcaaacgcatgccacctcttttgttacctgctcttaaacatttttctgtgctgcaaccgagtctcaatattttactgatctccaaggataaaatatttgaagaaataataaaactggaacagtcagaggtttcagctagtattattccttgttctggttgggctcttggaaatatagtgaacttagctaccaatcatgatgacttatccaattcagggtgtttcattcaagagttagatttctgcttatatgttgatgttattaattgtatttctgaaaacttactggaaagttttgagaaaagcaagggaacgtctcaaaatgttggtaatatcactttccatgccgacacatctgttgcagaggaagaggataccaatgacgactgcagaatgagaacattatttatggaccttctgaagccaatttaccagcaatggcaccttagaaaacttttgatgttggcaaaagaggattttccatgccgcagggcaactgattatgatccaaacttgaagaatattcactttcgaatcctaaagttgtcagatgttatatgcttctactatcacatgcttagaattttctcatcacttaacccttctatcggtgcaatgcctattctcaacatgcttgcattctcacctggatttctagttgatttatgggaggcactagaaatgcccatttttggtccacctatccagaattcacaagaaacaggacacgagaaacagttggctacaagtagttcaggtgtgcaagtatcctccatgaggcaaagaaggaatgccaaggacacagcaaacaggtggtcaaatgtgctccagaagattactggaaaatccaatgattcagaggagggcactttatctgatagtattttattttctcatgagtctaatgatgatgcattaacttcatgggatattgaagccatgagacatgcatctgagggtattggaaaggacttaatgtgcattatgtatcttttctgtgctatatatggacacctattacttgtgctagatgatatcgagttttatgaaaagcaggttccttttactttagagcagcagcggaagattgcatcagcacttaatacatttgtatacaattctttcattcaaaatagtggaagctacagcaatcctcttgtggatgtagctgtcagatgtcttaatctactctatgaaagggacagtaggcataagttttgtcctatttccttgtggttggcacctgctagaaatggccgaattccaattgctgctgctgccaggtctcatgaggcagcatttggtatttttccagggattcctcatcggagctctgtacttaccacattaccacatgtatatccatttgaagagagagtgcaaatgtttagagaatttattgagtcagacaaagcatcgagaagggttactggtgaagtttctgggccaggcccgggatcgattgagatagttattcgtcgaggccatataattgatgatggatacaggcagttgaactgcctaagatcaaagttgaaatcttgcattcacgtgtcatttgtgagtgaatgcggtcttcctgaagctggtttggactatggtggtctgtcaaaagagttcctaacagatctctcaaagtccgcttttagtccagacaattctgctaagcttctggataacggaattgatatgattgaatttcttggtcgagttgtcggcaaagcactctatgaggggattctgttggactattctttctcaccagtatttgtgcagaaacttcttggacggtataattttctggatgaactatcaactcttgatcccgagctttatagaaatcttatgcaactaaagcactatgatggagatgttgaggatctatttttggattttactgtaactgaagagttgggtggtaaaagaatcgtccatgagcttagacctggtggtaaaaatatatcagtgacgaacgaaaacaagttacactatgttcatgcaatggcagatttcaaacttaaccgacagatacttccatttgcaaacgcattttatagaggactcagcgatctcatttcaccatattggctgagcctgtttaatgcaaatgaatttaatcagttactttcaggcggactacaggattttgacgttgatgatttgcggaacaacaccaagtatactggtggttatactgagtcaagtcgaactgttaaactcttctgggaggtcatcaaagcatttaagccaacagagcgttgtttgctcttaaagtttgtgacaagctgttcacgagctccactgcttggattcaagtacttgcaaccttctttcacaattcataaggttccatgtgatgtaacactttgggcatcaattggaggccaagatgtagatcgtcttccatctgcttccacatgctacaatacgctcaagcttcctacatacaagcggtcaagcacgctaaggagcaagctgctttacgccataagctcaaatactggatttgaactctcgtagaggtatattcagtggttttgtaaccctgctttggttttgctgtgaatagaggtatagcaaaattcgatcggatgtacaattgcatcttgattaatcggagtaacagcttctatgaaggtagcgcaatgcataaaaaatgtttgtttggccggcggggccgtttggatcgatcccaggcaaaatccgacgcctggggagctccgttcaccaggccggtttgcaattcaaacagccatacgtgtgtttctattgattgtgctgagagagagagagagagagagagagagagagagggaggggggagggagagggagatagagagagagtgagggaggagagagagagagagagagagagagagagagagagagagagagagagagagagagaaagagagagagagagagagagagagagagagagagagagag

SEQ ID NO: 47987 - DNA, 4005 bp, Zea Mays
acgcgtccgtgatccgtccgtcgccctccccttcctgcgcaagcgtgcgcctacctgcatccgctatccgtcggcgatgtcggtgccccccgccggcaagcgccaggtgtccctgcggggctcgagcgcgaaggagatcacacgcgacgcgctgctgcagaaggtttccgaggagcgccagctccgcagccacctccgccgcgccgccgcggccgccttctccatccagcgaatatggagaaggtaccatgtgataagaatggtttcagaacagctccatgaagactgggaactattaatgaaccagcctaacatcgacttgactactcaatggatatccaaaaagatgcttagaccgtttcttttcttcattactcaaccttctagctggtatattggacaatggagcaagactgtggaatctatcttaacatgcttcaagattatcttgaatagtataaattcaatggatgcaaggaaaaacttctgctcctttgctgtgggtataccagaagagagatctatttggctttatcaggccaaaaagctgatttcactgtgctcttccattcttgccaggtacgaccattcctgttgcaaggatggaagcatagtcgacatgactgctattgctatgagattggctgtctctctaactgattgcaaaacatggaaaagtttgaacagtgagaacactagcgctgcagatgcttctgtacagagtttgattgaatttattggtacgtgccagagtggcatgtataattgtgttaggcaatatataaagtctcttggtcctcatgttacttcagcgaagaaaagttctgcaactgcaacagatgatgattttcttattactgctagtgcagtcactttagccttgcgcccattcgattctaagaaagcaaagggcggtgttgatctgaatggtgcttcaaagaaatacttcacacttatacttacaataccagatctgtgcaaacgcatgccacctcttttgttacctgctcttaaacatttttctgtgctgcaaccgagtctcaatattttactggtggcggcagatctccaaggataaaatatttgaagaaataataaaactggaacagtcagaggtttcagctagtattattccttgttctggttgggctcttggaaatatagtgaacttagctaccaatcatgatgacttatccaattcagggtgtttcattcaagagttagatttctgcttatatgttgatgttattaattgtatttctgaaaacttactggaaagttttgagaaaagcaagggaacgtctcaaaatgttggtaatatcactttccatgccgacacatctgttgcagaggaagaggataccaatgacgactgcagaatgagaacattatttatggaccttctgaagccaatttaccagcaatggcaccttagaaaacttttgatgttggcaaaagaggattttccatgccgcagggcaactgattatgatccaaacttgaagaatattcactttcgaatcctaaagttgtcagatgttatatgcttctactatcacatgcttagaattttctcatcacttaacccttctatcggtgcaatgcctattctcaacatgcttgcattctcacctggatttctagttgatttatgggaggcactagaaatgcccatttttggtccacctatccagaattcacaagaaacaggacacgagaaacagttggctacaagtagttcaggtgtgcaagtatcctccatgaggcaaagaaggaatgccaaggacacagcaaacaggtggtcaaatgtgctccagaagattactggaaaatccaatgattcagaggagggcactttatctgatagtattttattttctcatgagtctaatgatgatgcattaacttcatgggatattgaagccatgagacatgcatctgagggtattggaaaggacttaatgtgcattatgtatcttttctgtgctatatatggacacctattacttgtgctagatgatatcgagttttatgaaaagcaggttccttttactttagagcagcagcggaagattgcatcagcacttaatacatttgtatacaattctttcattcaaaatagtggaagctacagcaatcctcttgtggatgtagctgtcagatgtcttaatctactctatgaaagggacagtaggcataagttttgtcctatttccttgtggttggcacctgctagaaatggccgaattccaattgctgctgctgccaggtctcatgaggcagcatttggtatttttccagggattcctcatcggagctctgtacttaccacattaccacatgtatatccatttgaagagagagtgcaaatgtttagagaatttattgagtcagacaaagcatcgagaagggttactggtgaagtttctgggccaggcccgggatcgattgagatagttattcgtcgaggccatataattgatgatggatacaggcagttgaactgcctaagatcaaagttgaaatcttgcattcacgtgtcatttgtgagtgaatgcggtcttcctgaagctggtttggactatggtggtctgtcaaaagagttcctaacagatctctcaaagtccgcttttagtccagagtatggactattttcacaaacatcagcatctgatactagcttaattcccagcaattctgctaagcttctggataacggaattgatatgattgaatttcttggtcgagttgtcggcaaagcactctatgaggggattctgttggactattctttctcaccagtatttgtgcagaaacttcttggacggtataattttctggatgaactatcaactcttgatcccgagctttatagaaatcttatgcaactaaagcactatgatggagatgttgaggatctatttttggattttactgtaactgaagagttgggtggtaaaagaatcgtccatgagcttagacctggtggtaaaaatatatcagtgacgaacgaaaacaagttacactatgttcatgcaatggcagatttcaaacttaaccgacagcaccattgtccttgcagatacttccatttgcaaacgcattttatagaggactcagcgatctcatttcaccatattggctgagcctgtttaatgcaaatgaatttaatcagttactttcaggcggactacaggattttgacgttgatgatttgcggaacaacaccaagtatactggtggttatactgagtcaagtcgaactgttaaactcttctgggaggtcatcaaagcatttaagccaacagagcgttgtttgctcttaaagtttgtgacaagctgttcacgagctccactgcttggattcaagtacttgcaaccttctttcacaattcataaggttccatgtgatgtaacactttgggcatcaattggaggccaagatgtagatcgtcttccatctgcttccacatgctacaatacgctcaagcttcctacatacaagcggtcaagcacgctaaggagcaagctgctttacgccataagctcaaatactggatttgaactctcgtagaggtatattcagtggttttgtaaccctgctttggttttgctgtgaatagaggtatagcaaaattcgatcggatgtacaattgcatcttgattaatcggagtaacagcttctatgaaggtagcgcaatgcataaaaaatgtttgtttggccggcggggccgtttggatcgatcccaggcaaaatccgacgcctggggagctccgttcaccaggccggtttgcaattcaaacagccatacgtgtgtttctattgattgtgctgagagagagagagagagagagagagagagagagggaggggggagggagagggagatagagagagagtgagggaggagagagagagagagagagagagagagagagagagagagagagagagagagagagaaagagagagagagagagagagagagagagagagagagagag

SEQ ID NO: 47988 - DNA, 4565 bp, Zea Mays
acgcgtccgtgatccgtccgtcgccctccccttcctgcgcaagcgtgcgcctacctgcatccgctatccgtcggcgatgtcggtgccccccgccggcaagcgccaggtgtccctgcggggctcgagcgcgaaggagatcacacgcgacgcgctgctgcagaaggtttccgaggagcgccagctccgcagccacctccgccgcgccgccgcggccgccttctccatccagcgaatatggagaaggtaccatgtgataagaatggtttcagaacagctccatgaagactgggaactattaatgaaccagcctaacatcgacttgactactcaatggatatccaaaaagatgcttagaccgtttcttttcttcattactcaaccttctagctggtatattggacaatggagcaagactgtggaatctatcttaacatgcttcaagattatcttgaatagtataaattcaatggatgcaaggaaaaacttctgctcctttgctgtgggtataccagaagagagatctatttggctttatcaggccaaaaagctgatttcactgtgctcttccattcttgccaggtacgaccattcctgttgcaaggatggaagcatagtcgacatgactgctattgctatgagattggctgtctctctaactgattgcaaaacatggaaaagtttgaacagtgagaacactagcgctgcagatgcttctgtacagagtttgattgaatttattggtacgtgccagagtggcatgtataattgtgttaggcaatatataaagtctcttggtcctcatgttacttcagcgaagaaaagttctgcaactgcaacagatgatgattttcttattactgctagtgcagtcactttagccttgcgcccattcgattctaagaaagcaaagggcggtgttgatctgaatggtgcttcaaagaaatacttcacacttatacttacaataccagatctgtgcaaacgcatgccacctcttttgttacctgctcttaaacatttttctgtgctgcaaccgagtctcaatattttactggtggcggcagatctccaaggataaaatatttgaagaaataataaaactggaacagtcagaggtttcagctagtattattccttgttctggttgggctcttggaaatatagtgaacttagctaccaatcatgatgacttatccaattcagggtgtttcattcaagagttagatttctgcttatatgttgatgttattaattgtatttctgaaaacttactggaaagttttgagaaaagcaagggaacgtctcaaaatgttggtaatatcactttccatgccgacacatctgttgcagaggaagaggataccaatgacgactgcagaatgagaacattatttatggaccttctgaagccaatttaccagcaatggcaccttagaaaacttttgatgttggcaaaagaggattttccatgccgcagggcaactgattatgatccaaacttgaagaatattcactttcgaatcctaaagttgtcagatgttatatgcttctactatcacatgcttagaattttctcatcacttaacccttctatcggtgcaatgcctattctcaacatgcttgcattctcacctggatttctagttgatttatgggaggcactagaaatgcccatttttggtccacctatccagaattcacaagaaacaggacacgagaaacagttggctacaagtagttcaggtgtgcaagtatcctccatgaggcaaagaaggaatgccaaggacacagcaaacaggtggtcaaatgtgctccagaagattactggaaaatccaatgattcagaggagggcactttatctgatagtattttattttctcatgagtctaatgatgatgcattaacttcatgggatattgaagccatgagacatgcatctgagggtattggaaaggacttaatgtgcattatgtatcttttctgtgctatatatggacacctattacttgtgctagatgatatcgagttttatgaaaagcaggttccttttactttagagcagcagcggaagattgcatcagcacttaatacatttgtatacaattctttcattcaaaatagtggaagctacagcaatcctcttgtggatgtagctgtcagatgtcttaatctactctatgaaagggacagtaggcataagttttgtcctatttccttgtggttggcacctgctagaaatggccgaattccaattgctgctgctgccaggtctcatgaggcagcatttggtatttttccagggattcctcatcggagctctgtacttaccacattaccacatgtatatccatttgaagagagagtgcaaatgtttagagaatttattgagtcagacaaagcatcgagaagggttactggtgaagtttctgggccaggcccgggatcgattgagatagttattcgtcgaggccatataattgatgatggatacaggcagttgaactgcctaagatcaaagttgaaatcttgcattcacgtgtcatttgtgagtgaatgcggtcttcctgaagctggtttggactatggtggtctgtcaaaagagttcctaacagatctctcaaagtccgcttttagtccagagtatggactattttcacaaacatcagcatctgatactagcttaattcccagcaattctgctaagcttctggataacggaattgatatgattgaatttcttggtcgagttgtcggcaaagcactctatgaggggattctgttggactattctttctcaccagtatttgtgcagaaacttcttggacggtataattttctggatgaactatcaactcttgatcccgagctttatagaaatcttatgcaactaaagcactatgatggagatgttgaggatctatttttggattttactgtaactgaagagttgggtggtaaaagaatcgtccatgagcttagacctggtggtaaaaatatatcagtgacgaacgaaaacaagttacactatgttcatgcaatggcagatttcaaacttaaccgacaggttcgtgacactgttttctcttgatttactaggttttgttcggtaccagtaaagttttttgttagcaccattgtccttgcagatacttccatttgcaaacgcattttatagaggactcagcgatctcatttcaccatattggctgagcctgtttaatgcaaatgaatttaatcagttactttcaggcggactacaggattttgacgttgatgatttgcggaacaacaccaagtatactggtggttatactgagtcaagtcgaactgttaaactcttctgggaggtatatgtatctgtacagttttgctcattttgcattaatggtttcttgctatttcctgttttgcattatatattttggggtgcatgtaacttggtaaggtcctaggattaccagcttggttacctatattcaatcaattacatacccaatttggaaatgtctggagcagtgcagttgttcatgtattttcttatctggtgataataacttttgaaaaaatatcatttgattttctgtaatataattatgaattgtgatcctgacatgctcacggatgaaacttgccttatacactcatgccatacttgcactgcatttctggcctatttgcttgtgtagcatgcacttgcccactcattttctatgctatataaacgattttctgtttgcctctgtcatttcagccaattttggtgatggtgaaataactatttttgttcaccaacagcaaatataaatattagtatggttcacacatttttactcgttatgcaggtcatcaaagcatttaagccaacagagcgttgtttgctcttaaagtttgtgacaagctgttcacgagctccactgcttggattcaagtacttgcaaccttctttcacaattcataaggttccatgtgatgtaacactttgggcatcaattggaggccaagatgtagatcgtcttccatctgcttccacatgctacaatacgctcaagcttcctacatacaagcggtcaagcacgctaaggagcaagctgctttacgccataagctcaaatactggatttgaactctcgtagaggtatattcagtggttttgtaaccctgctttggttttgctgtgaatagaggtatagcaaaattcgatcggatgtacaattgcatcttgattaatcggagtaacagcttctatgaaggtagcgcaatgcataaaaaatgtttgtttggccggcggggccgtttggatcgatcccaggcaaaatccgacgcctggggagctccgttcaccaggccggtttgcaattcaaacagccatacgtgtgtttctattgattgtgctgagagagagagagagagagagagagagagagagggaggggggagggagagggagatagagagagagtgagggaggagagagagagagagagagagagagagagagagagagagagagagagagagagagaaagagagagagagagagagagagagagagagagagagagag

SEQ ID NO: 47989 - DNA, 3777 bp, Zea Mays
gtgaattgcatgccggtcgtgtgggctttggcgctggtgggtccatcagttgaaagttgaaacgccggggtgcgtcgcactgtcgcttcgcttgcgctcttcgcgtccgttcccccccaaagccacgataaatatgcgctcgagaccgaccctttcggccgtaatctcctccgctcaagccgtagtagggtttccgtagcccagcccatgtcgacgcgcgacggcggaggcggccggcgtggcggcaatgcagcagcaggccgtggaggtgacggccaagggcggggccgtggagggggcggccgaggtggcgccggcggccgtggcggtggcggccaatggcgggcccaaggcggcgcggagcttggcggtggccgaggtggagccgtcggcgcagcgcgtggcggccgcggaggtgtcgagagagggggtcaccagtccttccacggcgccaggccggtcggtggggaccgaggcggacgcggacactaccaccatggcgtgcctgctcaggtccagccgcagtggcaagtggccgcgccgccttcgacgtcgaggccgacacccgcggaagtcgaggagctgagaggcgaggtggagaggaaggcggcggtggcggtgccagacgcagaggcgcacgaggggccgtcgtcgggcaccgcgcatgagccttccgccgcgccggcgcgggtcgaagcggagcaagggacgtcgctggtggtggaggcagaccaggccgctcaggggaggctgcctccgtcgtcgagcaaggcgctggttttccccgcgcggccggggtacggcacgctcggccggaggtgccgcgtgcgcgccaaccatttcttcgttcaggtggcggacaaggagatctaccactacgacgtcgtgattagtccagaatcgcagtcaaggaaaagaaatcgttggattcttaacgaactcgttaaattgcacaagaattacttgaatgggcgactgcctgtttatgatggtagaaagggccttttcactgctggtccgctaccgttcaaaaccaaagaatttgttctggaactaaccaatcctgagagagcaaaccagggggcgaaagagtacagcgtgaccataaaagatgctgccaaattagatctttacagccttaggcagttcttggctggtaggcagagggaactgccacaggatactgtccaagccctcgatattgctatgcgagaatgcccaactgaaaagtatgtatccatctcaaggtcatttttctctcagtcatttggacatggtggtgatattggcagtggtgtggaatgctggagggggtactaccaaagtctacgtgctacacaaatgggattgtctttaaatattgatatttcagcaactgcattttacaaggctcaaccgattttggagtttgcattggagtacctcaacatacgtgacacctcaaggcgtttgtctgaccaggatcgcttaaaactgaagaaagtcctcaaaggagtacgtgttgtggcaacacatcgtcgtgatatagccatacattacaagattactgggataacctcacttcccttgaatagtttaacgtttaatcaagatggggcaagtgtttcagttgtccaatactttaaacaccaatataattacagtttgaaacacattcactggccatgccttcaatctggcaatgatagtaggccgacttatttaccaatggaggtttgcagtatacttggcggtcaacgctattctaggaagctaaatgagtaccaagtcacaagcatcctgaagaaggcatgtgagcgaccacctcaaagggagggcagcattttagaggtagttaataggaacgactatggtaatgatcattgtgccaaagaatttggtattaaggtgacaaatgaacttgccttggttgatgcacgggtgctgccagctccgacgcttaagtaccatgactctggacgagaaaaggtgtgtagtccttccgttggtcagtggaacatgaacaacaagagattgatcgatggagtatccattcagtattgggcttgtgtgacttttgcttctcggttgcatccaaatgatgtccgcatgttttgcaacaacttggttggggcgtgcaatgatatgggcatgcaaataaatgggagaccttgtgttgatgttgggcaagcacgcccagataacttagaagctgcactcagaaatactcatagacaatctgcacaaatgcttgcccaacaaggcgtgactagacagcttgatttactaattgttgtattaccagatgcaaatgcaagtgtcttttatggtaggataaagcgtctttgtgaaactgaacttggtttagtaactcaatgttgtcaaccaaagaatgtttttaaaggtggccgacaatatctccaaaacctggctcttaaaattaatgttaaggttggtggccgtaatacagttctcgaagatgctttaaataggagaatacatttgttaacagatttacctacaattatctttggagctgatgttacccacccagctccaggggaagatgcatccccgtctattgcagcggttgttgcatcaatggattggccacaagttgcaaagtacaggtgcttggtgtcttctcaaggtcatagggaagagatcataactgatcttttcacacaagtgaaggatccacaaaagggacttattaacggtggaatgatcagggaactactcgtgtcattctataaggcaaacgggagccgcaaaccaagcaggataattttctatcgagatggtgtcagtgaggggcagtttagccaggtcttgctttatgaagtggatgcaattcgaaaggcgtgtgccagcttggaagagggctaccttcctccaattacattcattgtggtgcaaaagcgccatcacacacggcttttccctgaagatcatcatgcacacggacagatggatcgaagtggaaacattttgccaggaactgttgttgacacgaagatatgccatccaagtgaattcgacttctacctttgtagccactctggcatacagggaacgagccggccagcacactaccatgttctgtttgacgaaaacaaattcactgccgatgcactgcaaacgttgacctacaaactgtgctacacgtatgcgcgatgcactcgatcagtctctatagttcccccggcgtactacgcacacctggcggccttccgtgcgcgccactacatggacgatgacctctccgaccaggggtcgtcttcagtggcgagttctcgcatgaaagatggcgctgttccggtgaagcagctgccgaaagtgatggagagcgtcaaacagttcatgttctactgctgaaggtggcctttgcaggaaggaccttcatcgacacttttgttgccatgaaatgaaacgagtaattctgggttggtgtaattatggtgaagtaaccctgaagggtgggccgcacgacctccaaatcatattttgggtctggcgagtcttctatccaaaactcgtcagaaaacgccttttatttttggtggacttcgtataagtccaaggcattgcctgtgattttggggtttcttttaggttgcaaccttgttttgtttttgaaattttctgctttgaattgatgcattatatatgaagaaatgagcctctcacgctagctccagcaagtgacccaagtatgacaaatatgtatgtacaaaaaataaaaaatgcctctaatatggatatttgagtataaatgacatgatttagaggacattg

SEQ ID NO: 47990 - DNA, 3701 bp, Zea Mays
gcatgccggtcgtgtgggctttggcgctggtgggtccatcagttgaaagttgaaacgccggggtgcgtcgcactgtcgcttcgcttgcgctcttcgcgtccgttcccccccaaagccacgataaatatgcgctcgagaccgaccctttcggccgtaatctcctccgctcaagccgtagtagggtttccgtagcccagcccatgtcgacgcgcgacggcggaggcggccggcgtggcggcaatgcagcagcaggccgtggaggtgacggccaagggcggggccgtggagggggcggccgaggtggcgccggcggccgtggcggtggcggccaatggcgggcccaaggcggcgcggagcttggcggtggccgaggtggagccgtcggcgcagcgcgtggcggccgcggaggtgtcgagagagggggtcaccagtccttccacggcgccaggccggtcggtggggaccgaggcggacgcggacactaccaccatggcgtgcctgctcaggtccagccgcagtggcaagtggccgcgccgccttcgacgtcgaggccgacacccgcggaagtcgaggagctgagaggcgaggtggagaggaaggcggcggtggcggtgccagacgcagaggcgcacgaggggccgtcgtcgggcaccgcgcatgagccttccgccgcgccggcgcgggtcgaagcggagcaagggacgtcgctggtggtggaggcagaccaggccgctcaggggaggctgcctccgtcgtcgagcaaggcgctggttttccccgcgcggccggggtacggcacgctcggccggaggtgccgcgtgcgcgccaaccatttcttcgttcaggtggcggacaaggagatctaccactacgacgtcgtgattagtccagaatcgcagtcaaggaaaagaaatcgttggattcttaacgaactcgttaaattgcacaagaattacttgaatgggcgactgcctgtttatgatggtagaaagggccttttcactgctggtccgctaccgttcaaaaccaaagaatttgttctggaactaaccaatcctgagagagcaaaccagggggcgaaagagtacagcgtgaccataaaagatgctgccaaattagatctttacagccttaggcagttcttggctggtaggcagagggaactgccacaggatactgtccaagccctcgatattgctatgcgagaatgcccaactgaaaagtatgtatccatctcaaggtcatttttctctcagtcatttggacatggtggtgatattggcagtggtgtggaatgctggagggggtactaccaaagtctacgtgctacacaaatgggattgtctttaaatattgatatttcagcaactgcattttacaaggctcaaccgattttggagtttgcattggagtacctcaacatacgtgacacctcaaggcgtttgtctgaccaggatcgcttaaaactgaagaaagtcctcaaaggagtacgtgttgtggcaacacatcgtcgtgatatagccatacattacaagattactgggataacctcacttcccttgaatagtttaacgtttaatcaagatggggcaagtgtttcagttgtccaatactttaaacaccaatataattacagtttgaaacacattcactggccatgccttcaatctggcaatgatagtaggccgacttatttaccaatggaggtttgcagtatacttggcggtcaacgctattctaggaagctaaatgagtaccaagtcacaagcatcctgaagaaggcatgtgagcgaccacctcaaagggagggcagcattttagaggtagttaataggaacgactatggtaatgatcattgtgccaaagaatttggtattaaggtgacaaatgaacttgccttggttgatgcacgggtgctgccagctccgacgcttaagtaccatgactctggacgagaaaaggtgtgtagtccttccgttggtcagtggaacatgaacaacaagagattgatcgatggagtatccattcagtattgggcttgtgtgacttttgcttctcggttgcatccaaatgatgtccgcatgttttgcaacaacttggttggggcgtgcaatgatatgggcatgcaaataaatgggagaccttgtgttgatgttgggcaagcacgcccagataacttagaagctgcactcagaaatactcatagacaatctgcacaaatgcttgcccaacaaggcgtgactagacagcttgatttactaattgttgtattaccagatgcaaatgcaagtgtcttttatggataaagcgtctttgtgaaactgaacttggtttagtaactcaatgttgtcaaccaaagaatgtttttaaaggtggccgacaatatctccaaaacctggctcttaaaattaatgttaaggttgttgcatcaatggattggccacaagttgcaaagtacaggtgcttggtgtcttctcaaggtcatagggaagagatcataactgatcttttcacacaagtgaaggatccacaaaagggacttattaacggtggaatgatcagggaactactcgtgtcattctataaggcaaacgggagccgcaaaccaagcaggataattttctatcgagatggtgtcagtgaggggcagtttagccaggtcttgctttatgaagtggatgcaattcgaaaggtggttttcttcacaatattattctcttttgttgtattctcctaactgagtttacgtttgtgtttgtactcaggcgtgtgccagcttggaagagggctaccttcctccaattacattcattgtggtgcaaaagcgccatcacacacggcttttccctgaagatcatcatgcacacggacagatggatcgaagtggaaacattttgccaggaactgttgttgacacgaagatatgccatccaagtgaattcgacttctacctttgtagccactctggcatacagggaacgagccggccagcacactaccatgttctgtttgacgaaaacaaattcactgccgatgcactgcaaacgttgacctacaaactgtgctacacgtatgcgcgatgcactcgatcagtctctatagttcccccggcgtactacgcacacctggcggccttccgtgcgcgccactacatggacgatgacctctccgaccaggggtcgtcttcagtggcgagttctcgcatgaaagatggcgctgttccggtgaagcagctgccgaaagtgatggagagcgtcaaacagttcatgttctactgctgaaggtggcctttgcaggaaggaccttcatcgacacttttgttgccatgaaatgaaacgagtaattctgggttggtgtaattatggtgaagtaaccctgaagggtgggccgcacgacctccaaatcatattttgggtctggcgagtcttctatccaaaactcgtcagaaaacgccttttatttttggtggacttcgtataagtccaaggcattgcctgtgattttggggtttcttttaggttgcaaccttgttttgtttttgaaattttctgctttgaattgatgcattatatatgaagaaatgagcctctcacgctagctccagcaagtgacccaagtatgacaaatatgtatgtacaaaaaataaaaaatgcctctaatatggatatttgagtataaatgacatgatttagaggacattg

SEQ ID NO: 47991 - DNA, 3947 bp, Zea Mays
gcatgccggtcgtgtgggctttggcgctggtgggtccatcagttgaaagttgaaacgccggggtgcgtcgcactgtcgcttcgcttgcgctcttcgcgtccgttcccccccaaagccacgataaatatgcgctcgagaccgaccctttcggccgtaatctcctccgctcaagccgtagtagggtttccgtagcccagcccatgtcgacgcgcgacggcggaggcggccggcgtggcggcaatgcagcagcaggccgtggaggtgacggccaagggcggggccgtggagggggcggccgaggtggcgccggcggccgtggcggtggcggccaatggcgggcccaaggcggcgcggagcttggcggtggccgaggtggagccgtcggcgcagcgcgtggcggccgcggaggtgtcgagagagggggtcaccagtccttccacggcgccaggccggtcggtggggaccgaggcggacgcggacactaccaccatggcgtgcctgctcaggtccagccgcagtggcaagtggccgcgccgccttcgacgtcgaggccgacacccgcggaagtcgaggagctgagaggcgaggtggagaggaaggcggcggtggcggtgccagacgcagaggcgcacgaggggccgtcgtcgggcaccgcgcatgagccttccgccgcgccggcgcgggtcgaagcggagcaagggacgtcgctggtggtggaggcagaccaggccgctcaggggaggctgcctccgtcgtcgagcaaggcgctggttttccccgcgcggccggggtacggcacgctcggccggaggtgccgcgtgcgcgccaaccatttcttcgttcaggtggcggacaaggagatctaccactacgacgtcgtgattagtccagaatcgcagtcaaggaaaagaaatcgttggattcttaacgaactcgttaaattgcacaagaattacttgaatgggcgactgcctgtttatgatggtagaaagggccttttcactgctggtccgctaccgttcaaaaccaaagaatttgttctggaactaaccaatcctgagagagcaaaccagggggcgaaagagtacagcgtgaccataaaagatgctgccaaattagatctttacagccttaggcagttcttggctggtaggcagagggaactgccacaggatactgtccaagccctcgatattgctatgcgagaatgcccaactgaaaagtatgtatccatctcaaggtcatttttctctcagtcatttggacatggtggtgatattggcagtggtgtggaatgctggagggggtactaccaaagtctacgtgctacacaaatgggattgtctttaaatattgatatttcagcaactgcattttacaaggctcaaccgattttggagtttgcattggagtacctcaacatacgtgacacctcaaggcgtttgtctgaccaggatcgcttaaaactgaagaaagtcctcaaaggagtacgtgttgtggcaacacatcgtcgtgatatagccatacattacaagattactgggataacctcacttcccttgaatagtttaacgtttaatcaagatggggcaagtgtttcagttgtccaatactttaaacaccaatataattacagtttgaaacacattcactggccatgccttcaatctggcaatgatagtaggccgacttatttaccaatggaggtttgcagtatacttggcggtcaacgctattctaggaagctaaatgagtaccaagtcacaagcatcctgaagaaggcatgtgagcgaccacctcaaagggagggcagcattttagaggtagttaataggaacgactatggtaatgatcattgtgccaaagaatttggtattaaggtgacaaatgaacttgccttggttgatgcacgggtgctgccagctccgacgcttaagtaccatgactctggacgagaaaaggtgtgtagtccttccgttggtcagtggaacatgaacaacaagagattgatcgatggagtatccattcagtattgggcttgtgtgacttttgcttctcggttgcatccaaatgatgtccgcatgttttgcaacaacttggttggggcgtgcaatgatatgggcatgcaaataaatgggagaccttgtgttgatgttgggcaagcacgcccagataacttagaagctgcactcagaaatactcatagacaatctgcacaaatgcttgcccaacaaggcgtgactagacagcttgatttactaattgttgtattaccagatgcaaatgcaagtgtcttttatggtaggataaagcgtctttgtgaaactgaacttggtttagtaactcaatgttgtcaaccaaagaatgtttttaaaggtggccgacaatatctccaaaacctggctcttaaaattaatgttaaggttgttgcatcaatggattggccacaagttgcaaagtacaggtgcttggtgtcttctcaaggtcatagggaagagatcataactgatcttttcacacaagtgaaggatccacaaaagggacttattaacggtggaatgatcagggaactactcgtgtcattctataaggcaaacgggagccgcaaaccaagcaggataattttctatcggttcgtaattgtctgtttgaatgaattatgttgccgtctgaacttaaatctcgtttccgttcatgaaaagacagcacctgccgttttcccttatgttaatacattgttgatacatagcattcaacagctacaccttggggaagaattgccattgtgcacctgaaaaacaagagaactcattttacttgtttccttgacttgcagagatggtgtcagtgaggggcagtttagccaggtcttgctttatgaagtggatgcaattcgaaaggcgtgtgccagcttggaagagggctaccttcctccaattacattcattgtggtgcaaaagcgccatcacacacggcttttccctgaagatcatcatgcacacggacagatggatcgaagtggaaacattttgccaggaactgttgttgacacgaagatatgccatccaagtgaattcgacttctacctttgtagccactctggcatacagggaacgagccggccagcacactaccatgttctgtttgacgaaaacaaattcactgccgatgcactgcaaacgttgacctacaaactgtgctacacgtaaacagtttctttaccacttgcttgtgattcttaacaaaactggtgcatttttaccgttcgaattatggccaccatacttacctggtcggtgatctggctttctttcaggtatgcgcgatgcactcgatcagtctctatagttcccccggcgtactacgcacacctggcggccttccgtgcgcgccactacatggacgatgacctctccgaccaggggtcgtcttcagtggcgagttctcgcatgaaagatggcgctgttccggtgaagcagctgccgaaagtgatggagagcgtcaaacagttcatgttctactgctgaaggtggcctttgcaggaaggaccttcatcgacacttttgttgccatgaaatgaaacgagtaattctgggttggtgtaattatggtgaagtaaccctgaagggtgggccgcacgacctccaaatcatattttgggtctggcgagtcttctatccaaaactcgtcagaaaacgccttttatttttggtggacttcgtataagtccaaggcattgcctgtgattttggggtttcttttaggttgcaaccttgttttgtttttgaaattttctgctttgaattgatgcattatatatgaagaaatgagcctctcacgctagctccagcaagtgacccaagtatgacaaatatgtatgtacaaaaaataaaaaatgcctctaatatggatatttgagtataaatgacatgatttagaggacattg

SEQ ID NO: 47992 - DNA, 3851 bp, Zea Mays
gcatgccggtcgtgtgggctttggcgctggtgggtccatcagttgaaagttgaaacgccggggtgcgtcgcactgtcgcttcgcttgcgctcttcgcgtccgttcccccccaaagccacgataaatatgcgctcgagaccgaccctttcggccgtaatctcctccgctcaagccgtagtagggtttccgtagcccagcccatgtcgacgcgcgacggcggaggcggccggcgtggcggcaatgcagcagcaggccgtggaggtgacggccaagggcggggccgtggagggggcggccgaggtggcgccggcggccgtggcggtggcggccaatggcgggcccaaggcggcgcggagcttggcggtggccgaggtggagccgtcggcgcagcgcgtggcggccgcggaggtgtcgagagagggggtcaccagtccttccacggcgccaggccggtcggtggggaccgaggcggacgcggacactaccaccatggcgtgcctgctcaggtccagccgcagtggcaagtggccgcgccgccttcgacgtcgaggccgacacccgcggaagtcgaggagctgagaggcgaggtggagaggaaggcggcggtggcggtgccagacgcagaggcgcacgaggggccgtcgtcgggcaccgcgcatgagccttccgccgcgccggcgcgggtcgaagcggagcaagggacgtcgctggtggtggaggcagaccaggccgctcaggggaggctgcctccgtcgtcgagcaaggcgctggttttccccgcgcggccggggtacggcacgctcggccggaggtgccgcgtgcgcgccaaccatttcttcgttcaggtggcggacaaggagatctaccactacgacgtcgtgattagtccagaatcgcagtcaaggaaaagaaatcgttggattcttaacgaactcgttaaattgcacaagaattacttgaatgggcgactgcctgtttatgatggtagaaagggccttttcactgctggtccgctaccgttcaaaaccaaagaatttgttctggaactaaccaatcctgagagagcaaaccagggggcgaaagagtacagcgtgaccataaaagatgctgccaaattagatctttacagccttaggcagttcttggctggtaggcagagggaactgccacaggatactgtccaagccctcgatattgctatgcgagaatgcccaactgaaaagtatgtatccatctcaaggtcatttttctctcagtcatttggacatggtggtgatattggcagtggtgtggaatgctggagggggtactaccaaagtctacgtgctacacaaatgggattgtctttaaatattgatatttcagcaactgcattttacaaggctcaaccgattttggagtttgcattggagtacctcaacatacgtgacacctcaaggcgtttgtctgaccaggatcgcttaaaactgaagaaagtcctcaaaggagtacgtgttgtggcaacacatcgtcgtgatatagccatacattacaagattactgggataacctcacttcccttgaatagtttaacgtttaatcaagatggggcaagtgtttcagttgtccaatactttaaacaccaatataattacagtttgaaacacattcactggccatgccttcaatctggcaatgatagtaggccgacttatttaccaatggaggtttgcagtatacttggcggtcaacgctattctaggaagctaaatgagtaccaagtcacaagcatcctgaagaaggcatgtgagcgaccacctcaaagggagggcagcattttagaggtagttaataggaacgactatggtaatgatcattgtgccaaagaatttggtattaaggtgacaaatgaacttgccttggttgatgcacgggtgctgccagctccgacgcttaagtaccatgactctggacgagaaaaggtgtgtagtccttccgttggtcagtggaacatgaacaacaagagattgatcgatggagtatccattcagtattgggcttgtgtgacttttgcttctcggttgcatccaaatgatgtccgcatgttttgcaacaacttggttggggcgtgcaatgatatgggcatgcaaataaatgggagaccttgtgttgatgttgggcaagcacgcccagataacttagaagctgcactcagaaatactcatagacaatctgcacaaatgcttgcccaacaaggcgtgactagacagcttgatttactaattgttgtattaccagatgcaaatgcaagtgtcttttatggataaagcgtctttgtgaaactgaacttggtttagtaactcaatgttgtcaaccaaagaatgtttttaaaggtggccgacaatatctccaaaacctggctcttaaaattaatgttaaggttggtggccgtaatacagttctcgaagatgctttaaataggagaatacatttgttaacagatttacctacaattatctttggagctgatgttacccacccagctccaggggaagatgcatccccgtctattgcagcggttgttgcatcaatggattggccacaagttgcaaagtacaggtgcttggtgtcttctcaaggtcatagggaagagatcataactgatcttttcacacaagtgaaggatccacaaaagggacttattaacggtggaatgatcaggcatgccgaacatcttaggtgtctaactttgttcttcaaataaatgatctttcctttttttttaaatgtcatattgttgattcagggaactactcgtgtcattctataaggcaaacgggagccgcaaaccaagcaggataattttctatcgagatggtgtcagtgaggggcagtttagccaggtcttgctttatgaagtggatgcaattcgaaaggcgtgtgccagcttggaagagggctaccttcctccaattacattcattgtggtgcaaaagcgccatcacacacggcttttccctgaagatcatcatgcacacggacagatggatcgaagtggaaacattttgccaggaactgttgttgacacgaagatatgccatccaagtgaattcgacttctacctttgtagccactctggcatacagggaacgagccggccagcacactaccatgttctgtttgacgaaaacaaattcactgccgatgcactgcaaacgttgacctacaaactgtgctacacgtatgcgcgatgcactcgatcagtctctatagttcccccggcgtactacgcacacctggcggccttccgtgcgcgccactacatggacgatgacctctccgaccaggggtcgtcttcagtggcgagttctcgcatgaaagatggcgctgttccggtgaagcagctgccgaaagtgatggagagcgtcaaacagttcatgttctactgctgaaggtggcctttgcaggaaggaccttcatcgacacttttgttgccatgaaatgaaacgagtaattctgggttggtgtaattatggtgaagtaaccctgaagggtgggccgcacgacctccaaatcatattttgggtctggcgagtcttctatccaaaactcgtcagaaaacgccttttatttttggtggacttcgtataagtccaaggcattgcctgtgattttggggtttcttttaggttgcaaccttgttttgtttttgaaattttctgctttgaattgatgcattatatatgaagaaatgagcctctcacgctagctccagcaagtgacccaagtatgacaaatatgtatgtacaaaaaataaaaaatgcctctaatatggatatttgagtataaatgacatgatttagaggacattg

SEQ ID NO: 47993 - DNA, 3833 bp, Zea Mays
gcatgccggtcgtgtgggctttggcgctggtgggtccatcagttgaaagttgaaacgccggggtgcgtcgcactgtcgcttcgcttgcgctcttcgcgtccgttcccccccaaagccacgataaatatgcgctcgagaccgaccctttcggccgtaatctcctccgctcaagccgtagtagggtttccgtagcccagcccatgtcgacgcgcgacggcggaggcggccggcgtggcggcaatgcagcagcaggccgtggaggtgacggccaagggcggggccgtggagggggcggccgaggtggcgccggcggccgtggcggtggcggccaatggcgggcccaaggcggcgcggagcttggcggtggccgaggtggagccgtcggcgcagcgcgtggcggccgcggaggtgtcgagagagggggtcaccagtccttccacggcgccaggccggtcggtggggaccgaggcggacgcggacactaccaccatggcgtgcctgctcaggtccagccgcagtggcaagtggccgcgccgccttcgacgtcgaggccgacacccgcggaagtcgaggagctgagaggcgaggtggagaggaaggcggcggtggcggtgccagacgcagaggcgcacgaggggccgtcgtcgggcaccgcgcatgagccttccgccgcgccggcgcgggtcgaagcggagcaagggacgtcgctggtggtggaggcagaccaggccgctcaggggaggctgcctccgtcgtcgagcaaggcgctggttttccccgcgcggccggggtacggcacgctcggccggaggtgccgcgtgcgcgccaaccatttcttcgttcaggtggcggacaaggagatctaccactacgacgtcgtgattagtccagaatcgcagtcaaggaaaagaaatcgttggattcttaacgaactcgttaaattgcacaagaattacttgaatgggcgactgcctgtttatgatggtagaaagggccttttcactgctggtccgctaccgttcaaaaccaaagaatttgttctggaactaaccaatcctgagagagcaaaccagggggcgaaagagtacagcgtgaccataaaagatgctgccaaattagatctttacagccttaggcagttcttggctggtaggcagagggaactgccacaggatactgtccaagccctcgatattgctatgcgagaatgcccaactgaaaagtatgtatccatctcaaggtcatttttctctcagtcatttggacatggtggtgatattggcagtggtgtggaatgctggagggggtactaccaaagtctacgtgctacacaaatgggattgtctttaaatattgatatttcagcaactgcattttacaaggctcaaccgattttggagtttgcattggagtacctcaacatacgtgacacctcaaggcgtttgtctgaccaggatcgcttaaaactgaagaaagtcctcaaaggagtacgtgttgtggcaacacatcgtcgtgatatagccatacattacaagattactgggataacctcacttcccttgaatagtttaacgtttaatcaagatggggcaagtgtttcagttgtccaatactttaaacaccaatataattacagtttgaaacacattcactggccatgccttcaatctggcaatgatagtaggccgacttatttaccaatggaggtttgcagtatacttggcggtcaacgctattctaggaagctaaatgagtaccaagtcacaagcatcctgaagaaggcatgtgagcgaccacctcaaagggagggcagcattttagaggtagttaataggaacgactatggtaatgatcattgtgccaaagaatttggtattaaggtgacaaatgaacttgccttggttgatgcacgggtgctgccagctccgacgcttaagtaccatgactctggacgagaaaaggtgtgtagtccttccgttggtcagtggaacatgaacaacaagagattgatcgatggagtatccattcagtattgggcttgtgtgacttttgcttctcggttgcatccaaatgatgtccgcatgttttgcaacaacttggttggggcgtgcaatgatatgggcatgcaaataaatgggagaccttgtgttgatgttgggcaagcacgcccagataacttagaagctgcactcagaaatactcatagacaatctgcacaaatgcttgcccaacaaggcgtgactagacagcttgatttactaattgttgtattaccagatgcaaatgcaagtgtcttttatggtaggataaagcgtctttgtgaaactgaacttggtttagtaactcaatgttgtcaaccaaagaatgtttttaaaggtggccgacaatatctccaaaacctggctcttaaaattaatgttaaggttggtggccgtaatacagttctcgaagatgctttaaataggagaatacatttgttaacagatttacctacaattatctttggagctgatgttacccacccagctccaggggaagatgcatccccgtctattgcagcgtttatgataggttgttgcatcaatggattggccacaagttgcaaagtacaggtgcttggtgtcttctcaaggtcatagggaagagatcataactgatcttttcacacaagtgaaggatccacaaaagggacttattaacggtggaatgatcagggaactactcgtgtcattctataaggcaaacgggagccgcaaaccaagcaggataattttctatcgagatggtgtcagtgaggggcagtttagccaggtcttgctttatgaagtggatgcaattcgaaaggtggttttcttcacaatattattctcttttgttgtattctcctaactgagtttacgtttgtgtttgtactcaggcgtgtgccagcttggaagagggctaccttcctccaattacattcattgtggtgcaaaagcgccatcacacacggcttttccctgaagatcatcatgcacacggacagatggatcgaagtggaaacattttgccagatatgccatccaagtgaattcgacttctacctttgtagccactctggcatacagggaacgagccggccagcacactaccatgttctgtttgacgaaaacaaattcactgccgatgcactgcaaacgttgacctacaaactgtgctacacgtatgcgcgatgcactcgatcagtctctatagttcccccggcgtactacgcacacctggcggccttccgtgcgcgccactacatggacgatgacctctccgaccaggggtcgtcttcagtggcgagttctcgcatgaaagatggcgctgttccggtgaagcagctgccgaaagtgatggagagcgtcaaacagttcatgttctactgctgaaggtggcctttgcaggaaggaccttcatcgacacttttgttgccatgaaatgaaacgagtaattctgggttggtgtaattatggtgaagtaaccctgaagggtgggccgcacgacctccaaatcatattttgggtctggcgagtcttctatccaaaactcgtcagaaaacgccttttatttttggtggacttcgtataagtccaaggcattgcctgtgattttggggtttcttttaggttgcaaccttgttttgtttttgaaattttctgctttgaattgatgcattatatatgaagaaatgagcctctcacgctagctccagcaagtgacccaagtatgacaaatatgtatgtacaaaaaataaaaaatgcctctaatatggatatttgagtataaatgacatgatttagaggacattg

SEQ ID NO: 47994 - DNA, 3932 bp, Zea Mays
gcatgccggtcgtgtgggctttggcgctggtgggtccatcagttgaaagttgaaacgccggggtgcgtcgcactgtcgcttcgcttgcgctcttcgcgtccgttcccccccaaagccacgataaatatgcgctcgagaccgaccctttcggccgtaatctcctccgctcaagccgtagtagggtttccgtagcccagcccatgtcgacgcgcgacggcggaggcggccggcgtggcggcaatgcagcagcaggccgtggaggtgacggccaagggcggggccgtggagggggcggccgaggtggcgccggcggccgtggcggtggcggccaatggcgggcccaaggcggcgcggagcttggcggtggccgaggtggagccgtcggcgcagcgcgtggcggccgcggaggtgtcgagagagggggtcaccagtccttccacggcgccaggccggtcggtggggaccgaggcggacgcggacactaccaccatggcgtgcctgctcaggtccagccgcagtggcaagtggccgcgccgccttcgacgtcgaggccgacacccgcggaagtcgaggagctgagaggcgaggtggagaggaaggcggcggtggcggtgccagacgcagaggcgcacgaggggccgtcgtcgggcaccgcgcatgagccttccgccgcgccggcgcgggtcgaagcggagcaagggacgtcgctggtggtggaggcagaccaggccgctcaggggaggctgcctccgtcgtcgagcaaggcgctggttttccccgcgcggccggggtacggcacgctcggccggaggtgccgcgtgcgcgccaaccatttcttcgttcaggtggcggacaaggagatctaccactacgacgtcgtgattagtccagaatcgcagtcaaggaaaagaaatcgttggattcttaacgaactcgttaaattgcacaagaattacttgaatgggcgactgcctgtttatgatggtagaaagggccttttcactgctggtccgctaccgttcaaaaccaaagaatttgttctggaactaaccaatcctgagagagcaaaccagggggcgaaagagtacagcgtgaccataaaagatgctgccaaattagatctttacagccttaggcagttcttggctggtaggcagagggaactgccacaggatactgtccaagccctcgatattgctatgcgagaatgcccaactgaaaagtatgtatccatctcaaggtcatttttctctcagtcatttggacatggtggtgatattggcagtggtgtggaatgctggagggggtactaccaaagtctacgtgctacacaaatgggattgtctttaaatattgatatttcagcaactgcattttacaaggctcaaccgattttggagtttgcattggagtacctcaacatacgtgacacctcaaggcgtttgtctgaccaggatcgcttaaaactgaagaaagtcctcaaaggagtacgtgttgtggcaacacatcgtcgtgatatagccatacattacaagattactgggataacctcacttcccttgaatagtttaacgtttaatcaagatggggcaagtgtttcagttgtccaatactttaaacaccaatataattacagtttgaaacacattcactggccatgccttcaatctggcaatgatagtaggccgacttatttaccaatggaggtttgcagtatacttggcggtcaacgctattctaggaagctaaatgagtaccaagtcacaagcatcctgaagaaggcatgtgagcgaccacctcaaagggagggcagcattttagaggtagttaataggaacgactatggtaatgatcattgtgccaaagaatttggtattaaggtgacaaatgaacttgccttggttgatgcacgggtgctgccagctccgacgcttaagtaccatgactctggacgagaaaaggtgtgtagtccttccgttggtcagtggaacatgaacaacaagagattgatcgatggagtatccattcagtattgggcttgtgtgacttttgcttctcggttgcatccaaatgatgtccgcatgttttgcaacaacttggttggggcgtgcaatgatatgggcatgcaaataaatgggagaccttgtgttgatgttgggcaagcacgcccagataacttagaagctgcactcagaaatactcatagacaatctgcacaaatgcttgcccaacaaggcgtgactagacagcttgatttactaattgttgtattaccagatgcaaatgcaagtgtcttttatggtaggataaagcgtctttgtgaaactgaacttggtttagtaactcaatgttgtcaaccaaagaatgtttttaaaggtggccgacaatatctccaaaacctggctcttaaaattaatgttaaggttggtggccgtaatacagttctcgaagatgctttaaataggagaatacatttgttaacagatttacctacaattatctttggagctgatgttacccacccagctccaggggaagatgcatccccgtctattgcagcggtctgtattttctcttttttcttgttctcaacttgtcagaactttgaagaaacaatttgttactttaccttgacttcttgttgcattggcatgtcctgtttgttggatagaggcctctgtgtgtttctggtttctaataagtcgtgtaaaagtttatgataggttgttgcatcaatggattggccacaagttgcaaagtacaggtgcttggtgtcttctcaaggtcatagggaagagatcataactgatcttttcacacaagtgaaggatccacaaaagggacttattaacggtggaatgatcagggaactactcgtgtcattctataaggcaaacgggagccgcaaaccaagcaggataattttctatcgagatggtgtcagtgaggggcagtttagccaggtcttgctttatgaagtggatgcaattcgaaaggcgtgtgccagcttggaagagggctaccttcctccaattacattcattgtggtgcaaaagcgccatcacacacggcttttccctgaagatcatcatgcacacggacagatggatcgaagtggaaacattttgccaggaactgttgttgacacgaagatatgccatccaagtgaattcgacttctacctttgtagccactctggcatacagggaacgagccggccagcacactaccatgttctgtttgacgaaaacaaattcactgccgatgcactgcaaacgttgacctacaaactgtgctacacgtatgcgcgatgcactcgatcagtctctatagttcccccggcgtactacgcacacctggcggccttccgtgcgcgccactacatggacgatgacctctccgaccaggggtcgtcttcagtggcgagttctcgcatgaaagatggcgctgttccggtgaagcagctgccgaaagtgatggagagcgtcaaacagttcatgttctactgctgaaggtggcctttgcaggaaggaccttcatcgacacttttgttgccatgaaatgaaacgagtaattctgggttggtgtaattatggtgaagtaaccctgaagggtgggccgcacgacctccaaatcatattttgggtctggcgagtcttctatccaaaactcgtcagaaaacgccttttatttttggtggacttcgtataagtccaaggcattgcctgtgattttggggtttcttttaggttgcaaccttgttttgtttttgaaattttctgctttgaattgatgcattatatatgaagaaatgagcctctcacgctagctccagcaagtgacccaagtatgacaaatatgtatgtacaaaaaataaaaaatgcctctaatatggatatttgagtataaatgacatgatttagaggacattg

SEQ ID NO: 47995 - DNA, 1633 bp, Zea Mays
atgtcgacgcgcgacggcggaggcggccggcgtggcggcaatgcagcagcaggccgtggaggtgacggccaagggcggggccgtggagggggcggccgaggtggcgccggcggccgtggcggtggcggccaatggcgggcccaaggcggcgcggagcttggcggtggccgaggtggagccgtcggcgcagcgcgtggcggccgcggaggtgtcgagagagggggtcaccagtccttccacggcgccaggccggtcggtggggaccgaggcggacgcggacactaccaccatggcgtgcctgctcaggtccagccgcagtggcaagtggccgcgccgccttcgacgtcgaggccgacacccgcggaagtcgaggagctgagaggcgaggtggagaggaaggcggcggtggcggtgccagacgcagaggcgcacgaggggccgtcgtcgggcaccgcgcatgagccttccgccgcgccggcgcgggtcgaagcggagcaagggacgtcgctggtggtggaggcagaccaggccgctcaggggaggctgcctccgtcgtcgagcaaggcgctggttttccccgcgcggccggggtacggcacgctcggccggaggtgccgcgtgcgcgccaaccatttcttcgttcaggtggcggacaaggagatctaccactacgacgtcgtgattagtccagaatcgcagtcaaggaaaagaaatcgttggattcttaacgaactcgttaaattgcacaagaattacttgaatgggcgactgcctgtttatgatggtagaaagggccttttcactgctggtccgctaccgttcaaaaccaaagaatttgttctggaactaaccaatcctgagagagcaaaccagggggcgaaagagtacagcgtgaccataaaagatgctgccaaattagatctttacagccttaggcagttcttggctggtaggcagagggaactgccacaggatactgtccaagccctcgatattgctatgcgagaatgcccaactgaaaagtatgtatccatctcaaggtcatttttctctcagtcatttggacatggtggtgatattggcagtggtgtggaatgctggagggggtactaccaaagtctacgtgctacacaaatgggattgtctttaaatattgatatttcagcaactgcattttacaaggctcaaccgattttggagtttgcattggagtacctcaacatacgtgacacctcaaggcgtttgtctgaccaggatcgcttaaaactgaagaaagtcctcaaaggagtacgtgttgtggcaacacatcgtcgtgatatagccatacattacaagattactgggataacctcacttcccttgaatagtttaacgtttaatcaagatggggcaagtgtttcagttgtccaatactttaaacaccaatataattacagtttgaaacacattcactggccatgccttcaatctggcaatgatagtaggccgacttatttaccaatggagtatacttggcggtcaacgctattctaggaagctaaatgagtaccaagtcacaagcatcctgaagaaggcatgtgagcgaccacctcaaagggagggcagcattttagaggtagttaataggaacgac

SEQ ID NO: 47996 - DNA, 3554 bp, Zea Mays
atgtcgacgcgcgacggcggaggcggccggcgtggcggcaatgcagcagcaggccgtggaggtgacggccaagggcggggccgtggagggggcggccgaggtggcgccggcggccgtggcggtggcggccaatggcgggcccaaggcggcgcggagcttggcggtggccgaggtggagccgtcggcgcagcgcgtggcggccgcggaggtgtcgagagagggggtcaccagtccttccacggcgccaggccggtcggtggggaccgaggcggacgcggacactaccaccatggcgtgcctgctcaggtccagccgcagtggcaagtggccgcgccgccttcgacgtcgaggccgacacccgcggaagtcgaggagctgagaggcgaggtggagaggaaggcggcggtggcggtgccagacgcagaggcgcacgaggggccgtcgtcgggcaccgcgcatgagccttccgccgcgccggcgcgggtcgaagcggagcaagggacgtcgctggtggtggaggcagaccaggccgctcaggggaggctgcctccgtcgtcgagcaaggcgctggttttccccgcgcggccggggtacggcacgctcggccggaggtgccgcgtgcgcgccaaccatttcttcgttcaggtggcggacaaggagatctaccactacgacaatcgcagtcaaggaaaagaaatcgttggattcttaacgaactcgttaaattgcacaagaattacttgaatgggcgactgcctgtttatgatggtagaaagggccttttcactgctggtccgctaccgttcaaaaccaaagaatttgttctggaactaaccaatcctgagagagcaaaccagggggcgaaagagtacagcgtgaccataaaagatgctgccaaattagatctttacagccttaggcagttcttggctggtaggcagagggaactgccacaggatactgtccaagccctcgatattgctatgcgagaatgcccaactgaaaagtatgtatccatctcaaggtcatttttctctcagtcatttggacatggtggtgatattggcagtggtgtggaatgctggagggggtactaccaaagtctacgtgctacacaaatgggattgtctttaaatattgatatttcagcaactgcattttacaaggctcaaccgattttggagtttgcattggagtacctcaacatacgtgacacctcaaggcgtttgtctgaccaggatcgcttaaaactgaagaaagtcctcaaaggagtacgtgttgtggcaacacatcgtcgtgatatagccatacattacaagattactgggataacctcacttcccttgaatagtttaacgtttaatcaagatggggcaagtgtttcagttgtccaatactttaaacaccaatataattacagtttgaaacacattcactggccatgccttcaatctggcaatgatagtaggccgacttatttaccaatggaggtttgcagtatacttggcggtcaacgctattctaggaagctaaatgagtaccaagtcacaagcatcctgaagaaggcatgtgagcgaccacctcaaagggagggcagcattttagaggtagttaataggaacgactatggtaatgatcattgtgccaaagaatttggtattaaggtgacaaatgaacttgccttggttgatgcacgggtgctgccagctccgacgcttaagtaccatgactctggacgagaaaaggtgtgtagtccttccgttggtcagtggaacatgaacaacaagagattgatcgatggagtatccattcagtattgggcttgtgtgacttttgcttctcggttgcatccaaatgatgtccgcatgttttgcaacaacttggttggggcgtgcaatgatatgggcatgcaaataaatgggagaccttgtgttgatgttgggcaagcacgcccagataacttagaagctgcactcagaaatactcatagacaatctgcacaaatgcttgcccaacaaggcgtgactagacagcttgatttactaattgttgtattaccagatgcaaatgcaagtgtcttttatggtaggataaagcgtctttgtgaaactgaacttggtttagtaactcaatgttgtcaaccaaagaatgtttttaaaggtggccgacaatatctccaaaacctggctcttaaaattaatgttaaggttggtggccgtaatacagttctcgaagatgctttaaataggagaatacatttgttaacagatttacctacaattatctttggagctgatgttacccacccagctccaggggaagatgcatccccgtctattgcagcggttgttgcatcaatggattggccacaagttgcaaagtacaggtgcttggtgtcttctcaaggtcatagggaagagatcataactgatcttttcacacaagtgaaggatccacaaaagggacttattaacggtggaatgatcagggaactactcgtgtcattctataaggcaaacgggagccgcaaaccaagcaggataattttctatcgagatggtgtcagtgaggggcagtttagccaggtcttgctttatgaagtggatgcaattcgaaaggcgtgtgccagcttggaagagggctaccttcctccaattacattcattgtggtgcaaaagcgccatcacacacggcttttccctgaagatcatcatgcacacggacagatggatcgaagtggaaacattttgccaggaactgttgttgacacgaagatatgccatccaagtgaattcgacttctacctttgtagccactctggcatacagggaacgagccggccagcacactaccatgttctgtttgacgaaaacaaattcactgccgatgcactgcaaacgttgacctacaaactgtgctacacgtatgcgcgatgcactcgatcagtctctatagttcccccggcgtactacgcacacctggcggccttccgtgcgcgccactacatggacgatgacctctccgaccaggggtcgtcttcagtggcgagttctcgcatgaaagatggcgctgttccggtgaagcagctgccgaaagtgatggagagcgtcaaacagttcatgttctactgctgaaggtggcctttgcaggaaggaccttcatcgacacttttgttgccatgaaatgaaacgagtaattctgggttggtgtaattatggtgaagtaaccctgaagggtgggccgcacgacctccaaatcatattttgggtctggcgagtcttctatccaaaactcgtcagaaaacgccttttatttttggtggacttcgtataagtccaaggcattgcctgtgattttggggtttcttttaggttgcaaccttgttttgtttttgaaattttctgctttgaattgatgcattatatatgaagaaatgagcctctcacgctagctccagcaagtgacccaagtatgacaaatatgtatgtacaaaaaataaaaaatgcctctaatatggatatttgagtataaatgacatgatttagaggacattg

SEQ ID NO: 47997 - DNA, 1719 bp, Zea Mays
caaccaatcaacccttataaaaagaaagagaaagaaaagaaaaaatcgaaccaagccctgctagcggtgtccggtccggtgcccacctatttcctctcgcagcctcttctccccaaaccctaatcttgctcctgcctatctctgctccaatccgttggtcgagcggcggcgatggaggggaaggaggaaggtcggatcttcgtgggcggcctgtcgtggcaaacggacgagcgcaagcttcaggacgcctttggtcgcttcggcaaggtcgtcgatgttcagatcatgctggagagacacacataccgccacaggggctttggcttcgtgacattcgaagatcgaagggcagttgacagcgctatcaaagagatgcgtggccaagagttagatggtcgtaccatctcagtgaacaaggctgagcctaagatgaatacagatgacacaaggttcgacagtggcggtggacgaggagaatatcgaggtggtagaggtgatggtccaccccctggcaattgctatgagtgtggccgtcctggtcattgggtccgtgactgccctagtgctgctggtggtcgttctggcagattcccatccaagttcagtggtggtggcagaggagaccgcttttctggatcagataggtttaatgatcgttacatggatgatcgttatgatggtggtcgttatgggtaccgtgatcaagttgatgcaagggacaagtatggtgggggacctgcacgctatgatggtggaagttacagggagaggcctgggccatatgatcgccctagcaggggaggaggtcgttttgatgaacgccactgatgaactgcctctagactcgagcccctggtcttgtagtttagccttttgcagttctgcatagcttaatgtttaatgggctatggaagatgcctaatttacccccctctttggcacttcaatgtctgctctgtatttcaaccagtacttgggcgccgttgttgccttctcgataagtttatcaagctgactgtttttgcatgagacgggtcatcctttgggctactactctgcctgttggtccggatgtttcagttgtgcatgccgtgcgtcctgcagttatagtggagtcgaggttctcagtgattgtttgtcattgttgatctgaatatctggtatgcatggactgactatgttttcagtgattgcctgtcaccgttggtctgaatatctggtgaacatatatgctcagtgacggtgcttgtcaatgttgttggtctggatatttgggttcgcaaggatatatttgcagtgctgagatgcaagtgcttaaccgaactgtagccaaagtaaccctatgctagaagtaactggcaaccatgttgaattgttaatctcgttagttttttgtctggggtcttgaaaatgccctccagatctctcacgagaacgtgaacttcacctatcttctctatcgagctgcatcgccctctcttttggcgagcaggtctttggattcaccgtttgcttgtgtgatatctgcttagttgtgtggggatgatcaagtggttggaaagctttgctgtgactgttcgttgatcttctttctgccgctcattggatcggaggaccgtcttgtttttgtgtgaatgttcgaggaacgacactgttaacaactgacctttttatgttgacaaattacagagttgttcaccttggcattagatgttcgtt

SEQ ID NO: 47998 - DNA, 3113 bp, Zea Mays
gctttgcttccgtacaaaaaaaagttagaatcactctctcgagagacagagagagtataaactaacgcctaccataaatacaaaataaagaaagacaaaaaaagaaaatccctattcctcctcagcataccccttcttccttcgtccccattgatccccttcccccctccactcgtctcccaaatcgccagcgagcgccatgccgccgcctcccctgccctcgccgcccctgaccggctgacccgacctccccactgtctttcccttccacctgggcgccacagcgtttcccttcccgtcaccacgaaatcccggagggacgaggagggagttcgtcgcctgatcgatcggccgatccacgccgccggcctcccaatccttcgctgccgccatgttcaacaagataatcaagaggggaaaccgcaagggcgcgcgcggggacagtgcggaggtcgccgcgcgccccgcagcgccctcgtcatcctccgggagcggcggcggcggcgcggggggagccgcgcccgtcaccgtcaaccacgcctcccgggccacagcgccttctccgtcgtcgcccacttctccgcacgtcacgccgtccgcgtttgcgaccaacccggcggtgggggcggcgtcaccgccactcctcgagcctctcccgctcctccgcgacgtcgccgccgcagaccgtccgggcctcatcctccgcaagctccgcctcgtcgcggcgctcttcgacctctcggactcgctcaagcacccgcgagagaaggaggccaaacgccaggcgctcctcgagctcgtagattacgtgcaggctccagctcaggccgcgggcgccaacgcgcccacgcgcctcccggaccacgtccaggaggcgctagtccttgccatctctgccaacatcttccgcccgctgccacccgcgctgcacgagtccgccgccgcgatcgaccccggcgccgcgcccgacgacgacgaggagccatacctggacccctcctggccacacctccagctcgtctatgagctccttctccgatacgttgtttcgcctgacacggacaccaaggtcgccaagcggtatgtggaccatgctttcgtcctccgcatcctcgacctctttgactccgaggatccgcgtgagcgggaatacctcaagaccgtgctccaccgcatctatggcaagttcatggtacaccgaccattcatccgtaaggccatcaacaatgtgttctaccggttcatctttgagactcagcgctacaatggcataggggagctccttgagatccttggaagcatcattaatggatttgccttgccaatgaaggaggagcacaagctattccttgcccgtgctctcatccccctgcacaagcccaaatctgttgtgatctaccatcagcagctatcctattgtattgttgagttcgttgagaaggactacaaattagcagatactgtgattaggggtctgctcaagtactggccagtcacaaattgccagaaggaggtgttgtttctgggggagcttgaagaagtgctcgaggcaacacagcctgcagagttccaacggtgcatggtgccactgtttaagcagattgcccgatgccttaacagttctcacttccaggttgctgaacgcgctttgttcttgtggaacaatgatcacattgtaagcttgatagcgcaaaatcgtggtgttatatttccaattatatttgaagcgctcgagaggaatatacatagccactggaatcaagcagttcatggtctcactgcaaatgtgcgcaagatgtttctggacatggacagtgaactatttgaagagtgccagcagcagtatatggataaacaagcaaaagccaaagagatgcaggagcaacgagaatcagcatggagacaattggaagctgttgttgctgccaaggctgctggggatgacatggttttggtcaactagatccatgttccttgcatcagtgaaaaacatgtgggccgagtttgaacacattggtggccgcgacagccaatccacgcagaatttctgtgtctagtgaggtcctgctatggttctgagccgttcctttattcagcccctcctcttctgttgcgttaatttatgaacaattggactcttgtattaatccttcattgtttgccctagtttcgtacccacaattgggaaaattcaagtagtgaaaatgactcagctagattgtaaggtttcttttatttgtatttacttcttttctccttgggagttatttcagttcatgttgttgtatggaggtaacagtacaaatggcagataaaagcctttttaacctagtgtccggcatggtagcaatacaatgtcagatcttctgtaggaactgtttcgacgttgctgtgattgtttagcaatataacggctcactctgtggtacgctggattaagttctggttacatgttaattcgtgggtaaatggcagggggctcgccgtatgcaatttctaaatttagatctcatatttcatgtggtgtaagtgtaatgctagctgtgagtttcctagttacgacatatgcgcaagccatcggttcattaatggtcgctcgcctgtgacattcatttttttcttatgcccgctgcattagtttattcacggtttaaatgttctgattctgctcttaatcagatgatgccatcttggccggctttttttttggcagttggcacgacagtttgcaatctgagacttggcactcgtgagtcgtgagagaaacaagtcgatgtctaggcactcacgtgaaagctttccggtcggcggtgaaatagcggagtactcgttagacatcatgctcacgtgcatggcagtgtgtccctgccaaaaaagaatggcggagcatcctgcttttctatgaaacactcggtaaaatttcatactgggatgcagatggaccacgcgttatcgtcttataagtgcctgctaaaaaaatgttgaagataagtatggtgtcaccgctcgccagctgccgccgcatgctgacttgcatcatgtacgtgtccctggacagctagagttattttttacaaaaaaaatcttttaatcaatattttaatattaacctg

SEQ ID NO: 47999 - DNA, 2363 bp, Zea Mays
gctttgcttccgtacaaaaaaaagttagaatcactctctcgagagacagagagagtataaactaacgcctaccataaatacaaaataaagaaagacaaaaaaagaaaatccctattcctcctcagcataccccttcttccttcgtccccattgatccccttcccccctccactcgtctcccaaatcgccagcgagcgccatgccgccgcctcccctgccctcgccgcccctgaccggctgacccgacctccccactgtctttcccttccacctgggcgccacagcgtttcccttcccgtcaccacgaaatcccggagggacgaggagggagttcgtcgcctgatcgatcggccgatccacgccgccggcctcccaatccttcgctgccgccatgttcaacaagataatcaagaggggaaaccgcaagggcgcgcgcggggacagtgcggaggtcgccgcgcgccccgcagcgccctcgtcatcctccgggagcggcggcggcggcgcggggggagccgcgcccgtcaccgtcaaccacgcctcccgggccacagcgccttctccgtcgtcgcccacttctccgcacgtcacgccgtccgcgtttgcgaccaacccggcggtgggggcggcgtcaccgccactcctcgagcctctcccgctcctccgcgacgtcgccgccgcagaccgtccgggcctcatcctccgcaagctccgcctcgtcgcggcgctcttcgacctctcggactcgctcaagcacccgcgagagaaggaggccaaacgccaggcgctcctcgagctcgtagattacgtgcaggctccagctcaggccgcgggcgccaacgcgcccacgcgcctcccggaccacgtccaggaggcgctagtccttgccatctctgccaacatcttccgcccgctgccacccgcgctgcacgagtccgccgccgcgatcgaccccggcgccgcgcccgacgacgacgaggagccatacctggacccctcctggccacacctccagctcgtctatgagctccttctccgatacgttgtttcgcctgacacggacaccaaggtcgccaagcggtatgtggaccatgctttcgtcctccgcatcctcgacctctttgactccgaggatccgcgtgagcgggaatacctcaagaccgtgctccaccgcatctatggcaagttcatggtacaccgaccattcatccgtaaggccatcaacaatgtgttctaccggttcatctttgagactcagcgctacaatggcataggggagctccttgagatccttggaagcatcattaatggatttgccttgccaatgaaggaggagcacaagctattccttgcccgtgctctcatccccctgcacaagcccaaatctgttgtgatctaccatcagcagctatcctattgtattgttgagttcgttgagaaggactacaaattagcagatactgtgattaggggtctgctcaagtactggccagtcacaaattgccagaaggaggtgttgtttctgggggagcttgaagaagtgctcgaggcaacacagcctgcagagttccaacggtgcatggtgccactgtttaagcagattgcccgatgccttaacagttctcacttccaggttgctgaacgcgctttgttcttgtggaacaatgatcacattgtaagcttgatagcgcaaaatcgtggtgttatatttccaattatatttgaagcgctcgagaggaatatacatagccactggaatcaagcagttcatggtctcactgcaaatgtgcgcaagatgtttctggacatggacagtgaactatttgaagagtgccagcagcagtatatggataaacaagcaaaagccaaagagatgcaggagcaacgagaatcagcatggagacaattggaagctgttgttgctgccaaggctgctggggatgacatggttttggtcaactagttggcacgacagtttgcaatctgagacttggcactcgtgagtcgtgagagaaacaagtcgatgtctaggcactcacgtgaaagctttccggtcggcggtgaaatagcggagtactcgttagacatcatgctcacgtgcatggcagtgtgtccctgccaaaaaagaatggcggagcatcctgcttttctatgaaacactcggtaaaatttcatactgggatgcagatggaccacgcgttatcgtcttataagtgcctgctaaaaaaatgttgaagataagtatggtgtcaccgctcgccagctgccgccgcatgctgacttgcatcatgtacgtgtccctggacagctagagttattttttacaaaaaaaatcttttaatcaatattttaatattaacctg

SEQ ID NO: 48000 - DNA, 3490 bp, Zea Mays
gctttgcttccgtacaaaaaaaagttagaatcactctctcgagagacagagagagtataaactaacgcctaccataaatacaaaataaagaaagacaaaaaaagaaaatccctattcctcctcagcataccccttcttccttcgtccccattgatccccttcccccctccactcgtctcccaaatcgccagcgagcgccatgccgccgcctcccctgccctcgccgcccctgaccggctgacccgacctccccactgtctttcccttccacctgggcgccacagcgtttcccttcccgtcaccacgaaatcccggagggacgaggagggagttcgtcgcctgatcgatcggccgatccacgccgccggcctcccaatccttcgctgccgccatgttcaacaagataatcaagaggggaaaccgcaagggcgcgcgcggggacagtgcggaggtcgccgcgcgccccgcagcgccctcgtcatcctccgggagcggcggcggcggcgcggggggagccgcgcccgtcaccgtcaaccacgcctcccgggccacagcgccttctccgtcgtcgcccacttctccgcacgtcacgccgtccgcgtttgcgaccaacccggcggtgggggcggcgtcaccgccactcctcgagcctctcccgctcctccgcgacgtcgccgccgcagaccgtccgggcctcatcctccgcaagctccgcctcgtcgcggcgctcttcgacctctcggactcgctcaagcacccgcgagagaaggaggccaaacgccaggcgctcctcgagctcgtagattacgtgcaggctccagctcaggccgcgggcgccaacgcgcccacgcgcctcccggaccacgtccaggaggcgctagtccttgccatctctgccaacatcttccgcccgctgccacccgcgctgcacgagtccgccgccgcgatcgaccccggcgccgcgcccgacgacgacgaggagccatacctggacccctcctggccacacctccagctcgtctatgagctccttctccgatacgttgtttcgcctgacacggacaccaaggtcgccaagcggtatgtggaccatgctttcgtcctccgcatcctcgacctctttgactccgaggatccgcgtgagcgggaatacctcaagaccgtgctccaccgcatctatggcaagttcatggtacaccgaccattcatccgtaaggccatcaacaatgtgttctaccggttcatctttgagactcagcgctacaatggcataggggagctccttgagatccttggaagcatcattaatggatttgccttgccaatgaaggaggagcacaagctattccttgcccgtgctctcatccccctgcacaagcccaaatctgttgtgatctaccatcagcagctatcctattgtattgttgagttcgttgagaaggactacaaattagcagatactgtgattaggggtctgctcaagtactggccagtcacaaattgccagaaggaggtgttgtttctgggggagcttgaagaagtgctcgaggcaacacagcctgcagagttccaacggtgcatggtgccactgtttaagcagattgcccgatgccttaacagttctcacttccaggttgctgaacgcgctttgttcttgtggaacaatgatcacattgtaagcttgatagcgcaaaatcgtggtgttatatttccaattatatttgaagcgctcgagaggaatatacatagccactggaatcaagcagttcatggtctcactgcaaatgtgcgcaagatgtttctggacatggacagtgaactatttgaagagtgccagcagcagtatatggataaacaagcaaaagccaaagagatgcaggagcaacgagaatcagcatggagacaattggaagctgttgttgctgccaaggctgctggggatgacatggttttggtcaactaggtaatataaccaacctttccacttcatttatttgttagtgcttgttgtttttagtcttgtaacctaaaactgtactacttttgttctcggctttgttctagcatatctgtgagatgcattgccactttttgtactgctcaccttttgttttgagtcatggcagttcacaaaaagatgggatatatctgtaccaaagtttcaatttattatggacaattgatttttagtaatgtcagtcaaaccaagcatccataagtacgcaaacatcgtttgaaaggatgtttatgctttctcagatgattgctgctcacttatttcttgagcgcggtgctagttgcggtcctcttatatcaactttgttgacttgggactatcagatccatgttccttgcatcagtgaaaaacatgtgggccgagtttgaacacattggtggccgcgacagccaatccacgcagaatttctgtgtctagtgaggtcctgctatggttctgagccgttcctttattcagcccctcctcttctgttgcgttaatttatgaacaattggactcttgtattaatccttcattgtttgccctagtttcgtacccacaattgggaaaattcaagtagtgaaaatgactcagctagattgtaaggtttcttttatttgtatttacttcttttctccttgggagttatttcagttcatgttgttgtatggaggtaacagtacaaatggcagataaaagcctttttaacctagtgtccggcatggtagcaatacaatgtcagatcttctgtaggaactgtttcgacgttgctgtgattgtttagcaatataacggctcactctgtggtacgctggattaagttctggttacatgttaattcgtgggtaaatggcagggggctcgccgtatgcaatttctaaatttagatctcatatttcatgtggtgtaagtgtaatgctagctgtgagtttcctagttacgacatatgcgcaagccatcggttcattaatggtcgctcgcctgtgacattcatttttttcttatgcccgctgcattagtttattcacggtttaaatgttctgattctgctcttaatcagatgatgccatcttggccggctttttttttggcagttggcacgacagtttgcaatctgagacttggcactcgtgagtcgtgagagaaacaagtcgatgtctaggcactcacgtgaaagctttccggtcggcggtgaaatagcggagtactcgttagacatcatgctcacgtgcatggcagtgtgtccctgccaaaaaagaatggcggagcatcctgcttttctatgaaacactcggtaaaatttcatactgggatgcagatggaccacgcgttatcgtcttataagtgcctgctaaaaaaatgttgaagataagtatggtgtcaccgctcgccagctgccgccgcatgctgacttgcatcatgtacgtgtccctggacagctagagttattttttacaaaaaaaatcttttaatcaatattttaatattaacctg

SEQ ID NO: 48001 - DNA, 3194 bp, Zea Mays
gctttgcttccgtacaaaaaaaagttagaatcactctctcgagagacagagagagtataaactaacgcctaccataaatacaaaataaagaaagacaaaaaaagaaaatccctattcctcctcagcataccccttcttccttcgtccccattgatccccttcccccctccactcgtctcccaaatcgccagcgagcgccatgccgccgcctcccctgccctcgccgcccctgaccggctgacccgacctccccactgtctttcccttccacctgggcgccacagcgtttcccttcccgtcaccacgaaatcccggagggacgaggagggagttcgtcgcctgatcgatcggccgatccacgccgccggcctcccaatccttcgctgccgccatgttcaacaagataatcaagaggggaaaccgcaagggcgcgcgcggggacagtgcggaggtcgccgcgcgccccgcagcgccctcgtcatcctccgggagcggcggcggcggcgcggggggagccgcgcccgtcaccgtcaaccacgcctcccgggccacagcgccttctccgtcgtcgcccacttctccgcacgtcacgccgtccgcgtttgcgaccaacccggcggtgggggcggcgtcaccgccactcctcgagcctctcccgctcctccgcgacgtcgccgccgcagaccgtccgggcctcatcctccgcaagctccgcctcgtcgcggcgctcttcgacctctcggactcgctcaagcacccgcgagagaaggaggccaaacgccaggcgctcctcgagctcgtagattacgtgcaggctccagctcaggccgcgggcgccaacgcgcccacgcgcctcccggaccacgtccaggaggcgctagtccttgccatctctgccaacatcttccgcccgctgccacccgcgctgcacgagtccgccgccgcgatcgaccccggcgccgcgcccgacgacgacgaggagccatacctggacccctcctggccacacctccagctcgtctatgagctccttctccgatacgttgtttcgcctgacacggacaccaaggtcgccaagcggtatgtggaccatgctttcgtcctccgcatcctcgacctctttgactccgaggatccgcgtgagcgggaatacctcaagaccgtgctccaccgcatctatggcaagttcatggtacaccgaccattcatccgtaaggccatcaacaatgtgttctaccggttcatctttgagactcagcgctacaatggcataggggagctccttgagatccttggaagcatcattaatggatttgccttgccaatgaaggaggagcacaagctattccttgcccgtgctctcatccccctgcacaagcccaaatctgttgtgatctaccatcagcagctatcctattgtattgttgagttcgttgagaaggactacaaattagcagatactgtgattaggggtctgctcaagtactggccagtcacaaattgccagaaggaggtgttgtttctgggggagcttgaagaagtgctcgaggcaacacagcctgcagagttccaacggtgcatggtgccactgtttaagcagattgcccgatgccttaacagttctcacttccaggttgctgaacgcgctttgttcttgtggaacaatgatcacattgtaagcttgatagcgcaaaatcgtggtgttatatttccaattatatttgaagcgctcgagaggaatatacatagccactggaatcaagcagttcatggtctcactgcaaatgtgcgcaagatgtttctggacatggacagtgaactatttgaagagtgccagcagcagtatatggataaacaagcaaaagccaaagagatgcaggagcaacgagaatcagcatggagacaattggaagctgttgttgctgccaaggctgctggggatgacatggttttggtcaactagatgattgctgctcacttatttcttgagcgcggtgctagttgcggtcctcttatatcaactttgttgacttgggactatcagatccatgttccttgcatcagtgaaaaacatgtgggccgagtttgaacacattggtggccgcgacagccaatccacgcagaatttctgtgtctagtgaggtcctgctatggttctgagccgttcctttattcagcccctcctcttctgttgcgttaatttatgaacaattggactcttgtattaatccttcattgtttgccctagtttcgtacccacaattgggaaaattcaagtagtgaaaatgactcagctagattgtaaggtttcttttatttgtatttacttcttttctccttgggagttatttcagttcatgttgttgtatggaggtaacagtacaaatggcagataaaagcctttttaacctagtgtccggcatggtagcaatacaatgtcagatcttctgtaggaactgtttcgacgttgctgtgattgtttagcaatataacggctcactctgtggtacgctggattaagttctggttacatgttaattcgtgggtaaatggcagggggctcgccgtatgcaatttctaaatttagatctcatatttcatgtggtgtaagtgtaatgctagctgtgagtttcctagttacgacatatgcgcaagccatcggttcattaatggtcgctcgcctgtgacattcatttttttcttatgcccgctgcattagtttattcacggtttaaatgttctgattctgctcttaatcagatgatgccatcttggccggctttttttttggcagttggcacgacagtttgcaatctgagacttggcactcgtgagtcgtgagagaaacaagtcgatgtctaggcactcacgtgaaagctttccggtcggcggtgaaatagcggagtactcgttagacatcatgctcacgtgcatggcagtgtgtccctgccaaaaaagaatggcggagcatcctgcttttctatgaaacactcggtaaaatttcatactgggatgcagatggaccacgcgttatcgtcttataagtgcctgctaaaaaaatgttgaagataagtatggtgtcaccgctcgccagctgccgccgcatgctgacttgcatcatgtacgtgtccctggacagctagagttattttttacaaaaaaaatcttttaatcaatattttaatattaacctg

SEQ ID NO: 48002 - DNA, 1025 bp, Zea Mays
gatcttagggcgcgatcatgtgtgatggtgggtcggcgcttccacgagtgacgtcgggcaggtgccgtcggaacgggaaagagggagagcatgaactcagggggcaacggctgatgttgtcctgtttaactgttccctggtacgagagtttgtgttttatcaatctaaacaattgaacttttaatccaggtggtttatctaatgtcggtcagttgccgcggatgtgcacacggcccatgtcccacgacgccgtgcatcacatgtccacagtccttcgtctataccgcatcataatgttgctgaacgcgctttgttcttgtggaacaatgatcacattgtaagcttgatagcgcaaaatcgtggtgttatatttccaattatatttgaagcgctcgagaggaatatacatagccactggaatcaagcagttcatggtctcactgcaaatgtgcgcaagatgtttctggacatggacagtgaactatttgaagagtgccagcagcagtatatggataaacaagcaaaagccaaagagatgcaggagcaacgagaatcagcatggagacaattggaagctgttgttgctgccaaggctgctggggatgacatggttttggtcaactagttggcacgacagtttgcaatctgagacttggcactcgtgagtcgtgagagaaacaagtcgatgtctaggcactcacgtgaaagctttccggtcggcggtgaaatagcggagtactcgttagacatcatgctcacgtgcatggcagtgtgtccctgccaaaaaagaatggcggagcatcctgcttttctatgaaacactcggtaaaatttcatactgggatgcagatggaccacgcgttatcgtcttataagtgcctgctaaaaaaatgttgaagataagtatggtgtcaccgctcgccagctgccgccgcatgctgacttgcatcatgtacgtgtccctggacagctagagttattttttacaaaaaaaatcttttaatcaatattttaatattaacctg

SEQ ID NO: 48003 - DNA, 1057 bp, Zea Mays
taggcggccaattgtccatctatgcctctgtctggccctgccgcgccgtccgcacgcgcgcgcacgacgcacagtcacagatagatacctttcctctcttctcccgtccggccgtcccctcttccgcggcaaccccggcgcggcatggcgagcccgtcctcctcatctttcccgtcccggaaggccctgagcaagatcgcctgcaggcgcctgcagaaggagctaacggagtggcaggtcaacccgcccgccggcttcgagcacagggtcaccgacaacctccagaggtgggtcgtcgatgtagccggggcaccaggcacgctctacaccggcgagacctacaaactgcaggtggatttctccgagcattatcccatggaggcacctcagatatattgtatgactcgtggtccccagcaatgactgtcagttctatctgtatcagcatattatctatgctgtccagctcaccagcaaagcaacgcccagccgataacgatcgctatgtcaggaactgtcgcaatgggaggtcaccaaaggagaccacgtggtggttccatgacgacactgtgtgatgggtggttccggctgttgtcctgcccgcattttagttgccagactacatgggagatgatctaggcatatttcaagcgacccatttgaccagaaactaacacgctcttctggtttgtaaatgagtgtgcatcagcgtcaggtctctgtacttgttgatccttacaccgtctatagtatgtagaataatgtttgtatctttgtcaatttacggaacagacatgaaatgcaggtcactgttgacttgcaagatttctgaatccttctagttgaaagttgaaacgagggttatatatgcttggtagtctgctccagatgcagcagctttagctctagttccacttaactctagctcaaactatggcagagctcttttgggagtggctgtgtgatcgtgtaataatatatctgttgtgtgagtattgcaaaattctgtaattgttctattctgctgctctgatgaatctcagtgatctacactacc

SEQ ID NO: 48004 - DNA, 1388 bp, Zea Mays
taggcggccaattgtccatctatgcctctgtctggccctgccgcgccgtccgcacgcgcgcgcacgacgcacagtcacagatagatacctttcctctcttctcccgtccggccgtcccctcttccgcggcaaccccggcgcggcatggcgagcccgtcctcctcatctttcccgtcccggaaggccctgagcaagatcgcctgcaggcgcctgcagaaggagctaacggagtggcaggtcaacccgcccgccggcttcgagcacagggtcaccgacaacctccagaggtgccgcttccccatcgccgcacttcctatcccctttctcaccaagcagtccctgcggtgaggggtttagattcctttctccgtggctcggtgcttgcctactgttttcttattctcgagtctaggttggtcactacttggtcctgctgaaactgtggataacgttccgcgtcctgtttgatccgagacgcgacgtgttgcgttcgttttgggcttgtaggtgttggtttctctatttctctcgtcgtcttttccaagggattttcagtagatgtttcctagtgtttttatgatcttggacgaaagaaaaacttaatgaatgcaaaaaataatggtggatgaaacaacaacaaaaaggtgggtcgtcgatgtagccggggcaccaggcacgctctacaccggcgagacctacaaactgcaggtggatttctccgagcattatcccatggaggcacctcaggttatatttctgcatccagcaccgatgcatccacacatttacagtaatggacacatctgtttagatatattgtatgactcgtggtccccagcaatgactgtcagttctatctgtatcagcatattatctatgctgtccagctcaccagcaaagcaacgcccagccgataacgatcgctatgtcaggaactgtcgcaatgggaggtcaccaaaggagaccacgtggtggttccatgacgacactgtgtgatgggtggttccggctgttgtcctgcccgcattttagttgccagactacatgggagatgatctaggcatatttcaagcgacccatttgaccagaaactaacacgctcttctggtttgtaaatgagtgtgcatcagcgtcaggtcactgttgacttgcaagatttctgaatccttctagttgaaagttgaaacgagggttatatatgcttggtagtctgctccagatgcagcagctttagctctagttccacttaactctagctcaaactatggcagagctcttttgggagtggctgtgtgatcgtgtaataatatatctgttgtgtgagtattgcaaaattctgtaattgttctattctgctgctctgatgaatctcagtgatctacactacc

SEQ ID NO: 48005 - DNA, 3149 bp, Zea Mays
gtcctgtttgacgtccatccgctcgacaagctagatctcgctcgtcgcaacgatatgacttgtcccctgcagtcggcgaacttggcgaactagaaaatcatggctctcatgtgatctttttggcccccctgaattttcgtcctgcgtccgccactgtttaagcccccacagccccacccaataatccgccacgacaataaacaaccagcaccagcagtccagcggcaacaataatcaaatcaaagatcaggaggggggagaaacggcttttctctagcaggccctccggttgtttttattatattgggtgctgttgtttgttgcaggtggtgggtggtgcagggattctttatttctggaggcaggaaggaggaagaagaaagaagaaacatcagaaccgacccgactatcagagatagagagagagaggagctctctcctcttcttttgcttttggtattgttatcttgggatctgattttgtccccatactaggagggagtgagggaaggagggaggaggctgggcttgtttctcctctcttctctcatctcagttcctcctcgcaaggctggccgtcggctcggctctgttgacagcaatccctgcactgcagtcttgccatgctccccacgaggagcgcaccatcagagtgattctgcagaaggattcattctactggcgagccgagctggtgaaggagctataataagcctagcgctcacttcagtcatcagccaagtgattgaaaaaggcaagtcgtctgaattattggttccaagggctctgtagttgcttctccacactttcctatgcttttgcattaatcttgacaactgagtactcaaagctgggatatggctacttattattcgagccctgacagtgaaagagattcacaaacaatgtactcaacagagtcaggcaatgcatcatatcccgtgccatcagccctagggaactttctttatctgaacagtgcatcttctggaccttatacagaatttaatggaattgtccagtctcaacagaatttcatggaacttactggtcatccttcagcaatttcacatgattcatcatccaacgaagctactaacattggcacttcactgacagaacagcgctcttttggtcctttgaaagatatgagaaatgagatgttgatgcatttgatggatggagcacacagcagtggcagtgacctcatccacaatgatgaccatagcactgcacagctcgagtttggcatgttaaacaaccacaattcaacaagtcttccatcagcatcaggccaagggctgtctctgagcctcaatacacatatcttggcaccttcctatccatactggtctgcaaagcaggacttattaacaccaaattcttaccagggtgatgacaacagaatgaagaatatgcagtctgaggcttcacaggcaatccgaaactctaagtatctgaaggcagcacaggagttgcttgatgagattgtcagtgtttggaagagtgttaaacagaaaacagataaaggcccttctgaagcaggaaagtcagatggaaaagagactgatggggggactaaaagtgagggagtatcttttgatccacaagagtctggtgccaatacagcagctgagctttcaactgctgagaaacaagagctccagaataagatggtgaaacttatggcaatgttggatgaggtggatcggaagtacaaacactattatcatcggatgcaacttgtaatgtcatcgtttgatatggttgctggttctggagctgccaagccttatactgcagttgccctccagacaatctcacggcatttccgatgtctaaaggatgctatcaatgatcaaattagtgttatcaggaagaaacttggagaggatgacgatgcatctggcaaagagggcaaactaattcgccttcgttatatcgatcagcaaataaggcaacagcgagctttccaacagtatggtatgctacagcaaaatgcttggaggccacagagggggctacctgaaaattcagtctcgattctccgggcttggctttttgaacacttccttcacccgtatccaaaagactctgaaaagctaatgttatcgagacaaactgggttaacaagaagtcagatttcaaattggttcatcaatgcccgtgtccggctgtggaagccaatgatcgaagacatgtacaaagaagagataggtgaggcagagctagactccaactcttcctctgacaatgtgcagccgaacaaggacaagccgccatcttccgaagaaaaggaccataagacctcaacaagccaggtttgccaaaccagccagcttggcgaatccaaagccaacattggtggagtggtgagcttttgtggagcgccagccggcggcttccacaacgatgccaaccccgatgacagcttcatgagcctgatgctgaaggcccagagaccgggcgaaaccgatggcagcggtctcctccatgatgccgtcgctcatcactccgatgagagcgcgcggttcatggcgtaccacctgacagagtttgggaggtatgggaacaacaacgtctcactgactctggggttgcagcacgccgagaacacccagccgggcttccccggcgtcagagaccaagacatctacaactccacagctcctctcaacgtcacctccacatcttcagagtatgattcggcgagccaaatagatcaacaacggcagctgtttgaggtgtcacctctgatgcatgatttcgtggcctgaatttcagctgacgcactggaaaacgtggggaagtgacttgtcatttgtagtgccaggacgaacaatatgcctggactgaattttcaggcgtggaaatgtagctgtagttgtaattggggtacagaatggacgaggtatatagcataaatgttatgtaaatttagtgggggcaggggtgatagtggtaaagaaatcctgtaaagatggaatacattttatacgtgtaaaatacgagtatttaagggccacgctgtaaaaatagatttacctgtaactgtaacgagtgtttgtaatgagtgtaaagaactgccacatgccatattttcgatgggtgagaagatatagaaatcttattttctttgttaattgtta

SEQ ID NO: 48006 - DNA, 2856 bp, Zea Mays
attatattgggtgctgttgtttgttgcaggtggtgggtggtgcagggattctttatttctggaggcaggaaggaggaagaagaaagaagaaacatcagaaccgacccgactatcagagatagagagagagaggagctctctcctcttcttttgcttttggtattgttatcttgggatctgattttgtccccatactaggagggagtgagggaaggagggaggaggctgggcttgtttctcctctcttctctcatctcagttcctcctcgcaaggctggccgtcggctcggctctgttgacagcaatccctgcactgcagtcttgccatgctccccacgaggagcgcaccatcagacagagtgattctgcagaaggattcattctactggcgagccgagctggtgaaggagctataataagcctagcgctcacttcagtcatcagccaagtgattgaaaaaggcaagtcgtctgaattattggttccaagggctctgtagttgcttctccacactttcctatgcttttgcattaatcttgacaactgagtactcaaagctgggatatggctacttattattcgagccctgacagtgaaagagattcacaaacaatgtactcaacagagtcaggcaatgcatcatatcccgtgccatcagccctagggaactttctttatctgaacagtgcatcttctggaccttatacagaatttaatggaattgtccagtctcaacagaatttcatggaacttactggtcatccttcagcaatttcacatgattcatcatccaacgaagctactaacattggcacttcactgacagaacagcgctcttttggtcctttgaaagatatgagaaatgagatgttgatgcatttgatggatggagcacacagcagtggcagtgacctcatccacaatgatgaccatagcactgcacagctcgagtttggcatgttaaacaaccacaattcaacaagtcttccatcagcatcaggccaagggctgtctctgagcctcaatacacatatcttggcaccttcctatccatactggtctgcaaagcaggacttattaacaccaaattcttaccagggtgatgacaacagaatgaagaatatgcagtctgaggcttcacaggcaatccgaaactctaagtatctgaaggcagcacaggagttgcttgatgagattgtcagtgtttggaagagtgttaaacagaaaacagataaaggcccttctgaagcaggaaagtcagatggaaaagagactgatggggggactaaaagtgagggagtatcttttgatccacaagagtctggtgccaatacagcagctgagctttcaactgctgagaaacaagagctccagaataagatggtgaaacttatggcaatgttggatgaggtggatcggaagtacaaacactattatcatcggatgcaacttgtaatgtcatcgtttgatatggttgctggttctggagctgccaagccttatactgcagttgccctccagacaatctcacggcatttccgatgtctaaaggatgctatcaatgatcaaattagtgttatcaggaagaaacttggagaggatgacgatgcatctggcaaagagggcaaactaattcgccttcgttatatcgatcagcaaataaggcaacagcgagctttccaacagtatggtatgctacagcaaaatgcttggaggccacagagggggctacctgaaaattcagtctcgattctccgggcttggctttttgaacacttccttcacccgtatccaaaagactctgaaaagctaatgttatcgagacaaactgggttaacaagaagtcagatttcaaattggttcatcaatgcccgtgtccggctgtggaagccaatgatcgaagacatgtacaaagaagagataggtgaggcagagctagactccaactcttcctctgacaatgtgcagccgaacaaggacaagccgccatcttccgaagaaaaggaccataagacctcaacaagccaggtttgccaaaccagccagcttggcgaatccaaagccaacattggtggagtggtgagcttttgtggagcgccagccggcggcttccacaacgatgccaaccccgatgacagcttcatgagcctgatgctgaaggcccagagaccgggcgaaaccgatggcagcggtctcctccatgatgccgtcgctcatcactccgatgagagcgcgcggttcatggcgtaccacctgacagagtttgggaggtatgggaacaacaacgtctcactgactctggggttgcagcacgccgagaacacccagccgggcttccccggcgtcagagaccaagacatctacaactccacagctcctctcaacgtcacctccacatcttcagagtatgattcggcgagccaaatagatcaacaacggcagctgtttgaggtgtcacctctgatgcatgatttcgtggcctgaatttcagctgacgcactggaaaacgtggggaagtgacttgtcatttgtagtgccaggacgaacaatatgcctggactgaattttcaggcgtggaaatgtagctgtagttgtaattggggtacagaatggacgaggtatatagcataaatgttatgtaaatttagtgggggcaggggtgatagtggtaaagaaatcctgtaaagatggaatacattttatacgtgtaaaatacgagtatttaagggccacgctgtaaaaatagatttacctgtaactgtaacgagtgtttgtaatgagtgtaaagaactgccacatgccatattttcgatgggtgagaagatatagaaatcttattttctttgttaattgtta

SEQ ID NO: 48007 - DNA, 2834 bp, Zea Mays
attatattgggtgctgttgtttgttgcaggtggtgggtggtgcagggattctttatttctggaggcaggaaggaggaagaagaaagaagaaacatcagaaccgacccgactatcagagatagagagagagaggagctctctcctcttcttttgcttttggtattgttatcttgggatctgattttgtccccatactaggagggagtgagggaaggagggaggaggctgggcttgtttctcctctcttctctcatctcagttcctcctcgcaaggctggccgtcggctcggctctgttgacagcaatccctgcactgcagtcttgccatgctccccacgaggagcgcaccatcagaaggattcattctactggcgagccgagctggtgaaggagctataataagcctagcgctcacttcagtcatcagccaagtgattgaaaaaggcaagtcgtctgaattattggttccaagggctctgtagttgcttctccacactttcctatgcttttgcattaatcttgacaactgagtactcaaagctgggatatggctacttattattcgagccctgacagtgaaagagattcacaaacaatgtactcaacagagtcaggcaatgcatcatatcccgtgccatcagccctagggaactttctttatctgaacagtgcatcttctggaccttatacagaatttaatggaattgtccagtctcaacagaatttcatggaacttactggtcatccttcagcaatttcacatgattcatcatccaacgaagctactaacattggcacttcactgacagaacagcgctcttttggtcctttgaaagatatgagaaatgagatgttgatgcatttgatggatggagcacacagcagtggcagtgacctcatccacaatgatgaccatagcactgcacagctcgagtttggcatgttaaacaaccacaattcaacaagtcttccatcagcatcaggccaagggctgtctctgagcctcaatacacatatcttggcaccttcctatccatactggtctgcaaagcaggacttattaacaccaaattcttaccagggtgatgacaacagaatgaagaatatgcagtctgaggcttcacaggcaatccgaaactctaagtatctgaaggcagcacaggagttgcttgatgagattgtcagtgtttggaagagtgttaaacagaaaacagataaaggcccttctgaagcaggaaagtcagatggaaaagagactgatggggggactaaaagtgagggagtatcttttgatccacaagagtctggtgccaatacagcagctgagctttcaactgctgagaaacaagagctccagaataagatggtgaaacttatggcaatgttggatgaggtggatcggaagtacaaacactattatcatcggatgcaacttgtaatgtcatcgtttgatatggttgctggttctggagctgccaagccttatactgcagttgccctccagacaatctcacggcatttccgatgtctaaaggatgctatcaatgatcaaattagtgttatcaggaagaaacttggagaggatgacgatgcatctggcaaagagggcaaactaattcgccttcgttatatcgatcagcaaataaggcaacagcgagctttccaacagtatggtatgctacagcaaaatgcttggaggccacagagggggctacctgaaaattcagtctcgattctccgggcttggctttttgaacacttccttcacccgtatccaaaagactctgaaaagctaatgttatcgagacaaactgggttaacaagaaatttcaaattggttcatcaatgcccgtgtccggctgtggaagccaatgatcgaagacatgtacaaagaagagataggtgaggcagagctagactccaactcttcctctgacaatgtgcagccgaacaaggacaagccgccatcttccgaagaaaaggaccataagacctcaacaagccaggtttgccaaaccagccagcttggcgaatccaaagccaacattggtggagtggtgagcttttgtggagcgccagccggcggcttccacaacgatgccaaccccgatgacagcttcatgagcctgatgctgaaggcccagagaccgggcgaaaccgatggcagcggtctcctccatgatgccgtcgctcatcactccgatgagagcgcgcggttcatggcgtaccacctgacagagtttgggaggtatgggaacaacaacgtctcactgactctggggttgcagcacgccgagaacacccagccgggcttccccggcgtcagagaccaagacatctacaactccacagctcctctcaacgtcacctccacatcttcagagtatgattcggcgagccaaatagatcaacaacggcagctgtttgaggtgtcacctctgatgcatgatttcgtggcctgaatttcagctgacgcactggaaaacgtggggaagtgacttgtcatttgtagtgccaggacgaacaatatgcctggactgaattttcaggcgtggaaatgtagctgtagttgtaattggggtacagaatggacgaggtatatagcataaatgttatgtaaatttagtgggggcaggggtgatagtggtaaagaaatcctgtaaagatggaatacattttatacgtgtaaaatacgagtatttaagggccacgctgtaaaaatagatttacctgtaactgtaacgagtgtttgtaatgagtgtaaagaactgccacatgccatattttcgatgggtgagaagatatagaaatcttattttctttgttaattgtta

SEQ ID NO: 48008 - DNA, 2522 bp, Zea Mays
gttgccttgcctgtggaagtgcagagtgattctgcagaaggattcattctactggcgagccgagctggtgaaggagctataataagcctagcgctcacttcagtcatcagccaagtgattgaaaaaggcaagtcgtctgaattattggttccaagggctctgtagttgcttctccacactttcctatgcttttgcattaatcttgacaactgagtactcaaagctgggatatggctacttattattcgagccctgacagtgaaagagattcacaaacaatgtactcaacagagtcaggcaatgcatcatatcccgtgccatcagccctagggaactttctttatctgaacagtgcatcttctggaccttatacagaatttaatggaattgtccagtctcaacagaatttcatggaacttactggtcatccttcagcaatttcacatgattcatcatccaacgaagctactaacattggcacttcactgacagaacagcgctcttttggtcctttgaaagatatgagaaatgagatgttgatgcatttgatggatggagcacacagcagtggcagtgacctcatccacaatgatgaccatagcactgcacagctcgagtttggcatgttaaacaaccacaattcaacaagtcttccatcagcatcaggccaagggctgtctctgagcctcaatacacatatcttggcaccttcctatccatactggtctgcaaagcaggacttattaacaccaaattcttaccagggtgatgacaacagaatgaagaatatgcagtctgaggcttcacaggcaatccgaaactctaagtatctgaaggcagcacaggagttgcttgatgagattgtcagtgtttggaagagtgttaaacagaaaacagataaaggcccttctgaagcaggaaagtcagatggaaaagagactgatggggggactaaaagtgagggagtatcttttgatccacaagagtctggtgccaatacagcagctgagctttcaactgctgagaaacaagagctccagaataagatggtgaaacttatggcaatgttggatgaggtggatcggaagtacaaacactattatcatcggatgcaacttgtaatgtcatcgtttgatatggttgctggttctggagctgccaagccttatactgcagttgccctccagacaatctcacggcatttccgatgtctaaaggatgctatcaatgatcaaattagtgttatcaggaagaaacttggagaggatgacgatgcatctggcaaagagggcaaactaattcgccttcgttatatcgatcagcaaataaggcaacagcgagctttccaacagtatggtatgctacagcaaaatgcttggaggccacagagggggctacctgaaaattcagtctcgattctccgggcttggctttttgaacacttccttcacccgtatccaaaagactctgaaaagctaatgttatcgagacaaactgggttaacaagaagtcagatttcaaattggttcatcaatgcccgtgtccggctgtggaagccaatgatcgaagacatgtacaaagaagagataggtgaggcagagctagactccaactcttcctctgacaatgtgcagccgaacaaggacaagccgccatcttccgaagaaaaggaccataagacctcaacaagccaggtttgccaaaccagccagcttggcgaatccaaagccaacattggtggagtggtgagcttttgtggagcgccagccggcggcttccacaacgatgccaaccccgatgacagcttcatgagcctgatgctgaaggcccagagaccgggcgaaaccgatggcagcggtctcctccatgatgccgtcgctcatcactccgatgagagcgcgcggttcatggcgtaccacctgacagagtttgggaggtatgggaacaacaacgtctcactgactctggggttgcagcacgccgagaacacccagccgggcttccccggcgtcagagaccaagacatctacaactccacagctcctctcaacgtcacctccacatcttcagagtatgattcggcgagccaaatagatcaacaacggcagctgtttgaggtgtcacctctgatgcatgatttcgtggcctgaatttcagctgacgcactggaaaacgtggggaagtgacttgtcatttgtagtgccaggacgaacaatatgcctggactgaattttcaggcgtggaaatgtagctgtagttgtaattggggtacagaatggacgaggtatatagcataaatgttatgtaaatttagtgggggcaggggtgatagtggtaaagaaatcctgtaaagatggaatacattttatacgtgtaaaatacgagtatttaagggccacgctgtaaaaatagatttacctgtaactgtaacgagtgtttgtaatgagtgtaaagaactgccacatgccatattttcgatgggtgagaagatatagaaatcttattttctttgttaattgtta

SEQ ID NO: 48009 - DNA, 2686 bp, Zea Mays
ctggaggtggcccttttgttgtattactcactttattagctctttttttttcatccgagttgaagtgctctcttatttttattgtctgtgaaaacaaagttttgcctaggacatttctcctggctccacctctttcatatcattaaaaaaagtgaaaattacagctgcaaacgaccagtgaagcatccccgtctcttctagaaggattcattctactggcgagccgagctggtgaaggagctataataagcctagcgctcacttcagtcatcagccaagtgattgaaaaaggcaagtcgtctgaattattggttccaagggctctgtagttgcttctccacactttcctatgcttttgcattaatcttgacaactgagtactcaaagctgggatatggctacttattattcgagccctgacagtgaaagagattcacaaacaatgtactcaacagagtcaggcaatgcatcatatcccgtgccatcagccctagggaactttctttatctgaacagtgcatcttctggaccttatacagaatttaatggaattgtccagtctcaacagaatttcatggaacttactggtcatccttcagcaatttcacatgattcatcatccaacgaagctactaacattggcacttcactgacagaacagcgctcttttggtcctttgaaagatatgagaaatgagatgttgatgcatttgatggatggagcacacagcagtggcagtgacctcatccacaatgatgaccatagcactgcacagctcgagtttggcatgttaaacaaccacaattcaacaagtcttccatcagcatcaggccaagggctgtctctgagcctcaatacacatatcttggcaccttcctatccatactggtctgcaaagcaggacttattaacaccaaattcttaccagggtgatgacaacagaatgaagaatatgcagtctgaggcttcacaggcaatccgaaactctaagtatctgaaggcagcacaggagttgcttgatgagattgtcagtgtttggaagagtgttaaacagaaaacagataaaggcccttctgaagcaggaaagtcagatggaaaagagactgatggggggactaaaagtgagggagtatcttttgatccacaagagtctggtgccaatacagcagctgagctttcaactgctgagaaacaagagctccagaataagatggtgaaacttatggcaatgttggatgaggtggatcggaagtacaaacactattatcatcggatgcaacttgtaatgtcatcgtttgatatggttgctggttctggagctgccaagccttatactgcagttgccctccagacaatctcacggcatttccgatgtctaaaggatgctatcaatgatcaaattagtgttatcaggaagaaacttggagaggatgacgatgcatctggcaaagagggcaaactaattcgccttcgttatatcgatcagcaaataaggcaacagcgagctttccaacagtatggtatgctacagcaaaatgcttggaggccacagagggggctacctgaaaattcagtctcgattctccgggcttggctttttgaacacttccttcacccgtatccaaaagactctgaaaagctaatgttatcgagacaaactgggttaacaagaagtcagatttcaaattggttcatcaatgcccgtgtccggctgtggaagccaatgatcgaagacatgtacaaagaagagataggtgaggcagagctagactccaactcttcctctgacaatgtgcagccgaacaaggacaagccgccatcttccgaagaaaaggaccataagacctcaacaagccaggtttgccaaaccagccagcttggcgaatccaaagccaacattggtggagtggtgagcttttgtggagcgccagccggcggcttccacaacgatgccaaccccgatgacagcttcatgagcctgatgctgaaggcccagagaccgggcgaaaccgatggcagcggtctcctccatgatgccgtcgctcatcactccgatgagagcgcgcggttcatggcgtaccacctgacagagtttgggaggtatgggaacaacaacgtctcactgactctggggttgcagcacgccgagaacacccagccgggcttccccggcgtcagagaccaagacatctacaactccacagctcctctcaacgtcacctccacatcttcagagtatgattcggcgagccaaatagatcaacaacggcagctgtttgaggtgtcacctctgatgcatgatttcgtggcctgaatttcagctgacgcactggaaaacgtggggaagtgacttgtcatttgtagtgccaggacgaacaatatgcctggactgaattttcaggcgtggaaatgtagctgtagttgtaattggggtacagaatggacgaggtatatagcataaatgttatgtaaatttagtgggggcaggggtgatagtggtaaagaaatcctgtaaagatggaatacattttatacgtgtaaaatacgagtatttaagggccacgctgtaaaaatagatttacctgtaactgtaacgagtgtttgtaatgagtgtaaagaactgccacatgccatattttcgatgggtgagaagatatagaaatcttattttctttgttaattgtta

SEQ ID NO: 48010 - DNA, 2461 bp, Zea Mays
ccgccttgaatggctgcatcattttggtgatcagaaggaattctcaaccacattctcatcctcttggcaagtcgtctgaattattggttccaagggctctgtagttgcttctccacactttcctatgcttttgcattaatcttgacaactgagtactcaaagctgggatatggctacttattattcgagccctgacagtgaaagagattcacaaacaatgtactcaacagagtcaggcaatgcatcatatcccgtgccatcagccctagggaactttctttatctgaacagtgcatcttctggaccttatacagaatttaatggaattgtccagtctcaacagaatttcatggaacttactggtcatccttcagcaatttcacatgattcatcatccaacgaagctactaacattggcacttcactgacagaacagcgctcttttggtcctttgaaagatatgagaaatgagatgttgatgcatttgatggatggagcacacagcagtggcagtgacctcatccacaatgatgaccatagcactgcacagctcgagtttggcatgttaaacaaccacaattcaacaagtcttccatcagcatcaggccaagggctgtctctgagcctcaatacacatatcttggcaccttcctatccatactggtctgcaaagcaggacttattaacaccaaattcttaccagggtgatgacaacagaatgaagaatatgcagtctgaggcttcacaggcaatccgaaactctaagtatctgaaggcagcacaggagttgcttgatgagattgtcagtgtttggaagagtgttaaacagaaaacagataaaggcccttctgaagcaggaaagtcagatggaaaagagactgatggggggactaaaagtgagggagtatcttttgatccacaagagtctggtgccaatacagcagctgagctttcaactgctgagaaacaagagctccagaataagatggtgaaacttatggcaatgttggatgaggtggatcggaagtacaaacactattatcatcggatgcaacttgtaatgtcatcgtttgatatggttgctggttctggagctgccaagccttatactgcagttgccctccagacaatctcacggcatttccgatgtctaaaggatgctatcaatgatcaaattagtgttatcaggaagaaacttggagaggatgacgatgcatctggcaaagagggcaaactaattcgccttcgttatatcgatcagcaaataaggcaacagcgagctttccaacagtatggtatgctacagcaaaatgcttggaggccacagagggggctacctgaaaattcagtctcgattctccgggcttggctttttgaacacttccttcacccgtatccaaaagactctgaaaagctaatgttatcgagacaaactgggttaacaagaagtcagatttcaaattggttcatcaatgcccgtgtccggctgtggaagccaatgatcgaagacatgtacaaagaagagataggtgaggcagagctagactccaactcttcctctgacaatgtgcagccgaacaaggacaagccgccatcttccgaagaaaaggaccataagacctcaacaagccaggtttgccaaaccagccagcttggcgaatccaaagccaacattggtggagtggtgagcttttgtggagcgccagccggcggcttccacaacgatgccaaccccgatgacagcttcatgagcctgatgctgaaggcccagagaccgggcgaaaccgatggcagcggtctcctccatgatgccgtcgctcatcactccgatgagagcgcgcggttcatggcgtaccacctgacagagtttgggaggtatgggaacaacaacgtctcactgactctggggttgcagcacgccgagaacacccagccgggcttccccggcgtcagagaccaagacatctacaactccacagctcctctcaacgtcacctccacatcttcagagtatgattcggcgagccaaatagatcaacaacggcagctgtttgaggtgtcacctctgatgcatgatttcgtggcctgaatttcagctgacgcactggaaaacgtggggaagtgacttgtcatttgtagtgccaggacgaacaatatgcctggactgaattttcaggcgtggaaatgtagctgtagttgtaattggggtacagaatggacgaggtatatagcataaatgttatgtaaatttagtgggggcaggggtgatagtggtaaagaaatcctgtaaagatggaatacattttatacgtgtaaaatacgagtatttaagggccacgctgtaaaaatagatttacctgtaactgtaacgagtgtttgtaatgagtgtaaagaactgccacatgccatattttcgatgggtgagaagatatagaaatcttattttctttgttaattgtta

SEQ ID NO: 48011 - DNA, 3119 bp, Zea Mays
gtacatcccgctagagtctacgcaggccgaggcgatagccattgcctctctgcctggcggaaccgaagaccgccgagcccccgacccagctccagcctccagctgcgtgtgagcgtgtcgatctccactctcccgcgtgttcatcacaatcccaactcccgttactttccgggctcctcgtcctctgccccaaaaccctaaacctaataccgtcatggcgctcactacacggggtgccgccggcggtggggatgcggcgaaggcgccgtccgcttccgatcccagcctcggctttctcaccaagtgcgacaccgaggtcaagctaccccgcgccgatacagattacggccgagcagatcctccgggaggctagggagcggcaggagcctgagatccgcccacccaagcagaagataacagacccccaagagctctccgagtaccgcctccgcaagcggaaggagttcgaggatgtcatccgccgagtgcgctggagcgtctcggcctgggtcaagtacgcgcggtgggaggagcagcagctggacttcgcgcgcgcgcggtccgtctacgagcgcacgctcgacgtcgcccaccgtgaccacacgctctggctcaagtatgccgaattcgagatgcggaaccggtttgtcaaccacgcccggaatgtctgggaccgcgcggtgtcgctcctcccccgggtggatcagctatggtacaagtacatacacatggaggagctgcttggtgcagttgccaatgcgcgccaggtgtttgagcgctggatgtcttggcgacccgacacggctggctggaattcttacatcaagtttgagctgcggtatggggaggtcgagcgtgccagagctatctatgagcggtttgtggctgagcacccacggccagataccttcatccgatatgctaagtttgagatgaagcgcggtgaggtcgaacgggcacggcgggtgtatgagcgtgcagcagacctgcttgctgatgatgaagatgcagaagtgttgtttgtggcatttgcagagtttgaggagaggtgccgtgaggtcgagcgtgcacgtgcaatatacaagtatgctctggacagggtgcccaagggtcgtgctgaggaattgtataggaagttcctggcatttgagaagcaatttggtgaccgtgagggaattgaggatgccattgtcggcaagaggagatttcagtacgaggatgaggttaggaaaaacccactaaactatgactcatggtttgattatatcaggctggaggagagtgttgggaataacgataggatcagggaggtgtacgagagggccattgccaatgtgcccccctgcagaagtgcagaggagaagcgatattggcagaggtacatatacctctggattaactatgcactttatgaggagctagatgcacaagacagaacggaccagggaggtttacaaggaatgcctgaggctgattcctcacaagaagttcacatttgcaaagatgtggctcatggcggcccagtttgaaataaggcagaaaaatctaaagcctgcaagacaaattcttggaaatgcaattggaatggccccaaagggcaagatattgaagaaatatatttaaatcgagctttatttaggtaactttgaccgttgtaggactctttatgagaaatatattgaatggtccccagcaaactgttatgcttggaggagatatgctgaattggagaagaaccttagtgatactgatcgtgctcgatcaatatatgaacttgctattgtacagacagcccttgatatgccagagattctgtggaaggagtacttgcagtttgaaattgatgaaaatgaatttgagaggactaggcaactatatgagagactgcttgataggacaaagcatttaaaggtatggaccagttatgcggagtttgaggcctctgctggcttgggcggtgaagacagtgaaggtgaggagaaaaagaatgataaggaacagaagatggagcaagtcaaaaaatgtagagctatctttgaaagggcattcgactacttcagaaccagtgcctccgagttgaaggaggaaagagctatgcttcttgaagaatggcttaataaggaagtgatctttggtgatcttggggatgtcaccttagtgcaaaagaaggcgccaagaaaagtcaagcggaagagaccaattcctacagaagatggctccactatagcgtatgaggagtatatagattacattttccctgatgaagttgctctagcaccaaacctgaagatcctggaagcggcttacaaatggaagaagcagagaaccgacgatgacaatgtgtgatcctggcatcgcagtattggcgttgtcgtgaacattttgctacagccaaaatcaggtgtcttgcaacactggccagagctatcggaatgagaataatcgatttcttcatgtcacagaggatgcagttgctgttgaaaagaattgtcagaaatacttttaacaggtgcccttccagtcgctatgcttcgtctgcagttgtcctcaacttcaatcgctgtgttaactgtgtggccatgccgggtcacacaggtaggtgttcagaatccagttggaggacttgcagttgcagaggatcctaccagcaagtcgtcatattcagtgcctagcagctcagtttattagccagtgaagcttttgattcctagtagtctgttgccaggtttgtttcttgtatttttgttttctcagaaaagttgacaagagctttgctgaactaatttattagaaagaaaaaaacaagaaaagtacaggacagccaaaaaaagcagcagaagaaggaaaggggacagctatgcgaaagaagaaatcgtttcttttatgtgtgtttttgtgattttggcaaacctaggattgctatgacttgttttatgcttgggcatctaattttaaaaagttaaatgtatcggtggctcttgaacttgtaagagatgtcacttatgtttatgaattttgaaaatgtatttctaggtctttctagatctttgacttgttaagtaaggtactctctctgttttaatttataattcgtttaactattttatcataagtttaac

SEQ ID NO: 48012 - DNA, 2367 bp, Zea Mays
ctggcactcgactccaaataggctcgacacacactcccctcgctctgaatccggcggcgtgaaagccttgcgcccttgccttgccttgccttcctgcgagcgcgaggaccacggctctccttcccttcccggcgtgcaccgtagcccgaagaccgtcgtcttctcgcgtctcacgccgtttggtgcgttcccgttccccgcgtcggcttgccgtattttctgcacgggtgtcactgtcatgtcggacccgtgaagcgattacgccgcccatgggccatgaccctgcctgggctgggagaacccaaccgcagcgtcggcaagccaagtcgatccctatccggctatggctgcccgctatccccaggcgctcaggcggcggcgtatccgttctgttgcagacagcaggtccttcctagtagcgccaacggccggctactgcacaagttgccccggatgcgatgtgccaagaaggcggtgacgacgagtttccccttccccgcacctacgtgctctgctacgggagccacccttccgcgttggtctcctcggatacgatggccatggcgttcttcttccagctgctcccagatcaccccggggttctaatagccgcagcccaagtaaacgatggatttctggttacgcagcctcgcacatcaattcgattggtgcagctctatgttgtagccatttttttctcttcaataattgtttgctgaaacctggtgacgagtacagtctctgctgctgcgtggctgtgatgacaaaaaggttatttggttgattatgattcttaatgccatttaaggatcaaattgtgatgacctatttgtgcgtgtctgagccgatgcaatgaagagtccatttttgctgaccgttctgctgatctttctgctaaggattttgcactattgtttatctgattttggtcgtgggatggtaatcaattcggggtgcaagtatccttttatctgtagctggcaggatgaatggcaaagggaccaatcttgaatttatgtttgtcgattggatttctggcatctttggaacatctggcatggctgggatgacaaaaacatacgtttctcgatcctgatacttggttttatcaaggaccaaactttgatgacctttgtgcgtatctgagccgttgcaaatgagtatgttttccttatttattgttacaaggttatggccttctgtgcatctgggttatccagggtggctatggtgacacaaatgttcgtttctcgatgatattagttgtgtcagaagaacttgatttattcaaggttatgagctctgtgcgtgtctgagccagcaccttaattctttgcttgtaaactatgaacctcttttgttgcccatggtatacttgagttctgtttgcctgaagtgaatgttattagctgcttgtctactgtgatatttggagagtttgcagatcggaacgggttgctctggtccaaatcatgacactgactgtgttgtggtgatagagataataatcacttttttggatgagatatcactattacctatctttattctttgcacgaaaagtatgaccttttctgttgttcatgtcttatttgagttttgtttagctcagttttgcttttttattaaattttggtgacaataatctccaaaattatgctgctggttacttgtctgttgtgatttttggcgagttctaaagttcgatagatatttgtgcactgcttcatcagtcttttgcattctcagatgtaatcatagctgttctggatgatgatgtcagagcggccacggatccttttcttgcatcgaattgtcatacatgaacttggattctttgtggccatcatattgtcgtatacatgaacctgggttcttttgtggccacctggctgctctttctatccaggccatgttccaattataatacatgaattgcatatatcattgaccagaaactatgtttggaaccctggtaggattgtttttggaaaagcactcaaactgtgtgatggcagtagttagttttgtggcttgtcaaagggattcctacaagtgggtactctgctgttttacgtcgcagccattttgaaggtcaaatgacctcaatgtttgcaacgggagctacatggtcatctgtttaacatgtactcgtatttaatataatgatgacacagctctcctgtatgtttgaaaaaaaaacaagagtcagaaaagcgtgcatgtagtttcttggaaccttgtttactagagctggttcttcaaacagttttctgtcaatcaaagtggttgtctgaagttcctgttgaaagtggaacatgaaacatctagcaagcaagatatcatctgacacaaactagaacttgt

SEQ ID NO: 48013 - DNA, 710 bp, Zea Mays
ctggcactcgactccaaataggctcgacacacactcccctcgctctgaatccggcggcgtgaaagccttgcgcccttgccttgccttgccttcctgcgagcgcgaggaccacggctctccttcccttcccggcgtgcaccgtagcccgaagaccgtcgtcttctcgcgtctcacgccgtttggtgcgttcccgttccccgcgtcggcttgccgtattttctgcacgggtgtcactgtcatgtcggacccgtgaagcgattacgccgcccatgggccatgaccctgcctgggctgggagaacccaaccgcagcgtcggcaagccaagtcgatccctatccggctatggctgcccgctatccccaggcgctcaggcggcggcgtatccgttctgttgcagacagcaggtccttcctagtagcgccaacggccggctactgcacaagttgccccggatgcgatgtgccaagaaggcggtgacgacgagtttccccttccccgcacctacgtgctctgctacgggagccacccttccgcgttggtctcctcggagaacatatccatccaagaacatgcacatgcggcgtgatatctccgtatggatgggaactgggaaggaagaatgaagatgcatgagggaagatgtgttgatgaggactgaggaggcatccaaacctgagtgcaatgtgtgagccgccttggagaacctgag

SEQ ID NO: 48014 - DNA, 609 bp, Zea Mays
  misc_feature (608)..(609): n is a, c, g, or t
atggcgtcgccggttgtagtggccgcgacgctgctggtggtagcactggcggcattctgcggcacggacccgctccgaacggacaacatggtggacttcccggggtttgagtcccacctcgtcgacctccctgatcccgccgagatgccgacgcacgcggatgaatgggagcgactctgtggagccgatgtgcggttctgcggcgaggtgcaggggcccgagagcatcgccttcgaccagcagggccatacacgggcgtcgccgacggccgggtcgtcttctgggacagtgagcgaagctccgcggcgggccgaaggcctcgccgctggagtatctcccagcgagcacatctgcaacagcccgctcgggctctgtttcgataagactggggacctgtacatcgccgacgcctacttcggcttgctcaaagtccgccccgagggcgggctggccacgctgctcgcaacggaggccgagggcgtgcgcttcaacttcaccaacgacctcgacctcgacgacgagggcaacatctacttcactgactccagcattcactaccagagacggtactgatcagagggccagctgctatccacgaacgatagtgnn

SEQ ID NO: 48015 - DNA, 505 bp, Zea Mays
aatgaatggaaaatgtcctctacaactttggagattttatttcgcttgtgggcaagtggtgatgagagtttgtctctatcggcaactgtttggatcactgtttaactaaatcctacaatacataccttgccagtaccaatcttgtgaatgacagaaacacaaagcatatttattttctgatggactgcctgtagagctgtattctcttgatgttcagaaatcatatgagagggcaataatctccgtggagcaactgaatgctattcttagacaggcttctaaaaccaaggaaaagtgtcatagggcctcattaggtatatatattatatcttctccaggcagatccttggggccttcttgattattattaggtccttcttaagtattttggagaactggagactgggacccttcatccaaataggacccaaaatgtgtccggatgcgttgtattattacacttcccgatgtataatgaattccatctaagtcaataagtgtcggc

SEQ ID NO: 48016 - DNA, 889 bp, Zea Mays
attatacttgtctgctgcattgacagctcgagaagagggttccagactcgatagcattcagttgctacatttttacttgttctggtgcattgacagctcgagaagagggttccagactcccttgtgctaaaatgtcatctgtctggtatataatcttataaacatttagaagggatattcttgcaaaaccttcatgtggttattatttatatatgtattaatttcacagttctttaaacaattatactacagtattaatatattggtcatgaatccttggtgctaagggttcaaaaatccacttggtgttcaattactacatacaatgtgaagatagaagctacattttgagtttgttaaattaatttcattttttgctgcaattttaacttactatatatgctgcaaacactgcagattttatttcgcttgtgggcaagtggtgatgagagtttgtctctatcggcaactgtttggatcactgtttaactaaatcctacaatacataccttgccagtaccaatcttgtgaatgacagaaacacaaagcatatttattttctgatggactgcctgtagagctgtattctcttgatgttcagaaatcatatgagagggcaataatctccgtggagcaactgaatgctattcttagacaggcttctaaaaccaaggaaaagtgtcatagggcctcattaggtatatatattatatcttctccaggcagatccttggggccttcttgattattattaggtccttcttaagtattttggagaactggagactgggacccttcatccaaataggacccaaaatgtgtccggatgcgttgtattattacacttcccgatgtataatgaattccatctaagtcaataagtgtcggc

SEQ ID NO: 48017 - DNA, 2234 bp, Zea Mays
tgtctgctgcattgacagctcgagaagagggttccagactcgatagcattcagttgctacatttttacttgttctggtgcattgacagctcgagaagagggttccagactcccttgtgctaaaatgtcatctgtctggtatataatcttataaacatttagaagggatattcttgcaaaaccttcatgtggttattatttatatatgtattaatttcacagttctttaaacaattatactacagtattaatatattggtcatgaatccttggtgctaagggttcaaaaatccacttggtgttcaattactacatacaatgtgaagatagaagctacattttgagtttgttaaattaatttcattttttgctgcaattttaacttactatatatgctgcaaacactgcagattttatttcgcttgtgggcaagtggtgatgagagtttgtctctatcggcaactgtttggatcactgtttaactaaatcctacaatacataccttgccagtaccaatcttgtgaatgacagaaacacaaagcatatttattttctgatggactgcctgtagagctgtattctcttgatgttcagaaatcatatgagagggcaataatctccgtggagcaactgaatgctattcttagacaggcttctaaaaccaaggaaaagatctcaggaagatagataactggcaatatattagttgtgtcaccctatggtttcggtttctgtgttgtcactataaggattacaatctccatcccttattttctcaagttcttcaagtaataagaggagtggctcacttattcccaggcacaaggtacttaccgttgagactgaagcttgtgcagatgctgaacgagctttccacttgcagtcagatgttctatccaattccatcgttgctctttgactgcctagaattaagagaagtttctcagaaagaacaaacacaaagaacaaagatcaacttttcgtcgttgtagaaggtgccaaagaacctgctgaaatcaagggattttcaagaggagtgtattctttcagcgattctgcccagtggagttaccatgtttccttcccagaagtagccaccattcctcttgtcctcttgaagaggctacatgagcagacaacagttgaatcacttcgccatcctattaagtgtttgatagaccaggtgacggagaacaaggattttatagaaaggaaaagagaggttgtatccttttcaccaaatgataaggcgtcagttgatagcttccttcaggaggagaaggtcagcagaaccgcttcattcactcggttctatgcatccgtagctgaaaaccgtcaaccaaaatgtaatgtcataaatctctactactccttatgtctttagtgtaggcgtccacatctctttgttctaccatcgcgcgctccgcccgcgattcccctccccgcgcccgcagtccccgccgccatcctcgcggccgcagccgagcacagccgccacgcccgcagtccccgcgccagcaacgctcgcagtccccgccgccgtcctcgcggccgcagtccacgcggaatgccggacagggacgtcgtggcccccgcgggcggcggtgaccggaaggcggccaagctcgggagctggagcagcatgagcagcaactgcggcagcaagaagcggaagagcagcagcagcagcttcgggaggagatccacatccacctgcgaggaaaggcagggggtcttccgcatgctcatgagctggaaccaggagagccggttcagcaagaagatcaagacgacgacgagcaaagaaagatgaacgaaacgaagtgttcttagcttggtgtgactattcgggggttgcttgctggagggtttttgttcgtttagtgtctagccttagcttacttattacttttgttagtactctactagcagagtacatgcatagagtcagtggtgtggctgtggcgtggatcagatcattgatttgatcgagctgtacaaatagcgaggcgatacatgtcactgagttgatcagttgacaaggtggtttggaccatgttgaggcacggagaaacttcatccctaagttttagtttgtctggctttgctcgtcattttgtacttgttcttctcacatatttgttgcttagaatttacttcaaactcacgtccttttagcaatataacacacatttgtacatacattatctatactactatatgtttccgttgcaa

SEQ ID NO: 48018 - DNA, 1952 bp, Zea Mays
attgacagctcgagaagagggttccagactcgatagcattcagttgctacatttttacttgttctggtgcattgacagctcgagaagagggttccagactcccttgtgctaaaatgtcatctgtctgattttatttcgcttgtgggcaagtggtgatgagagtttgtctctatcggcaactgtttggatcactgtttaactaaatcctacaatacataccttgccagtaccaatcttgtgaatgacagaaacacaaagcatatttattttctgatggactgcctgtagagctgtattctcttgatgttcagaaatcatatgagagggcaataatctccgtggagcaactgaatgctattcttagacaggcttctaaaaccaaggaaaagatctcaggaagatagataactggcaatatattagttgtgtcaccctatggtttcggtttctgtgttgtcactataaggattacaatctccatcccttattttctcaagttcttcaagtaataagaggagtggctcacttattcccaggcacaaggtacttaccgttgagactgaagcttgtgcagatgctgaacgagctttccacttgcagtcagatgttctatccaattccatcgttgctctttgactgcctagaattaagagaagtttctcagaaagaacaaacacaaagaacaaagatcaacttttcgtcgttgtagaaggtgccaaagaacctgctgaaatcaagggattttcaagaggagtgtattctttcagcgattctgcccagtggagttaccatgtttccttcccagaagtagccaccattcctcttgtcctcttgaagaggctacatgagcagacaacagttgaatcacttcgccatcctattaagtgtttgatagaccaggtgacggagaacaaggattttatagaaaggaaaagagaggttgtatccttttcaccaaatgataaggcgtcagttgatagcttccttcaggaggagaaggtcagcagaaccgcttcattcactcggttctatgcatccgtagctgaaaaccgtcaaccaaaatgtaatgtcataaatctctactactccttatgtctttagtgtaggcgtccacatctctttgttctaccatcgcgcgctccgcccgcgattcccctccccgcgcccgcagtccccgccgccatcctcgcggccgcagccgagcacagccgccacgcccgcagtccccgcgccagcaacgctcgcagtccccgccgccgtcctcgcggccgcagtccacgcggaatgccggacagggacgtcgtggcccccgcgggcggcggtgaccggaaggcggccaagctcgggagctggagcagcatgagcagcaactgcggcagcaagaagcggaagagcagcagcagcagcttcgggaggagatccacatccacctgcgaggaaaggcagggggtcttccgcatgctcatgagctggaaccaggagagccggttcagcaagaagatcaagacgacgacgagcaaagaaagatgaacgaaacgaagtgttcttagcttggtgtgactattcgggggttgcttgctggagggtttttgttcgtttagtgtctagccttagcttacttattacttttgttagtactctactagcagagtacatgcatagagtcagtggtgtggctgtggcgtggatcagatcattgatttgatcgagctgtacaaatagcgaggcgatacatgtcactgagttgatcagttgacaaggtggtttggaccatgttgaggcacggagaaacttcatccctaagttttagtttgtctggctttgctcgtcattttgtacttgttcttctcacatatttgttgcttagaatttacttcaaactcacgtccttttagcaatataacacacatttgtacatacattatctatactactatatgtttccgttgcaa

SEQ ID NO: 48019 - DNA, 1798 bp, Zea Mays
tatcactccctccacgcccggagtccccgtttggctgccagttcctctcagggccctgtaggctccgtccgttattcctctccgcgatcggaggcgccgggcgcgattggctgggcggctgtccgcctggccgtggctggtgaacgacgagcgtcgttggcgttggcagggtgccagaggccaaccgccagggccgcaggagtgcggccgcgcggtactcgttgcctacttctacttgtgcgagccccgctggtcatggacgccgacccaagaagaagccataccaccgtgaacctggtcttgacaaggccatggaccttcaaaagaagcctgcccttctccttcgtctgcgtgacctcattttggcacaaaagacagggtcactacttgtacgtgaccttgaaaaggaggttggctttgtccaaaaatgggattttctttcactcatcggacgccaccccaatatcttccatgtctctggtggaagtgcttcccgaaagccaatttctgttacacttacagagaaggccagaaagatatcctgtgaagatgctgacgcacgagaactaatggagccaatcttggtgagaaaccttaggaaattactgatgatgtcgatggactgccagattccaatggagaagatcgaactaatccaatttgaactgggattacctaagaacttcaagagcaacttgattccaaggtaccctgattttttttcaatccatgatgtgaagggactggaccgtttgtgtatggaacattgggattcttcactagcagtaacaatacgagaaaaaaagagttttgagggtttccagatatgctctagagggattcctaaagatggaaatgtcttgggtccttttgcttttaagttgaagtatccagcaggatttaggccaaactggaagtaccttgaggaggttgtcaggtggcagaagatggcatttccttcaccttatttgaatgttaggcgagtcgaatctgcaacaccacaggctcgaaagcgtgccattgctgttctgcatgagattttgagcctgacaatggagaggcgattgacatctgataagctagacatattttcacaatgagtacaggcttccatgcaagttacttctttgtttggtgaaaaatcatggcatcttctacatcactaacaagagagcaagaagcacagtcttccttaaggaggcttatgaaaacagtgaccttatttataagtgtcctttactgaaattccatgatcagtttgcatctttgattggccgaccgtcagacaccatgttggcaatataattggagtgtggatttacttattaggagacaaactatatttggtgcatctgttttgttgaaactcaggtcagctcattgcacatgcaactacaacttaaatcctgtgtacagttgctgtttctctcatctcagtagctaaagagaaatagataactgaaaaaaccagtgtctcatcttcaaatgtgaagccatctagaaactctgcaaattagacaaaataatgcttgtagccttgtaccagaagtctcgtctttattctcattttccctcagttgtaggtttggcaccatatgattgacataggaatgttctaggatcagcttcttatgcagcttctatcccaaaacaatgttataacatttgtagcccttactatcataacatgtggtttgcttctcttggcttggatctttctgataaataatagagtaagatgctcatttattttaaacaatatcatactctctttttattttttaaggcacgatttgac

SEQ ID NO: 48020 - DNA, 2055 bp, Zea Mays
tatcactccctccacgcccggagtccccgtttggctgccagttcctctcagggccctgtaggctccgtccgttattcctctccgcgatcggaggcgccgggcgcgattggctgggcggctgtccgcctggccgtggctggtgaacgacgagcgtcgttggcgttggcagggtgccagaggccaaccgccagggccgcaggagtgcggccgcgcggtactcgttgcctacttctacttgtgcgagccccgctggtcatggacgccgacccaagaagaagccataccaccgtgaacctggtcttgacaaggccatggaccttcaaaagaagcctgcccttctccttcgtctgcgtgacctcattttggcacaaaagacagggtcactacttgtacgtgaccttgaaaaggaggttggctttgtccaaaaatgggattttctttcactcatcggacgccaccccaatatcttccatgtctctggtggaagtgcttcccgaaagccaatttctgttacacttacagagaaggccagaaagatatcctgtgaagatgctgacgcacgagaactaatggagccaatcttggtgagaaaccttaggaaattactgatgatgtcgatggactgccagattccaatggagaagatcgaactaatccaatttgaactgggattacctaagaacttcaagagcaacttgattccaaggtaccctgattttttttcaatccatgatgtgaagggactggaccgtttgtgtatggaacattgggattcttcactagcagtaacaatacgagaaaaaaagagttttgagggtttccagatatgctctagagggattcctaaagatggaaatgtcttgggtccttttgcttttaagttgaagtatccagcaggatttaggccaaactggaagtaccttgaggaggttgtcaggtggcagaagatggcatttccttcaccttatttgaatgttaggcgagtcgaatctgcaacaccacaggctcgaaagcgtgccattgctgttctgcatgagattttgagcctgacaatggagaggcgattgacatctgataagctagacatattttcacaatgagtacaggcttccatgcaagttacttctttgtttggtgaaaaatcatggcatcttctacatcactaacaagagagcaagaagcacagtcttccttaaggaggcttatgaaaacagtgaccttatttataagtgtcctttactgaaattccatgatcagtttgcatctttgattggccgaccgtcagacaccatgttggcaatataattggagtgtggatttacttattaggagacaaactatatttggtgcatctgttttgttgaaactcaggaggtgctggatgggttcttctccagtctcttgggtgctgaaattcagagaccattcactcttgatttgctaaattgccacagaaatgcagttgatctgagcgctttggagtctcctttctctgaaaaggaggttcaggatatgattgcaagtctccctaatgataaagcccttggtcctgatggattcacggggaggttttataaatcttgttggcacatcattaagacagatgtaatggctgccctggaaactcttcgtcatggaaatgctcacaaactgggaccgctaaactcagcatacctcgttcttatccccaagaaaaatggatgctttgacagccagggattttcggcctattagcctaatccacagtttcgctaaattggtcaccaaactgctagctaataggctcggtccccaccttcaggagttggttgcagctaatcaaagtgcttttgtgaaaggaaggtcgattcatgacaattacatgatggtgcaacattcaattaaatatcttcacaagaaacgagtctcaagtttatttttgaagttggacatcttttttttctttctcgaatgtgcaagagacatgcacatcttttcattaagaaggaagagaaaaggatccaaaatggatcagtacaagaagacccccattacggtggtcgaaagcaaagaaac

SEQ ID NO: 48021 - DNA, 776 bp, Zea Mays
tatcactccctccacgcccggagtccccgtttggctgccagttcctctcagggccctgtaggctccgtccgttattcctctccgcgatcggaggcgccgggcgcgattggctgggcggctgtccgcctggccgtggctggtgaacgacgagcgtcgttggcgttggcagggtgccagaggccaaccgccagggccgcaggagtgcggccgcgcggtactcgttgcctacttctacttgtgcgagccccgattgttcctgtttctgttgaccaagacttgtgcacctgggatgattagcccaacttcttcgtgatgcaccagtaacagccgggcacagggaactcgaagtaggggtcagatacgatacgagaaatgctgggcaatgagttattgcgtgtgatccatatccatcagaatgaaacaggtatgcgaccatgtgattgtttcgatgttatttttattttttctagaactcgtaccatagcagtcattcttgaaaagtgaactttatcaccacatggttgtccatggaacctagcgatccaataatcaagattttggttaccatatgttgattctaccaactgtcaggctattccatggcaggcacgctgtgctattgtttctttttctggcgaggctttgtgtttgatacgcccagcagttatcaaataaagaaacttcctggtttagtttagtgctggtggcagactgatgccaccctgatctcctctctctggatgcttgtgggggttacattagttgttgctttggtg

SEQ ID NO: 48022 - DNA, 2094 bp, Zea Mays
tatcactccctccacgcccggagtccccgtttggctgccagttcctctcagggccctgtaggctccgtccgttattcctctccgcgatcggaggcgccgggcgcgattggctgggcggctgtccgcctggccgtggctggtgaacgacgagcgtcgttggcgttggcagggtgccagaggccaaccgccagggccgcaggagtgcggccgcgcggtactcgttgcctacttctacttgtgcgagccccgttatacaaccagtggcacggaaccaactttctagacaagcacaatcagaagtagtagtagaaacgcaggttatagaagaaccagaagtagtagaaaaaccagctagcaatgcaaatggcttacaaaataggttcaggttcacttgctattgttgatgaagatatgagagactagggagaaccagaccactagtgagctggtcatggacgccgacccaagaagaagccataccaccgtgaacctggtcttgacaaggccatggaccttcaaaagaagcctgcccttctccttcgtctgcgtgacctcattttggcacaaaagacagggtcactacttgtacgtgaccttgaaaaggaggttggctttgtccaaaaatgggattttctttcactcatcggacgccaccccaatatcttccatgtctctggtggaagtgcttcccgaaagccaatttctgttacacttacagagaaggccagaaagatatcctgtgaagatgctgacgcacgagaactaatggagccaatcttggtgagaaaccttaggaaattactgatgatgtcgatggactgccagattccaatggagaagatcgaactaatccaatttgaactgggattacctaagaacttcaagagcaacttgattccaaggtaccctgattttttttcaatccatgatgtgaagggactggaccgtttgtgtatggaacattgggattcttcactagcagtaacaatacgagaaaaaaagagttttgagggtttccagatatgctctagagggattcctaaagatggaaatgtcttgggtccttttgcttttaagttgaagtatccagcaggatttaggccaaactggaagtaccttgaggaggttgtcaggtggcagaagatggcatttccttcaccttatttgaatgttaggcgagtcgaatctgcaacaccacaggctcgaaagcgtgccattgctgttctgcatgagattttgagcctgacaatggagaggcgattgacatctgataagctagacatattttcacaatgagtacaggcttccatgcaagttacttctttgtttggtgaaaaatcatggcatcttctacatcactaacaagagagcaagaagcacagtcttccttaaggaggcttatgaaaacagtgaccttatttataagtgtcctttactgaaattccatgatcagtttgcatctttgattggccgaccgtcagacaccatgttggcaatataattggagtgtggatttacttattaggagacaaactatatttggtgcatctgttttgttgaaactcagattgttcctgtttctgttgaccaagacttgtgcacctgggatgattagcccaacttcttcgtgatgcaccagtaacagccgggcacagggaactcgaagtaggggtcagatacgatacgagaaatgctgggcaatgagttattgcgtgtgatccatatccatcagaatgaaacaggtatgcgaccatgtgattgtttcgatgttatttttattttttctagaactcgtaccatagcagtcattcttgaaaagtgaactttatcaccacatggttgtccatggaacctagcgatccaataatcaagattttggttaccatatgttgattctaccaactgtcaggctattccatggcaggcacgctgtgctattgtttctttttctggcgaggctttgtgtttgatacgcccagcagttatcaaataaagaaacttcctggtttagtttagtgctggtggcagactgatgccaccctgatctcctctctctggatgcttgtgggggttacattagttgttgctttggtg

SEQ ID NO: 48023 - DNA, 1233 bp, Zea Mays
tatcactccctccacgcccggagtccccgtttggctgccagttcctctcagggccctgtaggctccgtccgttattcctctccgcgatcggaggcgccgggcgcgattggctgggcggctgtccgcctggccgtggctggtgaacgacgagcgtcgttggcgttggcagggtgccagaggccaaccgccagggccgcaggagtgcggccgcgcggtactcgttgcctacttctacttgtgcgagccccgctggtcatggacgccgacccaagaagaagccataccaccgtgaacctggtcttgacaaggccatggaccttcaaaagaagcctgcccttctccttcgtctgcgtgacctcattttggcacaaaagacagggtcactacttgtacgtgaccttgaaaaggaggttggctttgtccaaaaatgggattttctttcactcatcggacgccaccccaatatcttccatgtctctggtggaagtgcttcccgaaagccaatttctgttacacttacagagaaggccagaaagatatcctgtgaagatgctgacgcacgagaactaatggagccaatcttggtgagaaaccttaggaaattactgatgatgtcgatggactgccagattccaatggagaagatcgaactaatccaatttgaactgggattacctaagaacttcaagagcaacttgattccaagattgttcctgtttctgttgaccaagacttgtgcacctgggatgattagcccaacttcttcgtgatgcaccagtaacagccgggcacagggaactcgaagtaggggtcagatacgatacgagaaatgctgggcaatgagttattgcgtgtgatccatatccatcagaatgaaacaggtatgcgaccatgtgattgtttcgatgttatttttattttttctagaactcgtaccatagcagtcattcttgaaaagtgaactttatcaccacatggttgtccatggaacctagcgatccaataatcaagattttggttaccatatgttgattctaccaactgtcaggctattccatggcaggcacgctgtgctattgtttctttttctggcgaggctttgtgtttgatacgcccagcagttatcaaataaagaaacttcctggtttagtttagtgctggtggcagactgatgccaccctgatctcctctctctggatgcttgtgggggttacattagttgttgctttggtg

SEQ ID NO: 48024 - DNA, 972 bp, Zea Mays
tatcactccctccacgcccggagtccccgtttggctgccagttcctctcagggccctgtaggctccgtccgttattcctctccgcgatcggaggcgccgggcgcgattggctgggcggctgtccgcctggccgtggctggtgaacgacgagcgtcgttggcgttggcagggtgccagaggccaaccgccagggccgcaggagtgcggccgcgcggtactcgttgcctacttctacttgtgcgagccccgttatacaaccagtggcacggaaccaactttctagacaagcacaatcagaagtagtagtagaaacgcaggttatagaagaaccagaagtagtagaaaaaccagctagcaatgcaaatggcttacaaaataggttcaggttcacttgctattgttgatgaagatatgagagactagggagaaccagaccactagtgagattgttcctgtttctgttgaccaagacttgtgcacctgggatgattagcccaacttcttcgtgatgcaccagtaacagccgggcacagggaactcgaagtaggggtcagatacgatacgagaaatgctgggcaatgagttattgcgtgtgatccatatccatcagaatgaaacaggtatgcgaccatgtgattgtttcgatgttatttttattttttctagaactcgtaccatagcagtcattcttgaaaagtgaactttatcaccacatggttgtccatggaacctagcgatccaataatcaagattttggttaccatatgttgattctaccaactgtcaggctattccatggcaggcacgctgtgctattgtttctttttctggcgaggctttgtgtttgatacgcccagcagttatcaaataaagaaacttcctggtttagtttagtgctggtggcagactgatgccaccctgatctcctctctctggatgcttgtgggggttacattagttgttgctttggtg

SEQ ID NO: 48025 - DNA, 1592 bp, Zea Mays
tatcactccctccacgcccggagtccccgtttggctgccagttcctctcagggccctgtaggctccgtccgttattcctctccgcgatcggaggcgccgggcgcgattggctgggcggctgtccgcctggccgtggctggtgaacgacgagcgtcgttggcgttggcagggtgccagaggccaaccgccagggccgcaggagtgcggccgcgcggtactcgttgcctacttctacttgtgcgagccccgctggtcatggacgccgacccaagaagaagccataccaccgtgaacctggtcttgacaaggccatggaccttcaaaagaagcctgcccttctccttcgtctgcgtgacctcattttggcacaaaagacagggtcactacttgtacgtgaccttgaaaaggaggttggctttgtccaaaaatgggattttctttcactcatcggacgccaccccaatatcttccatgtctctggtggaagtgcttcccgaaagccaatttctgttacacttacagagaaggccagaaagatatcctgtgaagatgctgacgcacgagaactaatggagccaatcttggtgagaaaccttaggaaattactgatgatgtcgatggactgccagattccaatggagaagatcgaactaatccaatttgaactgggattacctaagaacttcaagagcaacttgattccaaggtaccctgattttttttcaatccatgatgtgaagggactggaccgtttgtgtatggaacattgggattcttcactagcagtaacaatacgagaaaaaaagagttttgagggtttccagatatgctctagagggattcctaaagatggaaatgtcttgggtccttttgcttttaagttgaagtatccagcaggatttaggccaaactggaagtaccttgaggaggttgtcaggtggcagaagatggcatttccttcaccttatttgaatgttaggcgagtcgaatctgcaacaccacaggctcgaaagcgtgccattgctgttctgcatgagattttgagcctgacaatggagaggcgattgacatctgataagctagacatattttcacaatgagtacaggcttccatgcaagttacttctttgtttggtgaaaaatcatggcatcttctacatcactaacaagagagcaagaagcacagtcttccttaaggaggcttatgaaaacagtgaccttatttataagtgtcctttactgaaattccatgatcagtttgcatctttgattggccgaccgtcagacaccatgttggcaatataattggagtgtggatttacttattaggagacaaactatatttggtgcatctgttttgttgaaactcagattgttcctgtttctgttgaccaagacttgtgcacctgggatgattagcccaacttcttcgtgatgcaccagtaacagccgggcacagggaactcgaagtaggggtcagatacgatacgagaaatgctgggcaatgagttattgcgtgtgatccatatccatcagaatgaaacagtaccgaagtggctgtccacggtgcacaaggaatggcttggtgggag

SEQ ID NO: 48026 - DNA, 666 bp, Zea Mays
tatcactccctccacgcccggagtccccgtttggctgccagttcctctcagggccctgtaggctccgtccgttattcctctccgcgatcggaggcgccgggcgcgattggctgggcggctgtccgcctggccgtggctggtgaacgacgagcgtcgttggcgttggcagggtgccagaggccaaccgccagggccgcaggagtgcggccgcgcggtactcgttgcctacttctacttgtgcgagccccgttatacaaccagtggcacggaaccaactttctagacaagcacaatcagaagtagtagtagaaacgcaggttatagaagaaccagaagtagtagaaaaaccagctagcaatgcaaatggcttacaaaataggttcaggttcacttgctattgttgatgaagatatgagagactagggagaaccagaccactagtgagattgttcctgtttctgttgaccaagacttgtgcacctgggatgattagcccaacttcttcgtgatgcaccagtaacagccgggcacagggaactcgaagtaggggtcagatacgatacgagaaatgctgggcaatgagttattgcgtgtgatccatatccatcagaatgaaacagtaccgaagtggctgtccacggtgcacaaggaatggcttggtgggag

SEQ ID NO: 48027 - DNA, 3090 bp, Zea Mays
tatcactccctccacgcccggagtccccgtttggctgccagttcctctcagggccctgtaggctccgtccgttattcctctccgcgatcggaggcgccgggcgcgattggctgggcggctgtccgcctggccgtggctggtgaacgacgagcgtcgttggcgttggcagggtgccagaggccaaccgccagggccgcaggagtgcggccgcgcggtactcgttgcctacttctacttgtgcgagccccgttatacaaccagtggcacggaaccaactttctagacaagcacaatcagaagtagtagtagaaacgcaggttatagaagaaccagaagtagtagaaaaaccagctagcaatgcaaatggcttacaaaataggttcaggttcacttgctattgttgatgaagatatgagagactagggagaaccagaccactagtgagattttaaagtgcaacgtgggctgcttctttatatgcacatcttaatgcttggacctatagtgactacatagcttgtattcatttcataaatgatggaaataagattcggacgacaattatatttgattcccagaactcttccctttatgcaactgaatgctatgtcctcattctcagctggtcatggacgccgacccaagaagaagccataccaccgtgaacctggtcttgacaaggccatggaccttcaaaagaagcctgcccttctccttcgtctgcgtgacctcattttggcacaaaagacagggtcactacttgtacgtgaccttgaaaaggaggttggctttgtccaaaaatgggattttctttcactcatcggacgccaccccaatatcttccatgtctctggtggaagtgcttcccgaaagccaatttctgttacacttacagagaaggccagaaagatatcctgtgaagatgctgacgcacgagaactaatggagccaatcttggtgagaaaccttaggaaattactgatgatgtcgatggactgccagattccaatggagaagatcgaactaatccaatttgaactgggattacctaagaacttcaagagcaacttgattccaaggtaccctgattttttttcaatccatgatgtgaagggactggaccgtttgtgtatggaacattgggattcttcactagcagtaacaatacgagaaaaaaagagttttgagggtttccagatatgctctagagggattcctaaagatggaaatgtcttgggtccttttgcttttaagttgaagtatccagcaggatttaggccaaactggaagtaccttgaggaggttgtcaggtggcagaagatggcatttccttcaccttatttgaatgttaggcgagtcgaatctgcaacaccacaggctcgaaagcgtgccattgctgttctgcatgagattttgagcctgacaatggagaggcgattgacatctgataagctagacatattttcacaatgagtacaggcttccatgcaagttacttctttgtttggtgaaaaatcatggcatcttctacatcactaacaagagagcaagaagcacagtcttccttaaggaggcttatgaaaacagtgaccttatttataagtgtcctttactgaaattccatgatcagtttgcatctttgattggccgaccgtcagacaccatgttggcaatataattggagtgtggatttacttattaggagacaaactatatttggtgcatctgttttgttgaaactcagattgttcctgtttctgttgaccaagacttgtgcacctgggatgattagcccaacttcttcgtgatgcaccagtaacagccgggcacagggaactcgaagtaggggtcagatacgatacgagaaatgctgggcaatgagttattgcgtgtgatccatatccatcagaatgaaacaggtgaggtgatctctgaagaaaattctctggaatttggcactgataagatagaaatgcatgttggggctgtacaggccaacgatcgagctcttttagtcgatgatcttattgccaccagtgtacgggcactcaacttatcggtgagctcattttgtgctatatttttttactgtgttgtaggctaccacagttatctaaatgcttttttatcgttggaatacatttgagacgatggtttgattttttctgaagctgtgtatttttaaattcgtggtgacaattctcctcacaattgtagcttttagtaaacattgcactgaactgaatcttctttttgtttcaatatttattctgatattaaaaagcccgtcctgcccccacctcatttatttagcaagccctgctgctgtatatgcctttcaaggaattgtactttctcgcaatctaagtatcatttgacatctctttgctgtggtttgttgtatgaagggggattgtatccgccggtgtgcaatgttaaatagctatcacagtgattgagctctcttggaattgattattatcccatatttaagataatggttagttattcttcagaaaatgagacctctatatgcacaaatagatgtttctgttcaaaacaggtcatgttagactcataaagagtgtcacaacaactgttcctactaatgcatataaaagaaaaaccgtcccatattcccttatcttatgcataaaaactgtaataggaccatctgaaaatgtttatgtactcatgcattgcgtgtaaaaaaactctaggttctctttttttgcatttaggtggtaatgcagatgaattggtaaaccgacgtttttaaagtcaaacccgagaacctggtatgtggtaggagatataatgtcgttatttttcatgcgtgtgtgaggacatgcttccactggcataaataaagcattatgggtagacatggggactgtttaatttaatccactgcccaggtcacctaaaattagctctttttctattatggcatgttgctgtgcaggtaatatccttgtgcagtttattcatcatgaaaatgaaagaaaacacctacacacatttttgacatagtggagctatatgtttgttttactgtgtatacataaccgtttgaatgctctggtttct

SEQ ID NO: 48028 - DNA, 3566 bp, Zea Mays
gttcttcttctccacgacgacggcgttcgggatcgcgctggagctggcgctcaccaagatgtacagggagaacagccccacgacgctcatcgtgctttggtgcagggatgcttcttgaggtttggataaacaaaagaaaatggagcgtatctgggagatggataagtcattatggacacagccagctctaaagatttctgatggaaattgatacaaccttgtttctggatcttgcatgatggcagaatgatgtcacaaacctttgagcctcattagtcgaataaactcaaattatccaaacagtataagaagctgctgttccggtgggcactgtcgcctatgcactggtaagcatcagtttgaacatttcttgtttcttgtcgccgcagttctgctcatctcaaaggtgcgtcctactataaaatttcacatggataaggtgccagcctgtataatgtatacatgaaaccgggtctctgaagatagttaactacaggctgtatgccgcaagcccacaagctagcaactgaacgtcatgagacaccaaaacattgcgaatgtccattctcctagctgaaacaaaaatgcacatccagattacaatgcccttcatcatgcttttattcgtcagcttaactactctgctcatgagcacagagtaaaggtgtcagatcgaacacttcaaaggccgttagaaaaggcgttagattcagactgtttcagattcagaaaagtttcgttagagtttggtagcttgtatagtttcggtttggttacagttgcagactgttttagattcagaagataggctgaaattacagttgcctctgattaagtaattggaatgtcctgcatttttcctgtgaaatcaatgaacttagcttgcaatagtaccgtacctattgtcaatgtggggtccattcctcgcttcctggaaagagcacatgttgttgaacaccaactggctgagcagctcctgctgccttgttggctcccccgctgcttgctgatgctgcatcagcttgactgtatttttagctgacagtaaatgattttgctgttccatacttgtacgtggtcatggaggccatcactatccagtccgaacccatatagcactgggctcatggaggcaatcctcatggaaagccacatttttagcactgagtaccagtacattaccaacaactgctcagtttattttttagtaggtgtgtctcaattagcaatcaacgagttttacctgtcagagatctcattttgtccctttcaatcattccattgcattttatctccttcagtgcaaattatgatctgcccatatgcacctcttaatatcatgtgtatgaaggagatggttattgatactaatgcaaagtaataggatttttcataatgttttttcgtcaatacattctttgctttcccatattacgtatttggtgatgctttctatttttatgggtttgcaacggtatgtgccccgttacttctgagttcatcatggatgagatagctaacacttttatctaggtgaggtgatctctgaagaaaattctctggaatttggcactgataagatagaaatgcatgttggggctgtacaggccaacgatcgagctcttttagtcgatgatcttattgccaccagtgtacgggcactcaacttatcggtgagctcattttgtgctatatttttttactgtgttgtaggctaccacagttatctaaatgcttttttatcgttggaatacatttgagacgatggtttgattttttctgaagctgtgtatttttaaattcgtggtgacaattctcctcacaattgtagcttttagtaaacattgcactgaactgaatcttctttttgtttcaatatttattctgatattaaaaagcccgtcctgcccccacctcatttatttagcaagccctgctgctgtatatgcctttcaaggaattgtactttctcgcaatctaagtatcatttgacatctctttgctgtggtttgttgtatgaagggggattgtatccgccggtgtgcaatgttaaatagctatcacagtgattgagctctcttggaattgattattatcccatatttaagataatggttagttattcttcagaaaatgagacctctatatgcacaaatagatgtttctgttcaaaacaggtcatgttagactcataaagagtgtcacaacaactgttcctactaatgcatataaaagaaaaaccgtcccatattcccttatcttatgcataaaaactgtaataggaccatctgaaaatgtttatgtactcatgcattgcgtgtaaaaaaactctaggttctctttttttgcatttaggtggtaatgcagatgaattggtaaaccgacgtttttaaagtcaaacccgagaacctggtatgtggtaggagatataatgtcgttatttttcatgcgtgtgtgaggacatgcttccactggcataaataaagcattatgggtagacatggggactgtttaatttaatccactgcccaggtcacctaaaattagctctttttctattatggcatgttgctgtgcaggtaatatccttgtgcagtttattcatcatgaaaatgaaagaaaacacctacacacatttttgacatagtggagctatatgtttgttttactgtgtatacataaccgtttgaatgctctggtttcttacattcctaccagggctctgactaatttgtgttttgccgattaatgtcccactcagaggtttcttccaaactgttgctagcaggccggaaggaaaatttttttatgcggcttcattttgactctatgtatgcccatatatgcaatctaactaaaatttgaactactctggtatacaagaggaggaagaatttgtttgacgtggtgcagatcctaccagagtggggcataggatacaaggttgccaataccacctggtgtgacgtctcctgtcagatcacgaagatcaacctatacaaggatcaagttgatgaaaaggttggcgtttgttcttgagctggacttgagctatccaatgcctccttcccctttcttctctgtcaaagtccattggcaatggtgtgcagtccctcagcaggcacctgtcatcaaagcctcttacatgacaaggagagcatgtaccacttgctcaacttcatttgtgttcacaactacaaggggatgaagcagctgcaaggaaaaacatcaattacagaagcagctgcaaggacatgcgaaggttctagaggaggaaaggaataatattttcagtctccaggcaaaaaatgactgaagtcggtccatcttttcaagcactacattacattttatagcctatagagtaaatgtgatctgaaattattttgtccttactcttctatttgtatgcttattctgaaattactttgcactattggccaaatgatctacccatcacatttttggaaagagcagcgctacaagtttatgtatatgtttaatgagtactgatcagaatataaaacttcatcagggaattggtgcagttcccatttttttaaagt

SEQ ID NO: 48029 - DNA, 2467 bp, Zea Mays
ccacgacgacggcgttcgggatcgcgctggagctggcgctcaccaagatgtacagggagaacagccccacgacgctcatcgtgctttggtgcagggatgcttcttgaggtttggataaacaaaagaaaatggagcgtatctgggagatggataagtcattatggacacagccagctctaaagatttctgatggaaattgatacaaccttgtttctggatcttgcatgatggcagaatgatgtcacaaacctttgagcctcattagtcgaataaactcaaattatccaaacagtataagaagctgctgttccggtgggcactgtcgcctatgcactggtaagcatcagtttgaacatttcttgtttcttgtcgccgcagttctgctcatctcaaaggtgcgtcctactataaaatttcacatggataaggtgccagcctgtataatgtatacatgaaaccgggtctctgaagatagttaactacaggctgtatgccgcaagcccacaagctagcaactgaacgtcatgagacaccaaaacattgcgaatgtccattctcctagctgaaacaaaaatgcacatccagattacaatgcccttcatcatgcttttattcgtcagcttaactactctgctcatgagcacagagtaaaggtgtcagatcgaacacttcaaaggccgttagaaaaggcgttagattcagactgtttcagattcagaaaagtttcgttagagtttggtagcttgtatagtttcggtttggttacagttgcagactgttttagattcagaagataggctgaaattacagttgcctctgattaagtaattggaatgtcctgcatttttcctgtgaaatcaatgaacttagcttgcaatagtaccgtacctattgtcaatgtggggtccattcctcgcttcctggaaagagcacatgttgttgaacaccaactggctgagcagctcctgctgccttgttggctcccccgctgcttgctgatgctgcatcagcttgactgtatttttagctgacagtaaatgattttgctgttccatacttgtacgtggtcatggaggccatcactatccagtccgaacccatatagcactgggctcatggaggcaatcctcatggaaagccacatttttagcactgagtaccagtacattaccaacaactgctcagtttattttttagtaggtgtgtctcaattagcaatcaacgagttttacctgtcagagatctcattttgtccctttcaatcattccattgcattttatctccttcagtgcaaattatgatctgcccatatgcacctcttaatatcatgtgtatgaaggagatggttattgatactaatgcaaagtaataggatttttcataatgttttttcgtcaatacattctttgctttcccatattacgtatttggtgatgctttctatttttatgggtttgcaacggtatgtgccccgttacttctgagttcatcatggatgagatagctaacacttttatctaggtgaggtgatctctgaagaaaattctctggaatttggcactgataagatagaaatgcatgttggggctgtacaggccaacgatcgagctcttttagtcgatgatcttattgccaccagtgtacgggcactcaacttatcgaggtttcttccaaactgttgctagcaggccggaaggaaaatttttttatgcggcttcattttgactctatgtatgcccatatatgcaatctaactaaaatttgaactactctggtatacaagaggaggaagaatttgtttgacgtggtgcagatcctaccagagtggggcataggatacaaggttgccaataccacctggtgtgacgtctcctgtcagatcacgaagatcaacctatacaaggatcaagttgatgaaaaggttggcgtttgttcttgagctggacttgagctatccaatgcctccttcccctttcttctctgtcaaagtccattggcaatggtgtgcagtccctcagcaggcacctgtcatcaaagcctcttacatgacaaggagagcatgtaccacttgctcaacttcatttgtgttcacaactacaaggggatgaagcagctgcaaggaaaaacatcaattacagaagcagctgcaaggacatgcgaaggttctagaggaggaaaggaataatattttcagtctccaggcaaaaaatgactgaagtcggtccatcttttcaagcactacattacattttatagcctatagagtaaatgtgatctgaaattattttgtccttactcttctatttgtatgcttattctgaaattactttgcactattggccaaatgatctacccatcacatttttggaaagagcagcgctacaagtttatgtatatgtttaatgagtactgatcagaatataaaacttcatcagggaattggtgcagttcccatttttttaaagt

SEQ ID NO: 48030 - DNA, 2345 bp, Zea Mays
ccacgacgacggcgttcgggatcgcgctggagctggcgctcaccaagatgtacagggagaacagccccacgacgctcatcgtgctttggtgcagggatgcttcttgaggtttggataaacaaaagaaaatggagcgtatctgggagatggataagtcattatggacacagccagctctaaagatttctgatggaaattgatacaaccttgtttctggatcttgcatgatggcagaatgatgtcacaaacctttgagcctcattagtcgaataaactcaaattatccaaacagtataagaagctgctgttccggtgggcactgtcgcctatgcactggtaagcatcagtttgaacatttcttgtttcttgtcgccgcagttctgctcatctcaaaggtgcgtcctactataaaatttcacatggataaggtgccagcctgtataatgtatacatgaaaccgggtctctgaagatagttaactacaggctgtatgccgcaagcccacaagctagcaactgaacgtcatgagacaccaaaacattgcgaatgtccattctcctagctgaaacaaaaatgcacatccagattacaatgcccttcatcatgcttttattcgtcagcttaactactctgctcatgagcacagagtaaaggtgtcagatcgaacacttcaaaggccgttagaaaaggcgttagattcagactgtttcagattcagaaaagtttcgttagagtttggtagcttgtatagtttcggtttggttacagttgcagactgttttagattcagaagataggctgaaattacagttgcctctgattaagtaattggaatgtcctgcatttttcctgtgaaatcaatgaacttagcttgcaatagtaccgtacctattgtcaatgtggggtccattcctcgcttcctggaaagagcacatgttgttgaacaccaactggctgagcagctcctgctgccttgttggctcccccgctgcttgctgatgctgcatcagcttgactgtatttttagctgacagtaaatgattttgctgttccatacttgtacgtggtcatggaggccatcactatccagtccgaacccatatagcactgggctcatggaggcaatcctcatggaaagccacatttttagcactgagtaccagtacattaccaacaactgctcagtttattttttagtaggtgtgtctcaattagcaatcaacgagttttacctgtcagagatctcattttgtccctttcaatcattccattgcattttatctccttcagtgcaaattatgatctgcccatatgcacctcttaatatcatgtgtatgaaggagatggttattgatactaatgcaaagtaataggatttttcataatgttttttcgtcaatacattctttgctttcccatattacgtatttggtgatgctttctatttttatgggtttgcaacggtatgtgccccgttacttctgagttcatcatggatgagatagctaacacttttatctaggtgaggtgatctctgaagaaaattctctggaatttggcactgataagatagaaatgcatgttggggctgtacaggccaacgatcgagctcttttagtcgatgatcttattgccaccagtgtacgggcactcaacttatcgaggaggaagaatttgtttgacgtggtgcagatcctaccagagtggggcataggatacaaggttgccaataccacctggtgtgacgtctcctgtcagatcacgaagatcaacctatacaaggatcaagttgatgaaaaggttggcgtttgttcttgagctggacttgagctatccaatgcctccttcccctttcttctctgtcaaagtccattggcaatggtgtgcagtccctcagcaggcacctgtcatcaaagcctcttacatgacaaggagagcatgtaccacttgctcaacttcatttgtgttcacaactacaaggggatgaagcagctgcaaggaaaaacatcaattacagaagcagctgcaaggacatgcgaaggttctagaggaggaaaggaataatattttcagtctccaggcaaaaaatgactgaagtcggtccatcttttcaagcactacattacattttatagcctatagagtaaatgtgatctgaaattattttgtccttactcttctatttgtatgcttattctgaaattactttgcactattggccaaatgatctacccatcacatttttggaaagagcagcgctacaagtttatgtatatgtttaatgagtactgatcagaatataaaacttcatcagggaattggtgcagttcccatttttttaaagt

SEQ ID NO: 48031 - DNA, 1498 bp, Zea Mays
cggcgttcgggatcgcgctggagctggcgctcaccaagatgtacagggagaacagccccacgacgctcatcgtgctttggtgcagggatgcttcttgaggtttggataaacaaaagaaaatggagcgtatctgggagatggataagtcattatggacacagccagctctaaagatttctgatggaaattgatacaaccttgtttctggatcttgcatgatggcagaatgatgtcacaaacctttgagcctcattagtcgaataaactcaaattatccaaacagtataagaagctgctgttccggtgggcactgtcgcctatgcactggtgaggtgatctctgaagaaaattctctggaatttggcactgataagatagaaatgcatgttggggctgtacaggccaacgatcgagctcttttagtcgatgatcttattgccaccagtgtacgggcactcaacttatcggtgagctcattttgtgctatatttttttactgtgttgtaggctaccacagttatctaaatgcttttttatcgttggaatacatttgagacgatggtttgattttttctgaagctgtgtatttttaaattcgtggtgacaattctcctcacaattgtagcttttagtaaacattgcactgaactgaatcttctttttgtttcaatatttattctgatattaaaaagcccgtcctgcccccacctcatttatttagcaagccctgctgctgtatatgcctttcaaggaattgtactttctcgcaatctaagtatcatttgacatctctttgctgtggtttgttgtatgaagggggattgtatccgccggtgtgcaatgttaaatagctatcacagtgattgagctctcttggaattgattattatcccatatttaagataatggttagttattcttcagaaaatgagacctctatatgcacaaatagatgtttctgttcaaaacaggtcatgttagactcataaagagtgtcacaacaactgttcctactaatgcatataaaagaaaaaccgtcccatattcccttatcttatgcataaaaactgtaataggaccatctgaaaatgtttatgtactcatgcattgcgtgtaaaaaaactctaggttctctttttttgcatttaggtggtaatgcagatgaattggtaaaccgacgtttttaaagtcaaacccgagaacctggtatgtggtaggagatataatgtcgttatttttcatgcgtgtgtgaggacatgcttccactggcataaataaagcattatgggtagacatggggactgtttaatttaatccactgcccaggtcacctaaaattagctctttttctattatggcatgttgctgtgcaggtaatatccttgtgcagtttattcatcatgaaaatgaaagaaaacacctacacacatttttgacatagtggagctatatgtttgttttactgtgtatacataaccgtttgaatgctctggtttct

SEQ ID NO: 48032 - DNA, 1095 bp, Zea Mays
acagggagaacagccccacgacgctcatcgtgggatgcttcttgaggtttggataaacaaaagaaaatggagcgtatctgggagatggataagtcattatggacacagccagctctaaagatttctgatggaaattgatacaaccttgtttctggatcttgcatgatggcagaatgatgtcacaaacctttgagcctcattagtcgaataaactcaaattatccaaacagtataagaagctgctgttccggtgggcactgtcgcctatgcactggtgaggtgatctctgaagaaaattctctggaatttggcactgataagatagaaatgcatgttggggctgtacaggccaacgatcgagctcttttagtcgatgatcttattgccaccagtgtacgggcactcaacttatcggaggaagaatttgtttgacgtggtgcagatcctaccagagtggggcataggatacaaggttgccaataccacctggtgtgacgtctcctgtcagatcacgaagatcaacctatacaaggatcaagttgatgaaaaggttggcgtttgttcttgagctggacttgagctatccaatgcctccttcccctttcttctctgtcaaagtccattggcaatggtgtgcagtccctcagcaggcacctgtcatcaaagcctcttacatgacaaggagagcatgtaccacttgctcaacttcatttgtgttcacaactacaaggggatgaagcagctgcaaggaaaaacatcaattacagaagcagctgcaaggacatgcgaaggttctagaggaggaaaggaataatattttcagtctccaggcaaaaaatgactgaagtcggtccatcttttcaagcactacattacattttatagcctatagagtaaatgtgatctgaaattattttgtccttactcttctatttgtatgcttattctgaaattactttgcactattggccaaatgatctacccatcacatttttggaaagagcagcgctacaagtttatgtatatgtttaatgagtactgatcagaatataaaacttcatcagggaattggtgcagttcccatttttttaaagt

SEQ ID NO: 48033 - DNA, 3334 bp, Zea Mays
cacgacagaaagctaccagtgttgcaaatcgttttgtattttgggtttgtctatatatatttaagcgtatttcgtgttcaaattattagtccttctgtttttgtggtacacagttttttttctgaaaaaatatacggtgcaaacaatatcttagatgcaaacatgcagaattgcagatcaactcaaaaaccatacttcaatgccgtacggtttggagcgcaggcaggagacagaggaggaagaagatagagatactttttttacgttttcataacggtactgaacaagtttcagtgttgatatgttccacgtaaaactgatatccttgagcgaggcttacatcaaaataaatttagaagttcatatattcacagtgcatccatatacatactcacgtgaaaaagttgagatgtaagcttaaactagaaaaaatcataggaaaataacagatttcagatgcgtgtgcacgactacaagataaaaaaaaattcgtgagtttttgctacgtagtgcaaatgcatatgaaacttgttatggttgccggtctgccgctctagcctccgtcaactgcataccgcgtcgggaagcgagcagcaggggaaatgtggtcaacacttgtggggccacatcgcaatcactgggtacatcattcagagatgatgaacgactacaacaactatgcatttctgaaagaaaaaaaaaagcaaacgctaccggccggaatcggaagtacacgtgcacagcataggcgcactgcgaggccgcaccgcactgcagggaaccaatccccatggccgccgcaccctgcacgctcaacatggcctccgtccttgcgctgctgcttgtcttctccgtgcactggacggggcgcagccacgccttcagcctcatgaactacctgtgcaacaacggcagctcctacgccctcaactccacctaccgctccaacgtggtggcgctcctcgggtccctgtccgccaacgcgtccagctccgccgtaggcttcgccaccggcacgctcggccgcggcccagaccagacgtgggggctcgcgctctgccgcggcgacgtcaacggcagcgcctgcgcgtcctgcctcgcgctggcgccggacgtggccttcggcaagtgcaggggcgtcaaggacgcgtccatctactacgaccgctgccttctccggtactcggacacggacttcctggccaccccggacgacgccgcggcgtcggtgcagtacggcgccaacctgcaggtgaacgtcaccgccgatcccggacggttcgcggggctcgcggccgacctcgtgggcgcgctgtccgcctgggcggcgtggaactcgacggcgagatacgccgccggggtggtcacctccgcccaagggttcacgacgacggaccactctctggtgcacgacatctacgggctggtgcagtgcacgcccaaccaggcgcccgaggcgtgcctggcgtgcctcggcaggctcagggacgagattccggacgtgttcaacggctccaccggcggccagttcaacgcggtgtggtgcaacctgaggttcgaggtgttccttttctatgacagcagcccggtagtgaagcttgtcgcgcctccggtgacgccggctccgccgggtgcagcagtccacggcgacgcaaacaggacaaggggagcaggacatgcagcaacagtagtggccattgttttcggggtcctagttatcttcctactctccaccttcaccatctacctctggagaaaagcacaagtaaaacgatatgccgaggaagctgacgattccgggtctctgatcttcgagttggcaacactgagaagggcaaccggagatttcgccgaagagaacaagctcggacatggaggcttcggcgcggtatacaagggtttcttggctgatggccggcgaatcgccgtgaagaggctggacaaggcttcggggcaaggcctgaaagagctgaggaacgagctgctgctggtcgccaagctccggcacaacaacctggcaaagcttctgggcgtttgcgtgaagggacaggagaagctgcttgtctacgagtacatgccgaatcggagcctggacacctacctcttcgctgatgagaagcgtgcatcgctagactgggaggcaaggtaccgcatcctctacgggacagcgcggggcctgctgtacctccacgaggactcgcaggtcaggatcgtgcaccgcgacctcaaggccagcaacatcctgctcgacgccgacatgagccccaagatctccgacttcgggctggcgaggctcttcagcgccgacaacaccaccaccgtcacgagccaagttgtcggaacgctaggatacatggcgccggagtacgcggttctggggcacctgtcggtgaagcttgacgtttacagcttcggagtcctgatcctggaggtcgtaactggacggaggaacaccgacatgttcgagtcggcagccggagagtccatcatcctgctgagctacgtgtgggaccactgggtcaggggcaccgcgctggaggccgtcgacccgtccctggcctgccactgccaggcaccggaggcggaggcggaggtggtcaagtgcatccatctggggctgctctgcgtgcaggagaacccggcggaccgccccaacatgctcgacgtcctcgtcatgctccacggccactcgtcaggcttcgcggcaccgtccaagccggctttcgcctttgcctacggggagaccacgagttctgacgagcggggtatcctgtcagtgtctcgtgctgctgctgccttctctctgaacgggatgtccgcgtccgagttccagccaagatagaatggaagaattaattacaatcacggaagacacggtacaaatatagatacggttcgtggctcgtggccatttgtaatggaagtttacgtcaccaaattagcggaaaaaatttttggtgcagcccgctgcaaaacagaatgtttacagtccctcacaaaaaggaagattgactccacctgcaggtccactagataatattttagttgtgttattgctgctgcaggtgaggtcaattcttttttgtgtgagaggcagtaaacatcctggtttgcagtcggctgcaccaatttttttttccaaattatcaccactatttttccccatcgggataaagttgggaagttgtgctgttgttcacggttcactagggtatgtttgggacagtgaatggcttatgaaagttattaatagaaccttttatgaaaatggtacatacaaaacatgttttatatttttgttttgtcacgagttaacaaagaaaacaagcaaagt

SEQ ID NO: 48034 - DNA, 2090 bp, Zea Mays
atggagctcctcgttcttggaccctttgaggttctcagatccgagcttcaccaggaaggagcgccagtggagcctctcctccgcgggaaccccatggaatctgcgcaagagagacgtgtgattgtctggcctcgtcgtcctctggacgacttttcccccgtcttccacaaccccgagtccccaacccaccacggcgttgcggaatccacctgcaactgcaagcccacgaaatcgagccgagccccgacgccaccaaatcgtgtggcctcggagatcgagcagggtctggaagaaccaggggagagaccgtcagaagaggaggaccagcagcaggcaggcggtggtggcgaagtcgtcggcgtcggcggccggggtatctacgatgataacccggtcgaagctggtggagcaactgcgcgactaccagatccgatcccagcacaagtaaatcccccgcccgtctccattcccctgaacctgaaaccccaaccggtaactccgcctagtaataatggggtagtcacggtcgcggtgtgctcagatctcgtgggcctggacgcgggtggtgctagatttggttccattagtctgtggttaggttttgtgtcggaacttcagtgggtcgagttgcattagttgtagctaatggtggttttgccgattgaattctgtttctcttcgcgcatgcattgttagttcatagtgtagaactgtagctaatccaatacagtcggtggctattgatctttcttagagcagtgtttgtgctagtgattattttgtcgatcttgccgtgttctctatcgtgatatgtgatgttaacctcgggggagtattggtacttgacatgcccatactcaagcactgaactgtcaattccaccttctgccacttgacccatgaccagtgacccgctctttgcaaatgaacaggggtactcagattcaaactgtcctggtttttgcatctcataactttgcctgaacgtagcactatggcatctggtgggtttgatccctggttgataaattgtcttgactcttgacttactatttaccactgcatttttaaccacatcactataaggaacttattgtctgtgccctaagttgtacaacatgcactttcttgattatcctagagtggcaatggtaaaccttgctagcgtaccacttcatgcttcatgtcagtctggaagctgatagttctttaacatatcatacaataccgatggaaagcataaaactatttcttctctctgctagttgttacttggtagatcacacattcacacctgcttcttcaacgacctgaacatgaatctgctttctgcattctgtaggcgtgacgttatcggagctatatcatggggcttgttgtgttgttttctgataatatcatcgtacatgacgctatacttcaggcacttttggcttagtgccattattatctcactcggtattcttcttcctgctggcctgtatattttgaggcaaagaaagctggctaagaaacgagagagaagactgttgttgcctctctctgtgtaaggttgttggtaggttccttgtttttgcgcctattcctgtcttgatagaatctgcattcttaacttgctgcttgtctggcgcacatccaacattttatacatctctggaccctaatacatattcttattcttcagtgttttcctaagtgctacaggagaaatgatagttttgcgagtagataccagttgtgttgtcagctacaaaactcatttttgtaaatttgtttggtcgatgacttcagcccaaggaaacaactcaacatgtcataatacattgggcgtcgccatacacgtgtatgcagatactagttcgtacttctgatggattttgttagctgcattccatcctagctcatttgctaagtgagtttttggttaaaatgaggacactggatggttttctgtttcttgtgcccagttgatgtttgtttctgacaaggttgtatatttgatggtttgtattgtgttacggaaaaaatgtatattattggctgaatccagcttggtactgaatgaatttacgttattgccgcgcgagata

SEQ ID NO: 48035 - DNA, 1066 bp, Zea Mays
atggagctcctcgttcttggaccctttgaggttctcagatccgagcttcaccaggaaggagcgccagtggagcctctcctccgcgggaaccccatggaatctgcgcaagagagacgtgtgattgtctggcctcgtcgtcctctggacgacttttcccccgtcttccacaaccccgagtccccaacccaccacggcgttgcggaatccacctgcaactgcaagcccacgaaatcgagccgagccccgacgccaccaaatcgtgtggcctcggagatcgagcagggtctggaagaaccaggggagagaccgtcagaagaggaggaccagcagcaggcaggcggtggtggcgaagtcgtcggcgtcggcggccggggtatctacgatgataacccggtcgaagctggtggagcaactgcgcgactaccagatccgatcccagcacaagcgtgacgttatcggagctatatcatggggcttgttgtgttgttttctgataatatcatcgtacatgacgctatacttcaggcacttttggcttagtgccattattatctcactcggtattcttcttcctgctggcctgtatattttgaggcaaagaaagctggctaagaaacgagagagaagactgttgttgcctctctctgtgtaaggttgttgtgttttcctaagtgctacaggagaaatgatagttttgcgagtagataccagttgtgttgtcagctacaaaactcatttttgtaaatttgtttggtcgatgacttcagcccaaggaaacaactcaacatgtcataatacattgggcgtcgccatacacgtgtatgcagatactagttcgtacttctgatggattttgttagctgcattccatcctagctcatttgctaagtgagtttttggttaaaatgaggacactggatggttttctgtttcttgtgcccagttgatgtttgtttctgacaaggttgtatatttgatggtttgtattgtgttacggaaaaaatgtatattattggctgaatccagcttggtactgaatgaatttacgttattgccgcgcgagata

SEQ ID NO: 48036 - DNA, 785 bp, Zea Mays
atggagctcctcgttcttggaccctttgaggttctcagatccgagcttcaccaggaaggagcgccagtggagcctctcctccgcgggaaccccatggaatctgcgcaagagagacgtgtgattgtctggcctcgtcgtcctctggacgacttttcccccgtcttccacaaccccgagtccccaacccaccacggcgttgcggaatccacctgcaactgcaagcccacgaaatcgagccgagccccgacgccaccaaatcgtgtggcctcggagatcgagcagggtctggaagaaccaggggagagaccgtcagaagaggaggaccagcagcaggcaggcggtggtggcgaagtcgtcggcgtcggcggccggggtatctacgatgataacccggtcgaagctggtggagcaactgcgcgactaccagatccgatcccagcacaatgttgcagatgttctcctgtgatgtgtgatgtatcagcagggtaatacgaaggcaattccacaatgatggtcgcacaaacgaatatcgccatggacctggtcatacgatcatatacggttaagtcagataaacaagaaattatggctttggctaatgtttgcaaggaaatatagtagtttcaaagtagcagcaatggaatgtttcatctgaaaattcatcttacgttagatgggatggttgattataagtctatcgcttaaactttgggggaaatgaccgaatgtgatagtgatatattattatctcattattttatgaaccaaacaaacacaaagcgagg

SEQ ID NO: 48037 - DNA, 1286 bp, Zea Mays
atggagctcctcgttcttggaccctttgaggttctcagatccgagcttcaccaggaaggagcgccagtggagcctctcctccgcgggaaccccatggaatctgcgcaagagagacgtgtgattgtctggcctcgtcgtcctctggacgacttttcccccgtcttccacaaccccgagtccccaacccaccacggcgttgcggaatccacctgcaactgcaagcccacgaaatcgagccgagccccgacgccaccaaatcgtgtggcctcggagatcgagcagggtctggaagaaccaggggagagaccgtcagaagaggaggaccagcagcaggcaggcggtggtggcgaagtcgtcggcgtcggcggccggggtatctacgatgataacccggtcgaagctggtggagcaactgcgcgactaccagatccgatcccagcacaagcgtgacgttatcggagctatatcatggggcttgttgtgttgttttctgataatatcatcgtacatgacgctatacttcaggcacttttggcttagtgccattattatctcactcggtattcttcttcctgctggcctgtatattttgaggcaaagaaagctggctaagaaacgagagagaagactgttgttgcctctctctgtgtaaggttgttggtaggttccttgtttttgcgcctattcctgtcttgatagaatctgcattcttaacttgctgcttgtctggcgcacatccaacattttatacatctctggaccctaatacatattcttattcttcagtgttttcctaagtgctacaggagaaatgatagttttgcgagtagataccagttgtgttgtcagctacaaaactcatttttgtaaatttgtttggtcgatgacttcagcccaaggaaacaactcaacatgtcataatacattgggcgtcgccatacacgttgttgcagatgttctcctgtgatgtgtgatgtatcagcagggtaatacgaaggcaattccacaatgatggtcgcacaaacgaatatcgccatggacctggtcatacgatcatatacggttaagtcagataaacaagaaattatggctttggctaatgtttgcaaggaaatatagtagtttcaaagtagcagcaatggaatgtttcatctgaaaattcatcttacgttagatgggatggttgattataagtctatcgcttaaactttgggggaaatgaccgaatgtgatagtgatatattattatctcattattttatgaaccaaacaaacacaaagcgagg

SEQ ID NO: 48038 - DNA, 1899 bp, Zea Mays
atggagctcctcgttcttggaccctttgaggttctcagatccgagcttcaccaggaaggagcgccagtggagcctctcctccgcgggaaccccatggaatctgcgcaagagagacgtgtgattgtctggcctcgtcgtcctctggacgacttttcccccgtcttccacaaccccgagtccccaacccaccacggcgttgcggaatccacctgcaactgcaagcccacgaaatcgagccgagccccgacgccaccaaatcgtgtggcctcggagatcgagcagggtctggaagaaccaggggagagaccgtcagaagaggaggaccagcagcaggcaggcggtggtggcgaagtcgtcggcgtcggcggccggggtatctacgatgataacccggtcgaagctggtggagcaactgcgcgactaccagatccgatcccagcacaagtaaatcccccgcccgtctccattcccctgaacctgaaaccccaaccggtaactccgcctagtaataatggggtagtcacggtcgcggtgtgctcagatctcgtgggcctggacgcgggtggtgctagatttggttccattagtctgtggttaggttttgtgtcggaacttcagtgggtcgagttgcattagttgtagctaatggtggttttgccgattgaattctgtttctcttcgcgcatgcattgttagttcatagtgtagaactgtagctaatccaatacagtcggtggctattgatctttcttagagcagtgtttgtgctagtgattattttgtcgatcttgccgtgttctctatcgtgatatgtgatgttaacctcgggggagtattggtacttgacatgcccatactcaagcactgaactgtcaattccaccttctgccacttgacccatgaccagtgacccgctctttgcaaatgaacaggggtactcagattcaaactgtcctggtttttgcatctcataactttgcctgaacgtagcactatggcatctggtgggtttgatccctggttgataaattgtcttgactcttgacttactatttaccactgcatttttaaccacatcactataaggaacttattgtctgtgccctaagttgtacaacatgcactttcttgattatcctagagtggcaatggtaaaccttgctagcgtaccacttcatgcttcatgtcagtctggaagctgatagttctttaacatatcatacaataccgatggaaagcataaaactatttcttctctctgctagttgttacttggtagatcacacattcacacctgcttcttcaacgacctgaacatgaatctgctttctgcattctgtaggcgtgacgttatcggagctatatcatggggcttgttgtgttgttttctgataatatcatcgtacatgacgctatacttcaggcacttttggcttagtgccattattatctcactcggtattcttcttcctgctggcctgtatattttgaggcaaagaaagctggctaagaaacgagagagaagactgttgttgcctctctctgtgtaaggttgttgtgttgcagatgttctcctgtgatgtgtgatgtatcagcagggtaatacgaaggcaattccacaatgatggtcgcacaaacgaatatcgccatggacctggtcatacgatcatatacggttaagtcagataaacaagaaattatggctttggctaatgtttgcaaggaaatatagtagtttcaaagtagcagcaatggaatgtttcatctgaaaattcatcttacgttagatgggatggttgattataagtctatcgcttaaactttgggggaaatgaccgaatgtgatagtgatatattattatctcattattttatgaaccaaacaaacacaaagcgagg

SEQ ID NO: 48039 - DNA, 1649 bp, Zea Mays
atgtcaaatggcatttctgtccctccctcgctcacctgaattttcagtttgctcaggcaaggcaacgattagcttcctctcgccgaataaaagctgtcttcttggtctgaggagggaaaaaaatctgtgtgtgtgtcttcgcgcaaaaataatttctcagccagcagattaagcatttaatgctggtgtgttaaccaaggcgcaaactttaatcaacggggtggttgcaaatgaggcaaccgcagaggaaaagggtcgggcggatggtggcagtggcacgccgcagctacctctcccctccccatcgccgccaacgccaaggccaacagcacaaccatcgcaccacccaagaaatggagctgagtgtgccccttctcctcctcgcggctccccaagctcctgctccgcgcgcgtagccgcgcggcacctcccagtcccaacacgcccgcaagctccgctcaccgcgaggtgctgtttgaaccgtgaagatggcggcgatgactgcttacaagtatcaagctcaggccttgatgagggactatctgctagctgatccactagttccgtacacctctgtgctcattggcattgtcctctgcaagatggcttacgatttcactcgaatattgagctccttttatttcaagggctacactttactgacaaaaatacagcgcatcgaatggaacaatagcgctcatgcaatttttatcacggctgtatcattatatcttgtcatgtcaactgatcttttctccgaccgcgtcaagggacctattacattccgttattcgataatatccacctctgcgttgggggtttctgtcggctacttcatcactgatcttgcaatgatcttctggctgtatccttcccttggtggaatggaatatgtcctccaccatactgtttccctggttgcaatagcttacacaatgttgtctggggaagggcagttttacacatacatggttctcatttcagagacaaccacccctgaaatcaacttgcgatggtttcttgacactgctggactgaagaaatcaagtgcttacttggttaatggaattctgatgtttgttgcatggctggtggcaaggatatttttgttcatgtatgtattttaccacatctatttgcattacggtcagataatgcagatgcatgcctttgggtactacctgacatttgttgtgccatcagtgctctttgtaatgaacacaatgtggttcatgaagatcttaaaaggtgtgatgaaaacactggcaaaatggccatgacgtggatgacgccaagaggatctcagaactatcaacaggatttcgtctttctggcatcattacgtgaccttaatctgtgaagttatggatatcagggtaactagagaaacataatatgtaaagtattagcaaacaagctatattaggtgaaattgccctattttcagtcgagctggaagttcataaccggtttggtttgtaccggagatccagcacgctgttctgcttaccccacctgtgccatgtgtatatctgaagagaattttaatgggtggtttgttcaacagtacaatcccagtgctgtgtactccctccgtttctttttacaagtcgtttccaacagccaatctataaatatcggcgacatct

SEQ ID NO: 48040 - DNA, 2641 bp, Zea Mays
atgtcaaatggcatttctgtccctccctcgctcacctgaattttcagtttgctcaggcaaggcaacgattagcttcctctcgccgaataaaagctgtcttcttggtctgaggagggaaaaaaatctgtgtgtgtgtcttcgcgcaaaaataatttctcagccagcagattaagcatttaatgctggtgtgttaaccaaggcgcaaactttaatcaacggggtggttgcaaatgaggcaaccgcagaggaaaagggtcgggcggatggtggcagtggcacgccgcagctacctctcccctccccatcgccgccaacgccaaggccaacagcacaaccatcgcaccacccaagaaatggagctgagtgtgccccttctcctcctcgcggctccccaagctcctgctccgcgcgcgtagccgcgcggcacctcccagtcccaacacgcccgcaagctccgctcaccgcgaggtgctgtttgaaccgtgaagatggcggcgatgactgcttacaagtatcaagctcaggccttgatgagggactatctgctagctgatccactagttccgtacacctctgtgctcattggcattgtcctctgcaagatggtaggttgatttactattctggtgcccaagtaattgacttatagttcacaattgcattgagtaatcaaacttgatgtgaatgccgatccatgcttgcagcttactagtttgcccaggataattaccttcttagagattatttataacaaatggaagaccttttctactaacccaaatgagttgcatcagcttttatacccaatgatgtgaaaggctaactaccatgaattagagtgactagttgctgggttattaatacgatagtaagaagatgaactaagcatacgatattctaaatgtagtttttgtctaccatattcttggttcagttattgtattatcggtagttttgcttctaattgtaattccctaaccagcaatgttgactgaccattttgactttctcccttgcaaggcttatctatagagagaatgaactgcaaccacaatatttattaatgattccttctttaaaccattgactattgattctaatgtaacttcgtcgccaacattgtttacaaccatcagacctctcgctctcacttaagttattgtactgtggtgaattaatgctaactgtaattttctaaccaacaatgttcactgagcacttccattcttgacataaagatatactcgaacaagttctaaacaagtggtttaaatcagtttgcccaaagttgaacaatgctgagtccactatgtcctccatttcatgttatttttcaccccaagtcaaaaatgatcatgcaaattaaggatatagatgacaaacagaatgtgtggcgccagttataactcttatccaactctcactatgctttggtaacaacaaaacaagcctttagagtaatttatgtatgcgacagcatatatggcgggccttcacatttctggaccttgtgtgtcacggtaatcagttctgcattattcatagttatgcttctagtttgttgttttgacaaatggcatgctttctccttcaggcttacgatttcactcgaatattgagctccttttatttcaagggctacactttactgacaaaaatacagcgcatcgaatggaacaataggggtatgtccagcgctcatgcaatttttatcacggctgtatcattatatcttgtcatgtcaactgatcttttctccgaccgcgtcaagggacctattacattccgttattcgataatatccacctctgcgttgggggtttctgtcggctacttcatcactgatcttgcaatgatcttctggctgtatccttcccttggtggaatggaatatgtcctccaccatactgtttccctggttgcaatagcttacacaatgttgtctggggaagggcagttttacacatacatggttctcatttcagagacaaccacccctgaaatcaacttgcgatggtttcttgacactgctggactgaagaaatcaagtgcttacttggttaatggaattctgatgtttgttgcatggctggtggcaaggatatttttgttcatgtatgtattttaccacatctatttgcattacggtcagatgcatgcctttgggtactacctgacatttgttgtgccatcagtgctctttgtaatgaacacaatgtggttcatgaagatcttaaaaggtgtgatgaaaacactggcaaaatggccatgacgtggatgacgccaagaggatctcagaactatcaacaggatttcgtctttctggcatcattacgtgaccttaatctgtgaagttatggatatcagggtaactagagaaacataatatgtaaagtattagcaaacaagctatattaggtgaaattgccctattttcagtcgagctggaagttcataaccggtttggtttgtaccggagatccagcacgctgttctgcttaccccacctgtgccatgtgtatatctgaagagaattttaatgggtggtttgttcaacagtacaatcccagtgctgtgtactccctccgtttctttttacaagtcgtttccaacagccaatctataaatatcggcgacatct

SEQ ID NO: 48041 - DNA, 2576 bp, Zea Mays
atgtcaaatggcatttctgtccctccctcgctcacctgaattttcagtttgctcaggcaaggcaacgattagcttcctctcgccgaataaaagctgtcttcttggtctgaggagggaaaaaaatctgtgtgtgtgtcttcgcgcaaaaataatttctcagccagcagattaagcatttaatgctggtgtgttaaccaaggcgcaaactttaatcaacggggtggttgcaaatgaggcaaccgcagaggaaaagggtcgggcggatggtggcagtggcacgccgcagctacctctcccctccccatcgccgccaacgccaaggccaacagcacaaccatcgcaccacccaagaaatggagctgagtgtgccccttctcctcctcgcggctccccaagctcctgctccgcgcgcgtagccgcgcggcacctcccagtcccaacacgcccgcaagctccgctcaccgcgaggtgctgtttgaaccgtgaagatggcggcgatgactgcttacaagtatcaagctcaggccttgatgagggactatctgctagctgatccactagttccgtacacctctgtgctcattggcattgtcctctgcaagatggtaggttgatttactattctggtgcccaagtaattgacttatagttcacaattgcattgagtaatcaaacttgatgtgaatgccgatccatgcttgcagcttactagtttgcccaggataattaccttcttagagattatttataacaaatggaagaccttttctactaacccaaatgagttgcatcagcttttatacccaatgatgtgaaaggctaactaccatgaattagagtgactagttgctgggttattaatacgatagtaagaagatgaactaagcatacgatattctaaatgtagtttttgtctaccatattcttggttcagttattgtattatcggtagttttgcttctaattgtaattccctaaccagcaatgttgactgaccattttgactttctcccttgcaaggcttatctatagagagaatgaactgcaaccacaatatttattaatgattccttctttaaaccattgactattgattctaatgtaacttcgtcgccaacattgtttacaaccatcagacctctcgctctcacttaagttattgtactgtggtgaattaatgctaactgtaattttctaaccaacaatgttcactgagcacttccattcttgacataaagatatactcgaacaagttctaaacaagtggtttaaatcagtttgcccaaagttgaacaatgctgagtccactatgtcctccatttcatgttatttttcaccccaagtcaaaaatgatcatgcaaattaaggatatagatgacaaacagaatgtgtggcgccagttataactcttatccaactctcactatgctttggtaacaacaaaacaagcctttagagtaatttatgtatgcgacagcatatatggcgggccttcacatttctggaccttgtgtgtcacggcttacgatttcactcgaatattgagctccttttatttcaagggctacactttactgacaaaaatacagcgcatcgaatggaacaataggggtatgtccagcgctcatgcaatttttatcacggctgtatcattatatcttgtcatgtcaactgatcttttctccgaccgcgtcaagggacctattacattccgttattcgataatatccacctctgcgttgggggtttctgtcggctacttcatcactgatcttgcaatgatcttctggctgtatccttcccttggtggaatggaatatgtcctccaccatactgtttccctggttgcaatagcttacacaatgttgtctggggaagggcagttttacacatacatggttctcatttcagagacaaccacccctgaaatcaacttgcgatggtttcttgacactgctggactgaagaaatcaagtgcttacttggttaatggaattctgatgtttgttgcatggctggtggcaaggatatttttgttcatgtatgtattttaccacatctatttgcattacggtcagataatgcagatgcatgcctttgggtactacctgacatttgttgtgccatcagtgctctttgtaatgaacacaatgtggttcatgaagatcttaaaaggtgtgatgaaaacactggcaaaatggccatgacgtggatgacgccaagaggatctcagaactatcaacaggatttcgtctttctggcatcattacgtgaccttaatctgtgaagttatggatatcagggtaactagagaaacataatatgtaaagtattagcaaacaagctatattaggtgaaattgccctattttcagtcgagctggaagttcataaccggtttggtttgtaccggagatccagcacgctgttctgcttaccccacctgtgccatgtgtatatctgaagagaattttaatgggtggtttgttcaacagtacaatcccagtgctgtgtactccctccgtttctttttacaagtcgtttccaacagccaatctataaatatcggcgacatct

SEQ ID NO: 48042 - DNA, 2638 bp, Zea Mays
atgtcaaatggcatttctgtccctccctcgctcacctgaattttcagtttgctcaggcaaggcaacgattagcttcctctcgccgaataaaagctgtcttcttggtctgaggagggaaaaaaatctgtgtgtgtgtcttcgcgcaaaaataatttctcagccagcagattaagcatttaatgctggtgtgttaaccaaggcgcaaactttaatcaacggggtggttgcaaatgaggcaaccgcagaggaaaagggtcgggcggatggtggcagtggcacgccgcagctacctctcccctccccatcgccgccaacgccaaggccaacagcacaaccatcgcaccacccaagaaatggagctgagtgtgccccttctcctcctcgcggctccccaagctcctgctccgcgcgcgtagccgcgcggcacctcccagtcccaacacgcccgcaagctccgctcaccgcgaggtgctgtttgaaccgtgaagatggcggcgatgactgcttacaagtatcaagctcaggccttgatgagggactatctgctagctgatccactagttccgtacacctctgtgctcattggcattgtcctctgcaagatggtaggttgatttactattctggtgcccaagtaattgacttatagttcacaattgcattgagtaatcaaacttgatgtgaatgccgatccatgcttgcagcttactagtttgcccaggataattaccttcttagagattatttataacaaatggaagaccttttctactaacccaaatgagttgcatcagcttttatacccaatgatgtgaaaggctaactaccatgaattagagtgactagttgctgggttattaatacgatagtaagaagatgaactaagcatacgatattctaaatgtagtttttgtctaccatattcttggttcagttattgtattatcggtagttttgcttctaattgtaattccctaaccagcaatgttgactgaccattttgactttctcccttgcaaggcttatctatagagagaatgaactgcaaccacaatatttattaatgattccttctttaaaccattgactattgattctaatgtaacttcgtcgccaacattgtttacaaccatcagacctctcgctctcacttaagttattgtactgtggtgaattaatgctaactgtaattttctaaccaacaatgttcactgagcacttccattcttgacataaagatatactcgaacaagttctaaacaagtggtttaaatcagtttgcccaaagttgaacaatgctgagtccactatgtcctccatttcatgttatttttcaccccaagtcaaaaatgatcatgcaaattaaggatatagatgacaaacagaatgtgtggcgccagttataactcttatccaactctcactatgctttggtaacaacaaaacaagcctttagagtaatttatgtatgcgacagcatatatggcgggccttcacatttctggaccttgtgtgtcacggtaatcagttctgcattattcatagttatgcttctagtttgttgttttgacaaatggcatgctttctccttcaggcttacgatttcactcgaatattgagctccttttatttcaagggctacactttactgacaaaaatacagcgcatcgaatggaacaatagcgctcatgcaatttttatcacggctgtatcattatatcttgtcatgtcaactgatcttttctccgaccgcgtcaagggacctattacattccgttattcgataatatccacctctgcgttgggggtttctgtcggctacttcatcactgatcttgcaatgatcttctggctgtatccttcccttggtggaatggaatatgtcctccaccatactgtttccctggttgcaatagcttacacaatgttgtctggggaagggcagttttacacatacatggttctcatttcagagacaaccacccctgaaatcaacttgcgatggtttcttgacactgctggactgaagaaatcaagtgcttacttggttaatggaattctgatgtttgttgcatggctggtggcaaggatatttttgttcatgtatgtattttaccacatctatttgcattacggtcagataatgcagatgcatgcctttgggtactacctgacatttgttgtgccatcagtgctctttgtaatgaacacaatgtggttcatgaagatcttaaaaggtgtgatgaaaacactggcaaaatggccatgacgtggatgacgccaagaggatctcagaactatcaacaggatttcgtctttctggcatcattacgtgaccttaatctgtgaagttatggatatcagggtaactagagaaacataatatgtaaagtattagcaaacaagctatattaggtgaaattgccctattttcagtcgagctggaagttcataaccggtttggtttgtaccggagatccagcacgctgttctgcttaccccacctgtgccatgtgtatatctgaagagaattttaatgggtggtttgttcaacagtacaatcccagtgctgtgtactccctccgtttctttttacaagtcgtttccaacagccaatctataaatatcggcgacatct

SEQ ID NO: 48043 - DNA, 1336 bp, Zea Mays
ttgaacaatgctgagtccactatgtcctccatttcatgttatttttcaccccaagtcaaaaatgatcatgcaaattaaggatatagatgacaaacagaatgtgtggcgccagttataactcttatccaactctcactatgctttggtaacaacaaaacaagcctttagagtaatttatgtatgcgacagcatatatggcgggccttcacatttctggaccttgtgtgtcacggtaatcagttctgcattattcatagttatgcttctagtttgttgttttgacaaatggcatgctttctccttcaggcttacgatttcactcgaatattgagctccttttatttcaagggctacactttactgacaaaaatacagcgcatcgaatggaacaatagcgctcatgcaatttttatcacggctgtatcattatatcttgtcatgtcaactgatcttttctccgaccgcgtcaagggacctattacattccgttattcgataatatccacctctgcgttgggggtttctgtcggctacttcatcactgatcttgcaatgatcttctggctgtatccttcccttggtggaatggaatatgtcctccaccatactgtttccctggttgcaatagcttacacaatgttgtctggggaagggcagttttacacatacatggttctcatttcagagacaaccacccctgaaatcaacttgcgatggtttcttgacactgctggactgaagaaatcaagtgcttacttggttaatggaattctgatgtttgttgcatggctggtggcaaggatatttttgttcatgtatgtattttaccacatctatttgcattacgatgcatgcctttgggtactacctgacatttgttgtgccatcagtgctctttgtaatgaacacaatgtggttcatgaagatcttaaaaggtgtgatgaaaacactggcaaaatggccatgacgtggatgacgccaagaggatctcagaactatcaacaggatttcgtctttctggcatcattacgtgaccttaatctgtgaagttatggatatcagggtaactagagaaacataatatgtaaagtattagcaaacaagctatattaggtgaaattgccctattttcagtcgagctggaagttcataaccggtttggtttgtaccggagatccagcacgctgttctgcttaccccacctgtgccatgtgtatatctgaagagaattttaatgggtggtttgttcaacagtacaatcccagtgctgtgtactccctccgtttctttttacaagtcgtttccaacagccaatctataaatatcggcgacatct

SEQ ID NO: 48044 - DNA, 2015 bp, Zea Mays
gtttcggtcattgacaccagcgacctcgccgcagggcccacactacatgaccgacagctcgcgggttgtattcccggccgccagcgtagcagaagcgaggtttcctccaatcgatctgtacgccctccccaccggccggtcgcgcacctccaccaacctgctcgctccgtccgtcgccgtcgccgacccgccaccatctccgccctccaaaaccctactacccctgtagcctgcagccccgtgcccgccatggctaccaacggcagctccgtgagggttcgggacacggagagcagcctggagaaggtgaagcggcagctgtcgtcggggtccgggaggtacctgctgcaagggcccctgctcaagcgatctgagacgagggatgccaaaatacgatggctgctgcttctacattgggactcctcaaaagaaggaatactttctttgcgctgaaactcctggtgctgcaaaagcttgggtatctacattacacgcaactcagttagtcttacgagctcataaagaggcagtaaattctttggctgggaatggctctccagctacattaggcacagttgctactgcagttgctaatgctaatgcaacagccatggaggctaccaaggagatagaagctgcactaaaggtttcaatgagggcagcccttgggttgggtacaaataactccaacgatggccaacttgatgacctaacaatcatgaaggagactctacgagtgaaagatgaggaattgcaacatttggccaaggatatacgttctcgagatgctacaataaatgaaatagcagacaaactaacagaaaccgcagaggctgcagaagctgctgcttcggcagctctcacaatggatgaacagaggcgacttttgtgtttggagattgagcgactaaaacaagccttggaaagacaagtagaacaatcaatgctgaagcttagacagtccgaagagaaggtcatcagcctgagcaaagagaaggagcagttgatgaaggaaagagacgctgcgtttcaagaggctcatatgtggcgcgtcgaactaggaaaagccagggagcaagcagtgatacaggaagcaactattgcccggaccgaggagaaggcaagagtctccgaagcagatgctgcagctcggattaaggaagctgctgaaaaactgcgtactgttgagaaagaaaaggaggagcttctagccctggttggtgttctccagtcacaagtccagagagagcagagcagcacaaagcaagtgtgtggggagaggtctgagtcgtgttcaggcgccgacagcccccctcccctgacaaagcatgttgatgcatcggacgatgacgtggacaaagcctgcgtgagtgactctagatcagtgctggtgtcgagcgacagcactgaggtccagctggctgtggacggggtggacatccgtcctgtcggcgacgcagagtggggtggcttccagcagtcagatgcgctgatcgctgatgtccgtgaggtctccccagaggcagatggaggcagcttggacattcctgtggtcaaccctccaccgatcagtgatcatgttcagggaggcgcaactcatccctgaaggcctgaggttgctggcttgctgctgccttccgagattggtgtggttgctgggaaaccgatagggatgtctaaatctggagagtcgccgttgagggtgcatattgcatcgatgcgattgtatgtccattgaggtatacgattgaataaaaaggtagtaactgtgtctggctgtgggattgtaaatattcgcctcattcccttttgctacggctattcacgtgtgatattttagctcaggtggatggattgtgtgatatcctggtcaagatttaataaaattaatagagtatttatactaataagatatatcttttttaagcatgtctcgaaaaaatctctaagttaaacctctaagttaaacgtgttttggaataagtgattaatcggaaagtttaccttggaaagtt

SEQ ID NO: 48045 - DNA, 2322 bp, Zea Mays
gttgtattcccggccgccagcgtagcagaagcgaggtttcctccaatcgatctgtacgccctccccaccggccggtcgcgcacctccaccaacctgctcgctccgtccgtcgccgtcgccgacccgccaccatctccgccctccaaaaccctactacccctgtagcctgcagccccgtgcccgccatggctaccaacggcagctccgtgagggttcgggacacggagagcagcctggagaaggtgaagcggcagctgtcgtcggggtccgggaggtacctgctgcaagggcccctgctcaagcgatctgagacgttacggaaatggaatgaacgatgggtcatattggatccgacatctgggaagatggaatacaaactccggagaaatgaaactgtcattaaggggaccattctgtttgatgcctcaagcaccattactttatctcctgtgaactttcaagggatgccaaaatacgatggctgctgcttctacattgggactcctcaaaagaaggaatactttctttgcgctgaaactcctggtgctgcaaaagcttgggtatctacattacagtaagctttctgacccctgaccagttagtacattccacagttttgcttgtttcgcacttctgtctcttgtatattgataggcagagtacctagcaaacctttatctcagtgcaagaatgcagactccaatacgagagtggagtgttatccatttgagctactcaatgttgagttatatccctgttgctgcatcctgactatagttttgtgtgctttgctgctatgcgcaactcagttagtcttacgagctcataaagaggcagtaaattctttggctgggaatggctctccagctacattaggcacagttgctactgcagttgctaatgctaatgcaacagccatggaggctaccaaggagatagaagctgcactaaaggtttcaatgagggcagcccttgggttgggtacaaataactccaacgatggccaacttgatgacctaacaatcatgaaggagactctacgagtgaaagatgaggaattgcaacatttggccaaggatatacgttctcgagatgctacaataaatgaaatagcagacaaactaacagaaaccgcagaggctgcagaagctgctgcttcggcagctctcacaatggatgaacagaggcgacttttgtgtttggagattgagcgactaaaacaagccttggaaagacaagtagaacaatcaatgctgaagcttagacagtccgaagagaaggtcatcagcctgagcaaagagaaggagcagttgatgaaggaaagagacgctgcgtttcaagaggctcatatgtggcgcgtcgaactaggaaaagccagggagcaagcagtgatacaggaagcaactattgcccggaccgaggagaaggcaagagtctccgaagcagatgctgcagctcggattaaggaagctgctgaaaaactgcgtactgttgagaaagaaaaggaggagcttctagccctggttggtgttctccagtcacaagtccagagagagcagagcagcacaaagcaagtgtgtggggagaggtctgagtcgtgttcaggcgccgacagcccccctcccctgacaaagcatgttgatgcatcggacgatgacgtggacaaagcctgcgtgagtgactctagatcagtgctggtgtcgagcgacagcactgaggtccagctggctgtggacggggtggacatccgtcctgtcggcgacgcagagtggggtggcttccagcagtcagatgcgctgatcgctgatgtccgtgaggtctccccagaggcagatggaggcagcttggacattcctgtggtcaaccctccaccgatcagtgatcatgttcagggaggcgcaactcatccctgaaggcctgaggttgctggcttgctgctgccttccgagattggtgtggttgctgggaaaccgatagggatgtctaaatctggagagtcgccgttgagggtgcatattgcatcgatgcgattgtatgtccattgaggtatacgattgaataaaaaggtagtaactgtgtctggctgtgggattgtaaatattcgcctcattcccttttgctacggctattcacgtgtgatattttagctcaggtggatggattgtgtgatatcctggtcaagatttaataaaattaatagagtatttatactaataagatatatcttttttaagcatgtctcgaaaaaatctctaagttaaacctctaagttaaacgtgttttggaataagtgattaatcggaaagtttaccttggaaagtt

SEQ ID NO: 48046 - DNA, 2234 bp, Zea Mays
gaggtttcctccaatcgatctgtacgccctccccaccggccggtcgcgcacctccaccaacctgctcgctccgtccgtcgccgtcgccgacccgccaccatctccgccctccaaaaccctactacccctgtagcctgcagccccgtgcccgccatggctaccaacggcagctccgtggtacgcgcgtcaaggcctagtatgtcagcttctgtttcagattggtagtgtttttgttgatgttttttatggcggtgggggattttgcagagggttcgggacacggagagcagcctggagaaggtgaagcggcagctgtcgtcggggtccgggaggtacctgctgcaagggcccctgctcaagcgatctgagacgagggatgccaaaatacgatggctgctgcttctacattgggactcctcaaaagaaggaatactttctttgcgctgaaactcctggtgctgcaaaagcttgggtatctacattacagtaagctttctgacccctgaccagttagtacattccacagttttgcttgtttcgcacttctgtctcttgtatattgataggcagagtacctagcaaacctttatctcagtgcaagaatgcagactccaatacgagagtggagtgttatccatttgagctactcaatgttgagttatatccctgttgctgcatcctgactatagttttgtgtgctttgctgctatgcgcaactcagttagtcttacgagctcataaagaggcagtaaattctttggctgggaatggctctccagctacattaggcacagttgctactgcagttgctaatgctaatgcaacagccatggaggctaccaaggagatagaagctgcactaaaggtttcaatgagggcagcccttgggttgggtacaaataactccaacgatggccaacttgatgacctaacaatcatgaaggagactctacgagtgaaagatgaggaattgcaacatttggccaaggatatacgttctcgagatgctacaataaatgaaatagcagacaaactaacagaaaccgcagaggctgcagaagctgctgcttcggcagctctcacaatggatgaacagaggcgacttttgtgtttggagattgagcgactaaaacaagccttggaaagacaagtagaacaatcaatgctgaagcttagacagtccgaagagaaggtcatcagcctgagcaaagagaaggagcagttgatgaaggaaagagacgctgcgtttcaagaggctcatatgtggcgcgtcgaactaggaaaagccagggagcaagcagtgatacaggaagcaactattgcccggaccgaggagaaggcaagagtctccgaagcagatgctgcagctcggattaaggaagctgctgaaaaactgcgtactgttgagaaagaaaaggaggagcttctagccctggttggtgttctccagtcacaagtccagagagagcagagcagcacaaagcaagtgtgtggggagaggtctgagtcgtgttcaggcgccgacagcccccctcccctgacaaagcatgttgatgcatcggacgatgacgtggacaaagcctgcgtgagtgactctagatcagtgctggtgtcgagcgacagcactgaggtccagctggctgtggacggggtggacatccgtcctgtcggcgacgcagagtggggtggcttccagcagtcagatgcgctgatcgctgatgtccgtgaggtctccccagaggcagatggaggcagcttggacattcctgtggtcaaccctccaccgatcagtgatcatgttcagggaggcgcaactcatccctgaaggcctgaggttgctggcttgctgctgccttccgagattggtgtggttgctgggaaaccgatagggatgtctaaatctggagagtcgccgttgagggtgcatattgcatcgatgcgattgtatgtccattgaggtatacgattgaataaaaaggtagtaactgtgtctggctgtgggattgtaaatattcgcctcattcccttttgctacggctattcacgtgtgatattttagctcaggtggatggattgtgtgatatcctggtcaagatttaataaaattaatagagtatttatactaataagatatatcttttttaagcatgtctcgaaaaaatctctaagttaaacctctaagttaaacgtgttttggaataagtgattaatcggaaagtttaccttggaaagtt

SEQ ID NO: 48047 - DNA, 2267 bp, Zea Mays
gaggtttcctccaatcgatctgtacgccctccccaccggccggtcgcgcacctccaccaacctgctcgctccgtccgtcgccgtcgccgacccgccaccatctccgccctccaaaaccctactacccctgtagcctgcagccccgtgcccgccatggctaccaacggcagctccgtgagggttcgggacacggagagcagcctggagaaggtgaagcggcagctgtcgtcggggtccgggaggtacctgctgcaagggcccctgctcaagcgatctgagacgttacggaaatggaatgaacgatgggtcatattggatccgacatctgggaagatggaatacaaactccggagaaatgaaactgtcattaaggggaccattctgtttgatgcctcaagcaccattactttatctcctgtgaactttcagtaagattggatcatgaacgtaacctttacatagcatgtcgtatctaagtttttagcgttataacctataattattgctcaactttttgcagagggatgccaaaatacgatggctgctgcttctgtatcctgttttcctatattttggtcaaagagattattgtttcagaaagagtttcttaaatagttatagaggaatcacatggtttaaggttttactgttcctttactgtatttagacattgggactcctcaaaagaaggaatactttctttgcgctgaaactcctggtgctgcaaaagcttgggtatctacattacacgcaactcagttagtcttacgagctcataaagaggcagtaaattctttggctgggaatggctctccagctacattaggcacagttgctactgcagttgctaatgctaatgcaacagccatggaggctaccaaggagatagaagctgcactaaaggtttcaatgagggcagcccttgggttgggtacaaataactccaacgatggccaacttgatgacctaacaatcatgaaggagactctacgagtgaaagatgaggaattgcaacatttggccaaggatatacgttctcgagatgctacaataaatgaaatagcagacaaactaacagaaaccgcagaggctgcagaagctgctgcttcggcagctctcacaatggatgaacagaggcgacttttgtgtttggagattgagcgactaaaacaagccttggaaagacaagtagaacaatcaatgctgaagacagtccgaagagaaggtcatcagcctgagcaaagagaaggagcagttgatgaaggaaagagacgctgcgtttcaagaggctcatatgtggcgcgtcgaactaggaaaagccagggagcaagcagtgatacaggaagcaactattgcccggaccgaggagaaggcaagagtctccgaagcagatgctgcagctcggattaaggaagctgctgaaaaactgcgtactgttgagaaagaaaaggaggagcttctagccctggttggtgttctccagtcacaagtccagagagagcagagcagcacaaagcaagtgtgtggggagaggtctgagtcgtgttcaggcgccgacagcccccctcccctgacaaagcatgttgatgcatcggacgatgacgtggacaaagcctgcgtgagtgactctagatcagtgctggtgtcgagcgacagcactgaggtccagctggctgtggacggggtggacatccgtcctgtcggcgacgcagagtggggtggcttccagcagtcagatgcgctgatcgctgatgtccgtgaggtctccccagaggcagatggaggcagcttggacattcctgtggtcaaccctccaccgatcagtgatcatgttcagggaggcgcaactcatccctgaaggcctgaggttgctggcttgctgctgccttccgagattggtgtggttgctgggaaaccgatagggatgtctaaatctggagagtcgccgttgagggtgcatattgcatcgatgcgattgtatgtccattgaggtatacgattgaataaaaaggtagtaactgtgtctggctgtgggattgtaaatattcgcctcattcccttttgctacggctattcacgtgtgatattttagctcaggtggatggattgtgtgatatcctggtcaagatttaataaaattaatagagtatttatactaataagatatatcttttttaagcatgtctcgaaaaaatctctaagttaaacctctaagttaaacgtgttttggaataagtgattaatcggaaagtttaccttggaaagtt

SEQ ID NO: 48048 - DNA, 1833 bp, Zea Mays
gaggtttcctccaatcgatctgtacgccctccccaccggccggtcgcgcacctccaccaacctgctcgctccgtccgtcgccgtcgccgacccgccaccatctccgccctccaaaaccctactacccctgtagcctgcagccccgtgcccgccatggctaccaacggcagctccgtgagggttcgggacacggagagcagcctggagaaggtgaagcggcagctgtcgtcggggtccgggaggtacctgctgcaagggcccctgctcaagcgatctgagacgttacggaaatggaatgaacgatgggtcatattggatccgacatctgggaagatggaatacaaactccggagaaatgaaactgtcattaaggggaccattctgtttgatgcctcaagcaccattactttatctcctgtgaactttcaagggatgccaaaatacgatggctgctgcttctacattgggactcctcaaaagaaggaatactttctttgcgctgaaactcctggtgctgcaaaagcttgggtatctacattacagagactctacgagtgaaagatgaggaattgcaacatttggccaaggatatacgttctcgagatgctacaataaatgaaatagcagacaaactaacagaaaccgcagaggctgcagaagctgctgcttcggcagctctcacaatggatgaacagaggcgacttttgtgtttggagattgagcgactaaaacaagccttggaaagacaagtagaacaatcaatgctgaagcttagacagtccgaagagaaggtcatcagcctgagcaaagagaaggagcagttgatgaaggaaagagacgctgcgtttcaagaggctcatatgtggcgcgtcgaactaggaaaagccagggagcaagcagtgatacaggaagcaactattgcccggaccgaggagaaggcaagagtctccgaagcagatgctgcagctcggattaaggaagctgctgaaaaactgcgtactgttgagaaagaaaaggaggagcttctagccctggttggtgttctccagtcacaagtccagagagagcagagcagcacaaagcaagtgtgtggggagaggtctgagtcgtgttcaggcgccgacagcccccctcccctgacaaagcatgttgatgcatcggacgatgacgtggacaaagcctgcgtgagtgactctagatcagtgctggtgtcgagcgacagcactgaggtccagctggctgtggacggggtggacatccgtcctgtcggcgacgcagagtggggtggcttccagcagtcagatgcgctgatcgctgatgtccgtgaggtctccccagaggcagatggaggcagcttggacattcctgtggtcaaccctccaccgatcagtgatcatgttcagggaggcgcaactcatccctgaaggcctgaggttgctggcttgctgctgccttccgagattggtgtggttgctgggaaaccgatagggatgtctaaatctggagagtcgccgttgagggtgcatattgcatcgatgcgattgtatgtccattgaggtatacgattgaataaaaaggtagtaactgtgtctggctgtgggattgtaaatattcgcctcattcccttttgctacggctattcacgtgtgatattttagctcaggtggatggattgtgtgatatcctggtcaagatttaataaaattaatagagtatttatactaataagatatatcttttttaagcatgtctcgaaaaaatctctaagttaaacctctaagttaaacgtgttttggaataagtgattaatcggaaagtttaccttggaaagtt

SEQ ID NO: 48049 - DNA, 659 bp, Zea Mays
cccgtcggccgttgcgctgtcaagtgcgacggcgacggaccacgtgccatgccatgccatgccatgccgcgcacgatctcctcgcgcggagacgacgctgcctctccggtacctgatgccatgatgctctcgcaatctatcaattggattggcagatgcatgtgtcgttcactcgatcgtgacgggagctcgccgtatgaaaggctgtgtagactggcggcaggagatgcaggcatccccgggtcacgcgctcccaccaggtgcttgacggattgcgagggcacaggaagacgcacagcgcaggccagtgagagggctgtggacacatgggagttgctagctacggcctacgggtaaagtcaggttatcttgtcggcgtcacaatgcctttcacggtgggctattctacagaggaaggaggttcgacctatggttgtaacaggatcacgaaccttggtgagggtggccacgacgtttttctcccggaggcacgggtggcgatctaggcttcggatcggttatcattagatcaatgtcttttttggtttttttttagttggctatgtgcattaggcagaggtcggaagttctgtaccaaggatttgtatcctcttgatgtaatgacttggtattttcaatacaagcttcctttatctaaa

SEQ ID NO: 48050 - DNA, 1055 bp, Zea Mays
cccgtcggccgttgcgctgtcaagtgcgacggcgacggaccacgtgccatgccatgccatgccatgccgcgcacgatctcctcgcgcggagacgacgctgcctctccggtacctgatgccatgatgctctcgcaatctatcaattggattggcagatgcatgtgtcgttcactcgatcgtgacgggagctcgccgtatgaaaggctgtgtagactggcggcaggagatgcaggcatccccgggtcacgcgctcccaccaggtgcttgacggattgcgagggcacaggaagacgcacagcgcagctgagttaatgttcgaagcaactgatattcaaattaagcggttggagaactaaagggcaaagtaaatgaatgcttcacaaaagaatcctccataaaaggagaagatgaatggtgggctgtgggcaccggtgaatcagcttgagggacaagatcggacacgcagccatggcagagatttgctgtgcgagtgttggagccttcgagggggcatgtgatgtgagcggacgcggcaagttgcaacacgcatctgcgtgcgccgacgcatgtggggctcagtgtttgtacgtgagccgtctaaaggaacaggcaggggcagatggcactgtccgtttgccatgtgaccggactgttgtcgggcaagcggaggacggctgcccgcaggacgcgacggcggttttccgtgagagggctgtggacacatgggagttgctagctacggcctacgggtaaagtcaggttatcttgtcggcgtcacaatgcctttcacggtgggctattctacagaggaaggaggttcgacctatggttgtaacaggatcacgaaccttggtgagggtggccacgacgtttttctcccggaggcacgggtggcgatctaggcttcggatcggttatcattagatcaatgtcttttttggtttttttttagttggctatgtgcattaggcagaggtcggaagttctgtaccaaggatttgtatcctcttgatgtaatgacttggtattttcaatacaagcttcctttatctaaa

SEQ ID NO: 48051 - DNA, 2089 bp, Zea Mays
cccgtcggccgttgcgctgtcaagtgcgacggcgacggaccacgtgccatgccatgccatgccatgccgcgcacgatctcctcgcgcggagacgacgctgcctctccggtacctgatgccatgatgctctcgcaatctatcaattggattggcagatgcatgtgtcgttcactcgatcgtgacgggagctcgccgtatgaaaggctgtgtagactggcggcaggagatgcaggcatccccgggtcacgcgctcccaccaggtgcttgacggattgcgagggcacaggaagacgcacagcgcaggtcccagatagaaacagaattagtatgatctaagcatatcttatcagctcaatgattgtgttgtgagcacagaaagaagaccatatcatcaaaaagccatacagtactagcatctgtttgcatgaatcgtatgtacattccaagaaggcataggcatgataagaagaacatacagcaaactgacaaaaggtggaaggtatttcagcctgagaagagggctagacggtctacaggccttaggatggatgaactcttcaatacagtgtcactgatgattcgtacttcttggccgattctggctttgacatatcaccggaccgcctccggagcatctggcgcatgccgtcggccacgcggacggcggggttcaacttgaacatgttgcagaacgccatgtgagccctcacagcctcctctactccatggatggaaagatatggctcctgcgctttggactgtcccatggaatcttcctgccgtgctgactgctgagtgtcttctacttttttttcttaatcgaattagtcactgcattatggaagtatgtagagtgacagggaacattcactacaaatgtgctttaactgttgcgttttcgtgtagctgagttaatgttcgaagcaactgatattcaaattaagcggttggagaactaaagggcaaagtaaatgaatgcttcacaaaagaatcctccataaaaggagaagatgaatggtgggctgtgggcaccggtgaatcagcttgagggacaagatcggacacgcagccatggcagagatttgctgtgcgagtgttggagccttcgagggggcatgtgatgtgagcggacgcggcaagttgcaacacgcatctgcgtgcgccgacgcatgtggggctcagtgtttgtacgtgagccgtctaaaggaacaggcaggggcagatggcactgtccgtttgccatgtgaccggactgttgtcgggcaagcggaggacggctgcccgcaggacgcgacggcggttttccggtgagctgtgggccggtactacgcatgcatgcatgtgggactgctgaattgctgatgatctgcactgcacataaggctcatgaactgcccatactttctcgtcgccatggacagtagtgcctttggtctttattatgcgtgccttcgttcgtgtgctttggtgactctctcatgcttctgtggcgggtggatgcgtggaggtcacaggatcttcaggggctgcaggaaaagagggcttttgataatactgagagatgagataatgaatgtggtggccgagcctcacatggtgatggtgatccttgtccttccctggttcttccataggcgcatgagaggctgctgcatttatcatcgggggctatccgggcccgggaccggggctaggaatttatgaggttttgtcactctctagcagaccagctggccagtgagagggctgtggacacatgggagttgctagctacggcctacgggtaaagtcaggttatcttgtcggcgtcacaatgcctttcacggtgggctattctacagaggaaggaggttcgacctatggttgtaacaggatcacgaaccttggtgagggtggccacgacgtttttctcccggaggcacgggtggcgatctaggcttcggatcggttatcattagatcaatgtcttttttggtttttttttagttggctatgtgcattaggcagaggtcggaagttctgtaccaaggatttgtatcctcttgatgtaatgacttggtattttcaatacaagcttcctttatctaaa

SEQ ID NO: 48052 - DNA, 1041 bp, Zea Mays
tcgtgtctgtctcctggagccgcccgccgctagccgcccccgccacgtcacggccgcccccgcccgcccccggccccgaccccgtccgccgcggccgcccccggcctcgttctcctcctcgcaactctcttgtccatacatcgtagccgccgcctgtctctcaccgccgacatcccgacagctctcagcccagatcgagcttccccgttcccaaatcgggtcctggttgggctcccgccaccgcctccctacaccaggtgccaaggccttcgccgaccacttcgccggcgaagagcgcccaacaggtatgtgacctgtattgcgatagtggaatggatacagacaagtggtgtgatgcccaggttggccactacataggcatcgatgcctctgcatcgggtgtcaactatgcccgtgagctatgggagaacaggaggaaacctttcactgctgaattcatcgagttggatccttctgatgatggttttgaagctcaagtgcaggaaaagggcatccaagcagatatggtttgttgtatgcagcacttgcagtcatgctttgagaatgaagaacgggcaaagaagcttctgaacaatgtatcatcacttcccaaacctggaggctacttctttggcataactccagattcatctacaatatggacaaaatatcaaaagaatgttgaggctgcacataataagggtttgaagactgttccaaatagcattcgctcagagaactataccattacctttgaagtcgaggaagagaagtatgagttgaaattgtatactaaatacacctagaaacttttgttacactgacttcctgaccatgtatgagatattgtctcttattagtactagatgatgagatgtgtctttttatgactatggatgagacttttgtgatgtaattgatgagactatggatttaaatattgttatgtgattgtgtgtgagatgttttatgtgaaaatatgttgtgctatatagctgttgatatatttgttatattatggaatatggtgtaaaataaaaa

SEQ ID NO: 48053 - DNA, 1045 bp, Zea Mays
tcgtgtctgtctcctggagccgcccgccgctagccgcccccgccacgtcacggccgcccccgcccgcccccggccccgaccccgtccgccgcggccgcccccggcctcgttctcctcctcgcaactctcttgtccatacatcgtagccgccgcctgtctctcaccgccgacatcccgacagctctcagcccagatcgagcttccccgttcccaaatcgggtcctggttgggctcccgccaccgcctccctacaccaggtgccaaggccttcgccgaccacttcgccggcgaagagcgcccaacaggtatgtgacctgtattgcgatagtggaatggatacagacaagtggtgtgatgcccaggttggccactacataggcatcgatgcctctgcatcgggtgtcaactatgcccgtgagctatgggagaacaggaggaaacctttcactgctgaattcatcgagttggatccttctgatgatggttttgaagctcaagtgcaggaaaagggcatccaagcagatatggtttgttgtatgcagcacttgcagatagtcatgctttgagaatgaagaacgggcaaagaagcttctgaacaatgtatcatcacttcccaaacctggaggctacttctttggcataactccagattcatctacaatatggacaaaatatcaaaagaatgttgaggctgcacataataagggtttgaagactgttccaaatagcattcgctcagagaactataccattacctttgaagtcgaggaagagaagtatgagttgaaattgtatactaaatacacctagaaacttttgttacactgacttcctgaccatgtatgagatattgtctcttattagtactagatgatgagatgtgtctttttatgactatggatgagacttttgtgatgtaattgatgagactatggatttaaatattgttatgtgattgtgtgtgagatgttttatgtgaaaatatgttgtgctatatagctgttgatatatttgttatattatggaatatggtgtaaaataaaaa

SEQ ID NO: 48054 - DNA, 1625 bp, Zea Mays
cattccccttcacttcaccccccgccgaggggaaagtgtgatgattagcagacttgcagcttgtatctcatttataaatacacaaaccccacccagcaggccagcactcaagaaccgcaaggaggcgcctttccggcgttgcccttgtttttttcccctctccaactcgaggggttttcgatccggggggcggttcccggcgagatttttgacccggcccggtgcttggttccattgatctccgtctgctactccttcctcctacttggttgccttgccttcccggtccctgatcggagcctgtcgccggcgggcgggcgggctgagtttactgcccgttactggggggacaaagagcagaaggaacagagagtaaaaaatcttgggccttgatcggatccgaggacggggcaatgcggtaataaggagcggccatcactgccggagtttgatccatccaaggagaagaaagaggaggggaggccgcgctttcctttctttctgaagcggaggcaactcccgaggcgcccgccatgctgcgcaacagatcgagaagggcggttggtggtggtgccaaccaagcccaaggacgagcgggcggcctcatggccgagctccccgcggccgccgccgcccagtcgccgaggcatccttcgtcgtcctcctcctcctctcccgctgctgctcccgtgttcccttccccgaggccgttcgtggcgatggcggcgctgccccagggccgtcgagctgctctcctccccgatcgagttcggcgccaagaacagggacgcgcagctggcggcgctgtcgcccgccaggaggctcctgccggaggtcgtgagctcgccgtccgcccgggtgttcgccgccggcggcgtggccgtcgtgccccccggcgagatggccatgtcggaggactacacctgcgtcatctcgcgcggccccaacccgaggaccacgcacatcttcgacgactgcatcgttgagagctgcggggatttgctagccgacaagcccgcggccggcggcgcagcagctgctgcctgtggcttcttcagctcttgccatgcatgcaacaagcaacttggacatggcaatgacatcttaatctatcgaggccataaagcgttctgcagcagcgagtgccggtaccaggagacgcttttggacgaagcggtggacggagaatttgcgctaggcgatggaggaaaaggaggagggcgttgttagtggaggagaagagaagccatgaggacgatcctgaacaaccaaccaccggcaccgagacgagatttctttctttctttctttcttcttcttcttcttttctttccttttcgttctgtctcctttgcgggatctgcgtgctgttttcggtcgtcgactcgatgaggagagtggtggtgatcttattagtcttttgcggattaaagaccttttttttttggcgcccgctttcgtaagaggctgaagattggtgacctgggcctgatcttgttcatgcaacttattttcccagctggttccgatgttatgatgcgcttcgatgcttgtccatgtgactcgctcatccagtgtggaccctagcctgaagtaaattgaaagaggggaaaaaatacttgtct

SEQ ID NO: 48055 - DNA, 2381 bp, Zea Mays
ctcatctcttatattttttaatttacctctaaaacctttaagagacagactattaaatggttttatgtatgacccaatttgctctcgccttagtaaaggttccttttgcttacgaaacaaatgcatcattttatatacttcaactattttgaagtataaaaaaattagttttttttaatacaataacttaagttatgcacttagagatacattatacgcagtagtccatttctatcttgcacaatttatggaacgcatattacaggacacacaaccatatgcaggtagcatagcgacaccggtcaccgggtcacgcacgatcatcggacgacaagaagctatagatcaccgcatctctggccccgctgccgcggcgtccagcgatgtagcggcgcagcaccccctccctgtggaagccggccttctccagcactctctgcgaccgcacgttcgccacgtccgtcaccgcctccagccgttccagccccggcaggtcgtcgaacaccgtgcccaccacctgtgcgcgcggccatggaggagatccacgattacgaacaacgccatgtccaagaacgcccatgcgagctggtaatcactgtaccatcctgacggcggcggcggcgatgccccggccccactggtcgtgcgcgagggcgtagccgaggttggccctgcgaccgccctcgtcggcgtacggccacacggacacctgccccacgggcacgtcgccgaagcagacggcgcggaaccacgggtggcccagcacggtgtccctgatctgcgccacggcctgctctcgggtggcgcagagcggccgcttcaggtgccgcatcacgcggtcgtccgacgcccacgccatgaaggcgtccgcgtccgccaggcccagcgcccggagcgacaccaccggcgcgtggtgtcctccgtcccgtcgctgcccgtgcacgtcgtcgccgtcggcggccggctccatcgccgtgtgatgatcgactctggctgagcttagctttgccgcccggccccaggcaggcgtgcgcgtgcgcatcgataggtgcgactttgacgtgtcgcggccaattggtcggtcattcggataagaacgcgacagcacgagtaattaacaatgctgcgcgcgctactggattatcttgtctcgcagttctttcgactttcagttcgttcatacggtgtggtacggctgttcatttttacgtgacgtatgcgcagcagcggaagtctagcaatatcatagtatcgcagcgcagcccatcatgtacggcccattgggctggttctgctgcttgccgacggtccatccctacagccagccagccagggcaaaccggcaaaaccccaacgcaggagcaacacagcgtcgccggcggcgatggatcccctctccgtgctccgcgactacgctggccgcaacgagctggacaagatcatcttctccggcgacgagatccacttcggctctgactacaccttcccggcttccacccccaccgccttcgcctccaagcagtcaggtcgcccctacccgctctccgctgccgtcttcctcgcgcagcaccacgacctcaagcacaccgacttcatccaggccgcgcgcctccgccgcatcccgcccgtatcgctccccgaccgcaagaccttcctcgacttcctccgcttcggccacaactccctcccctccgccgacccgctcctcccctccgccttccagccgcaggagccccacctccatccgccctcgcctccgccggaggaccccgcagctaccgaagaggccaccacgggaaagcaaatccgcgcgctcgagcggcccttcaaggaccgcaactcaatcctcgacgcccgcggccgcgactttctcgccgtcttccatgccgccgtgcgccgccaggacgagcagctcaagggcggcggcaaggatgcggcgccctcttcccgccccaactctggctccgtcgctgcagccctggccaagcccaaggtgctggacaggtccctgggcgacggcgtcgtgcccatcatccttgtgcccagcgcctcgcagacgctgattacgatctataacgtcaaggagttcctcgaggacggggtgttcgtgcccagcgaggagaggatgcgggcgaccaagggagggaagccggagagcgtcacggtgcagaagaagctgattcgtacggagagagctggcggcgctgggggtgccgtctccttcgaggttagggacaagccggcttcgctcaagtcagacgattgggggcgggtggtggccgtgtttgtgctcggcaaggagtggcagttcaaagactggcccttcaaggaccatgtagagatcttcaacagaggtcgaagcagcaagcatcggttcaaca

SEQ ID NO: 48056 - DNA, 1409 bp, Zea Mays
cagcagcggaagtctagcaatatcatagtatcgcagcgcagcccatcatgtacggcccattgggctggttctgctgcttgccgacggtccatccctacagccagccagccagggcaaaccggcaaaaccccaacgcaggagcaacacagcgtcgccggcggcgatggatcccctctccgtgctccgcgactacgctggccgcaacgagctggacaagatcatcttctccggcgacgagatccacttcggctctgactacaccttcccggcttccacccccaccgccttcgcctccaagcagtcaggtcgcccctacccgctctccgctgccgtcttcctcgcgcagcaccacgacctcaagcacaccgacttcatccaggccgcgcgcctccgccgcatcccgcccgtatcgctccccgaccgcaagaccttcctcgacttcctccgcttcggccacaactccctcccctccgccgacccgctcctcccctccgccttccagccgcaggagccccacctccatccgccctcgcctccgccggaggaccccgcagctaccgaagaggccaccacgggaaagcaaatccgcgcgctcgagcggcccttcaaggaccgcaactcaatcctcgacgcccgcggccgcgactttctcgccgtcttccatgccgccgtgcgccgccaggacgagcagctcaagggcggcggcaaggatgcggcgccctcttcccgccccaactctggctccgtcgctgcagccctggccaagcccaaggtgctggacaggtccctgggcgacggcgtcgtgcccatcatccttgtgcccagcgcctcgcagacgctgattacgatctataacgtcaaggagttcctcgaggacggggtgttcgtgcccagcgaggagaggatgcgggcgaccaagggagggaagccggagagcgtcacggtgcagaagaagctgattcgtacggagagagctggcggcgctgggggtgccgtctccttcgaggttagggacaagccggcttcgctcaagtcagacgattgggggcgggtggtggccgtgtttgtgctcggcaaggagtggcagttcaaagactggcccttcaaggaccatgtagagatcttcaacagagttattggtttctatgtgcgctttgaagatgatagtgtggaagcagccaaggtggtgaaacagtggaatgtgaaaatcatatctataagcaaaaataaaaggcatcaagacagaacagctgctcttgaagtatgggagcgcttggaggaatttatgcgggcacggacataattgatgtgcagtcatattctgtacaatggaaacgtttttattgtagctgctcaacagtagggtgcagtttgaactcataaataacgttacaacagcgcatttggtg

SEQ ID NO: 48057 - DNA, 1260 bp, Zea Mays
atcatgtacggcccattgggctggttctgctgcttgccgacggtccatccctacagccagccagccagggcaaaccggcaaaaccccaacgcaggagcaacacagcgtcgccggcggcgatggatcccctctccgtgctccgcgactacgctggccgcaacgagctggacaagatcatcttctccggcgacgagatccacttcggctctgactacaccttcccggcttccacccccaccgccttcgcctccaagcagtcaggtcgcccctacccgctctccgctgccgtcttcctcgcgcagcaccacgacctcaagcacaccgacttcatccaggccgcgcgcctccgccgcatcccgcccgtatcgctccccgaccgcaagaccttcctcgacttcctccgcttcggccacaactccctcccctccgccgacccgctcctcccctccgccttccagccgcaggagccccacctccatccgccctcgcctccgccggaggaccccgcagctaccgaagaggccaccacgggaaagcaaatccgcgcgctcgagcggcccttcaaggaccgcaactcaatcctcgacgcccgcggccgcgactttctcgccgtcttccatgccgccgtgcgccgccaggacgagcagctcaagggcggcggcaaggatgcggcgccctcttcccgccccaactctggctccgtcgctgcagccctggccaagcccaaggtgctggacaggtccctgggcgacggcgtcgtgcccatcatccttgtgcccagcgcctcgcagacgctgattacgatctataacgtcaaggagttcctcgaggacggggtgttcgtgcccagcgaggagaggatgcgggcgaccaagggagggaagccggagagcgtcacggtgcagaagaagctgattcgtacggagagagctggcggcgctgggggtgccgtctccttcgaggttagggacaagccggcttcgctcaagtcagacgattgggggcgggtggtggccgtgtttgtgctcggcaaggagtggcagttcaaagactggcccttcaaggaccatgtagagatcttcaacagagaagaatagtaccatgcattggacacgctttttggtcggagtcggagtgaatcgtctctctctgcctacgaagctacggtctttctcttcaccttcgcattattgaacgtaaagcgaaggtatttttgtaatcatttgttatactgtaaggaatgaagcaaagtaataaaat

SEQ ID NO: 48058 - DNA, 1095 bp, Zea Mays
ggttctgctgcttgccgacggtccatccctacagccagccagccagggcaaaccggcaaaaccccaacgcaggagcaacacagcgtcgccggcggcgatggatcccctctccgtgctccgcgactacgctggccgcaacgagctggacaagatcatcttctccggcgacgagatccacttcggctctgactacaccttcccggcttccacccccaccgccttcgcctccaagcagtcaggtcgcccctacccgctctccgctgccgtcttcctcgcgcagcaccacgacctcaagcacaccgacttcatccaggccgcgcgcctccgccgcatcccgcccgtatcgctccccgaccgcaagaccttcctcgacttcctccgcttcggccacaactccctcccctccgccgacccgctcctcccctccgccttccagccgcaggagccccacctccatccgccctcgcctccgccggaggaccccgcagctaccgaagaggccaccacgggaaagcaaatccgcgcgctcgagcggcccttcaaggaccgcaactcaatcctcgacgcccgcggccgcgactttctcgccgtcttccatgccgccgtgcgccgccaggacgagcagctcaagggcggcggcaaggatgcggcgccctcttcccgccccaactctggctccgtcgctgcagccctggccaagcccaaggtgctggacaggtccctgggcgacggcgtcgtgcccatcatccttgtgcccagcgcctcgcagacgctgattacgatctataacgtcaaggagttcctcgaggacggggtgttcgtgcccagcgaggagaggatgcgggcgaccaagggagggaagccggagagcgtcacggtgcagaagaagctgattcgtacggagagagctggcggcgctgggggtgccgtctccttcgaggttagggacaagccggcttcgctcaagtcagacgattgggggcgggtggtggccgtgtttgtgctcggcaaggagtggcagttcaaagactggcccttcaaggaccatgtagagatcttcaacagaggggatgatgtgtggctgtcgtggttaca

SEQ ID NO: 48059 - DNA, 1270 bp, Zea Mays
gctgcttgccgacggtccatccctacagccagccagccagggcaaaccggcaaaaccccaacgcaggagcaacacagcgtcgccggcggcgatggatcccctctccgtgctccgcgactacgctggccgcaacgagctggacaagatcatcttctccggcgacgagatccacttcggctctgactacaccttcccggcttccacccccaccgccttcgcctccaagcagtcaggtcgcccctacccgctctccgctgccgtcttcctcgcgcagcaccacgacctcaagcacaccgacttcatccaggccgcgcgcctccgccgcatcccgcccgtatcgctccccgaccgcaagaccttcctcgacttcctccgcttcggccacaactccctcccctccgccgacccgctcctcccctccgccttccagccgcaggagccccacctccatccgccctcgcctccgccggaggaccccgcagctaccgaagaggccaccacgggaaagcaaatccgcgcgctcgagcggcccttcaaggaccgcaactcaatcctcgacgcccgcggccgcgactttctcgccgtcttccatgccgccgtgcgccgccaggacgagcagctcaagggcggcggcaaggatgcggcgccctcttcccgccccaactctggctccgtcgctgcagccctggccaagcccaaggtgctggacaggtccctgggcgacggcgtcgtgcccatcatccttgtgcccagcgcctcgcagacgctgattacgatctataacgtcaaggagttcctcgaggacggggtgttcgtgcccagcgaggagaggatgcgggcgaccaagggagggaagccggagagcgtcacggtgcagaagaagctgattcgtacggagagagctggcggcgctgggggtgccgtctccttcgaggttagggacaagccggcttcgctcaagtcagacgattgggggcgggtggtggccgtgtttgtgctcggcaaggagtggcagttcaaagactggcccttcaaggaccatgtagagatcttcaacagagttattggtttctatgtgcgctttgaagatgatagtgtggaagcagccaaggtggtgaaacagtggaatgtgaaaatcatatctataagcaaaaataaaaggcatcaagacagaacagctgctcttgaagtatgggagcgcttggaggaatttatgcgggcacggacataattgatgtgcagtcattaacacatcatatttctgtcaaat

SEQ ID NO: 48060 - DNA, 1259 bp, Zea Mays
cgacggtccatccctacagccagccagccagggcaaaccggcaaaaccccaacgcaggagcaacacagcgtcgccggcggcgatggatcccctctccgtgctccgcgactacgctggccgcaacgagctggacaagatcatcttctccggcgacgagatccacttcggctctgactacaccttcccggcttccacccccaccgccttcgcctccaagcagtcaggtcgcccctacccgctctccgctgccgtcttcctcgcgcagcaccacgacctcaagcacaccgacttcatccaggccgcgcgcctccgccgcatcccgcccgtatcgctccccgaccgcaagaccttcctcgacttcctccgcttcggccacaactccctcccctccgccgacccgctcctcccctccgccttccagccgcaggagccccacctccatccgccctcgcctccgccggaggaccccgcagctaccgaagaggccaccacgggaaagcaaatccgcgcgctcgagcggcccttcaaggaccgcaactcaatcctcgacgcccgcggccgcgactttctcgccgtcttccatgccgccgtgcgccgccaggacgagcagctcaagggcggcggcaaggatgcggcgccctcttcccgccccaactctggctccgtcgctgcagccctggccaagcccaaggtgctggacaggtccctgggcgacggcgtcgtgcccatcatccttgtgcccagcgcctcgcagacgctgattacgatctataacgtcaaggagttcctcgaggacggggtgttcgtgcccagcgaggagaggatgcgggcgaccaagggagggaagccggagagcgtcacggtgcagaagaagctgattcgtacggagagagctggcggcgctgggggtgccgtctccttcgaggttagggacaagccggcttcgctcaagtcagacgattgggggcgggtggtggccgtgtttgtgctcggcaaggagtggcagttcaaagactggcccttcaaggaccatgtagagatcttcaacagagttattggtttctatgtgcgctttgaagatgatagtgtggaagcagccaaggtggtgaaacagtggaatgtgaaaatcatatctataagcaaaaataaaaggcatcaagacagaacagctgctcttgaagtatgggagcgcttggaggaatttatgcgggcacggacataattgatgtgcagtcataatgcttttttttttcttaaag

SEQ ID NO: 48061 - DNA, 602 bp, Zea Mays
gacacggcatgcacgctgttcaggtggtcatttcgccgccgagcatgaacagagcgcggctgccatggacatggtcagtctctggcaaaggttacgggtttgctcgctgtacaacaagccgccatttcattccgactagtaagaaaaatattttcatggcgcggctctggctgctcttgttacattactattgctacatcaggacgccaaaaagaagaaaaaaaacaaacagaaaggtgaaaccaggacggccttcttccaaggtggtgcctgggacacaaaacactcccttttttctctctcccgaaaaccgggactcgacgtttacattcaaaactgcgcaaaaaaaaaaaaaaaactgtccattcatggtacttaattggtaaagagatcctctacttgtttgaaaatctaacctagcactgatggtctttgccgttcagcggatcatacctaatcttacagtcagaaagcacctcctcgaatatctatctgttagctagtacaaaacatgccgaccgatggaaccttgggagaaatgaacttcacccagccagagccagccatcagaaggtgaaccctgcagcgaacaccaccacatg

SEQ ID NO: 48062 - DNA, 498 bp, Zea Mays
cgctgtacaacaagccgccatttcattccgactagtaagaaaaatattttcatggcgcggctctggctgctcttgttacattactattgctacatcaggacgccaaaaagaagaaaaaaaacaaacagaaaggtgaaaccaggacggccttcttccaaggtggtgcctgggacacaaaacactcccttttttctctctcccgaaaaccgggactcgacgtttacattcaaaactgcgcaaaaaaaaaaaaaaaactgtccattcatggtacttaattggtaaagagatcctctacttgtttgaaaatctaacctagcactgatggtctttgccgttcagcggatcatacctaatcttacagtcagaaagcacctcctcgaatatccacctgttagctagtacaaaacatgccgaccgatggaaccttgggagaaatgaacttcacccagccagagccagccatcagaaggtgaaccctgcagcgaacaccaccacatg

SEQ ID NO: 48063 - DNA, 1702 bp, Zea Mays
gtgcgtctctcttctttcgctctgtctaccgcgcgcgcccgccgctacctgccagtcgcgcgcctgccgccagcgccccgccgccaccccacgcgcgccccaccgcccccgcgcgccggctcgtgtactccgctgtccgctcccattccactatggcctagctgcgtgctgctctggcatcggtcggtggataagcccagcaggcaagcaggcaggagactaggagagctcagcactgcacgcacgctcccctccccttactggccaaatcgatcgtccccttcaggttccaggctccggagcttgctttacttcagggacaacaatgacctcagggacaacaatgacctccaagacgagcggcagcataaccaccaacctgagcaccacggggaagctctcctccgtgggcagcagcttcatggcgtctgccggcagccgcagcaccagcggcggggtttgacaagggggccaagtactccgacgaccagatcctcgaggcgcccaacctccgcaccttcacattcatagagctcaagacggccaccaagaacttccgtccagacagcgtcctcggcgaaggagggttcgggagagtctacaaagggtgggtggatgagaagaccatggcgccgaccaagaacgacaccggcatggttgttgcggtcaagaagctcaactcggagagcatgcatgggtttgaggaatggcagggttgcaattttcagagatcgtgagtcagagcgcaaggatcctgattatgacagaagctatgacagatcaatcgagttgagtttgttcattccaagtcattattgcatagagatatcaagcctgataattttctcatgggtctcgggaaaagagaaaaccaggtttatgttatcgattttggacttgcaaagaagtacagagatacatcaacacaccagcacattccatacagaacaaagccggagggatgacatggaataaaaaacaaaagtattcgggaaggttggtttaatacactgtcagccttccatggtagggcctgaaagctgggaacaaaaaacaaaagtatgaaaagatcagcgaaaggaaaattgctacttcaactgaggctctctgccgtggatatcctaccaaatttgcttcttacttccattactgtcgctcacagcgtttcgaagatgcaccggactatcagtacctgaagaatttgttcagagacctttttattcgggaaggacatattgctaagaatctgccacattatgtttgcttgaggtattaatttatccaggtgtttaatgctggagtacagttagaagatccctaatcaattgcttctcatttcagtcgtgtaactttattcatgctacaacaacgactttgagcgaacatgagaccactgagctctagagtgaatgaaggacgtcgtctttggaagtcagacatcacctagagctagggtgtccattcttgacatgtttctcttagtgataggtggatactgtctagttaggaacagagtcttgagggattgatggacgcatgcatcttcaattcctgtgtgttgtattactactggtacaatctccaattcttgtgaacttatgtatttggacttgtgtgaatttgtgatatgaacatatatccatgtgtttgaaatctatattgtatgtgatattttgtgttgcatgtgatattatgtttgtct

SEQ ID NO: 48064 - DNA, 2074 bp, Zea Mays
tgcgtctctcttctttcgctctgtctaccgcgcgcgcccgccgctacctgccagtcgcgcgcctgccgccagcgccccgccgccaccccacgcgcgccccaccgcccccgcgcgccggctcgtgtactccgctgtccgctcccattccactatggcctagctgcgtgctgctctggcatcggtcggtggataagcccagcaggcaagcaggcaggagactaggagagctcagcactgcacgcacgctcccctccccttactggccaaatcgatcgtccccttcaggttccaggctccggagcttgctttacttcagggacaacaatgacctcagggacaacaatgacctccaagacgagcggcagcataaccaccaacctgagcaccacggggaagctctcctccgtgggcagcagcttcatggcgtctgccggcagccgcagcaccagcggcggggtttgacaagggggccaagtactccgacgaccagatcctcgaggcgcccaacctccgcaccttcacattcatagagctcaagacggccaccaagaacttccgtccagacagcgtcctcggcgaaggagggttcgggagagtctacaaagggtgggtggatgagaagaccatggcgccgaccaagaacgacaccggcatggttgttgcggtcaagaagctcaactcggagagcatgcatgggtttgaggaatggcagagatcgtgagtcagagcgcaaggatcctgattatgacagaagctatgacagatcaatcgagttgagtttgttcattccaagtcattattgcatagagatatcaagcctgataattttctcatgggtctcgggaaaagagaaaaccaggtttatgttatcgattttggacttgcaaagaagtacagagatacatcaacacaccagcacattccatacagaacaaagccggagggatgacatggaataaaaaacaaaagtattcgggaaggttggtttaatacactgtcagccttccatggtagggcctgaaagctgggaacaaaaaacaaaagtatgaaaagatcagcgaaaggaaaattgctacttcaactgaggctctctgccgtggatatcctaccaaatttgcttcttacttccattactgtcgctcacagcgtttcgaagatgcaccggactatcagtacctgaagaatttgttcagagacctttttattcgggaaggttttcagtttgattatgtttttgactggaccattctaaagtaccaacaggcatagatgaccactgcaccacctcgtgcaattgtctgtacaaggaataaacttaccctcctaccttaagtagtagtagagattgtattgggtatagaaatgtacttcttttgttatgttatatttcattgccccctctctattttggttcctggccttggtttttgtttcttgtattttttttccatgtcgtctagctactgtagttgcccatcgtcaaagttttgtagagtggttagtgtttttggttgacagacattggtgctagatttgggatcagccttcctaaacagtaccatttactttagctcaatgatatgaataatgcttgtttgcaggacatattgctaagaatctgccacattatgtttgcttgaggtattaatttatccaggtgtttaatgctggagtacagttagaagatccctaatcaattgcttctcatttcagtcgtgtaactttattcatgctacaacaacgactttgagcgaacatgagaccactgagctctagagtgaatgaaggacgtcgtctttggaagtcagacatcacctagagctagggtgtccattcttgacatgtttctcttagtgataggtggatactgtctagttaggaacagagtcttgagggattgatggacgcatgcatcttcaattcctgtgtgttgtattactactggtacaatctccaattcttgtgaacttatgtatttggacttgtgtgaatttgtgatatgaacatatatccatgtgtttgaaatctatattgtatgtgatattttgtgttgcatgtgatattatgtttgtct

SEQ ID NO: 48065 - DNA, 2087 bp, Zea Mays
cgtctctcttctttcgctctgtctaccgcgcgcgcccgccgctacctgccagtcgcgcgcctgccgccagcgccccgccgccaccccacgcgcgccccaccgcccccgcgcgccggctcgtgtactccgctgtccgctcccattccactatggcctagctgcgtgctgctctggcatcggtcggtggataagcccagcaggcaagcaggcaggagactaggagagctcagcactgcacgcacgctcccctccccttactggccaaatcgatcgtccccttcaggttccaggctccggagcttgctttacttcagggacaacaatgacctcagggacaacaatgacctccaagacgagcggcagcataaccaccaacctgagcaccacggggaagctctcctccgtgggcagcagcttcatggcgtctgccggcagccgcagcaccagcggcggggtttgacaagggggccaagtactccgacgaccagatcctcgaggcgcccaacctccgcaccttcacattcatagagctcaagacggccaccaagaacttccgtccagacagcgtcctcggcgaaggagggttcgggagagtctacaaagggtgggtggatgagaagaccatggcgccgaccaagaacgacaccggcatggttgttgcggtcaagaagctcaactcggagagcatgcatgggtttgaggaatggcagggttgcaattttcagagatcgtgagtcagagcgcaaggatcctgattatgacagaagctatgacagatcaatcgagttgagtttgttcattccaagtcattattgcatagagatatcaagcctgataattttctcatgggtctcgggaaaagagaaaaccaggtttatgttatcgattttggacttgcaaagaagtacagagatacatcaacacaccagcacattccatacagaacaaagccggagggatgacatggaataaaaaacaaaagtattcgggaaggttggtttaatacactgtcagccttccatggtagggcctgaaagctgggaacaaaaaacaaaagtatgaaaagatcagcgaaaggaaaattgctacttcaactgaggctctctgccgtggatatcctaccaaatttgcttcttacttccattactgtcgctcacagcgtttcgaagatgcaccggactatcagtacctgaagaatttgttcagagacctttttattcgggaaggttttcagtttgattatgtttttgactggaccattctaaagtaccaacaggcatagatgaccactgcaccacctcgtgcaattgtctgtacaaggaataaacttaccctcctaccttaagtagtagtagagattgtattgggtatagaaatgtacttcttttgttatgttatatttcattgccccctctctattttggttcctggccttggtttttgtttcttgtattttttttccatgtcgtctagctactgtagttgcccatcgtcaaagttttgtagagtggttagtgtttttggttgacagacattggtgctagatttgggatcagccttcctaaacagtaccatttactttagctcaatgatatgaataatgcttgtttgcaggacatattgctaagaatctgccacattatgtttgcttgaggtattaatttatccaggtgtttaatgctggagtacagttagaagatccctaatcaattgcttctcatttcagtcgtgtaactttattcatgctacaacaacgactttgagcgaacatgagaccactgagctctagagtgaatgaaggacgtcgtctttggaagtcagacatcacctagagctagggtgtccattcttgacatgtttctcttagtgataggtggatactgtctagttaggaacagagtcttgagggattgatggacgcatgcatcttcaattcctgtgtgttgtattactactggtacaatctccaattcttgtgaacttatgtatttggacttgtgtgaatttgtgatatgaacatatatccatgtgtttgaaatctatattgtatgtgatattttgtgttgcatgtgatattatgtttgtct

SEQ ID NO: 48066 - DNA, 2159 bp, Zea Mays
ctctcttctttcgctctgtctaccgcgcgcgcccgccgctacctgccagtcgcgcgcctgccgccagcgccccgccgccaccccacgcgcgccccaccgcccccgcgcgccggctcgtgtactccgctgtccgctcccattccactatggcctagctgcgtgctgctctggcatcggtcggtggataagcccagcaggcaagcaggcaggagactaggagagctcagcactgcacgcacgctcccctccccttactggccaaatcgatcgtccccttcaggttccaggctccggagcttgctttacttcagggacaacaatgacctcagggacaacaatgacctccaagacgagcggcagcataaccaccaacctgagcaccacggggaagctctcctccgtgggcagcagcttcatggcgtctgccggcagccgcagcaccagcggcggggtttgacaagggggccaagtactccgacgaccagatcctcgaggcgcccaacctccgcaccttcacattcatagagctcaagacggccaccaagaacttccgtccagacagcgtcctcggcgaaggagggttcgggagagtctacaaagggtgggtggatgagaagaccatggcgccgaccaagaacgacaccggcatggttgttgcggtcaagaagctcaactcggagagcatgcatgggtttgaggaatggcagagatcgtgagtcagagcgcaaggatcctgattatgacagaagctatgacagggtttccaggccagttatacatggtcatataccaccccgcgtgccccgcgccgccagcccgcgcctccaccccgtgcgatctctgtttagatcaatcgagttgagtttgttcattccaagtcattattgcatagagatatcaagcctgataattttctcatgggtctcgggaaaagagaaaaccaggtttatgttatcgattttggacttgcaaagaagtacagagatacatcaacacaccagcacattccatacagaacaaagccggagggatgacatggaataaaaaacaaaagtattcgggaaggttggtttaatacactgtcagccttccatggtagggcctgaaagctgggaacaaaaaacaaaagtatgaaaagatcagcgaaaggaaaattgctacttcaactgaggctctctgccgtggatatcctaccaaatttgcttcttacttccattactgtcgctcacagcgtttcgaagatgcaccggactatcagtacctgaagaatttgttcagagacctttttattcgggaaggttttcagtttgattatgtttttgactggaccattctaaagtaccaacaggcatagatgaccactgcaccacctcgtgcaattgtctgtacaaggaataaacttaccctcctaccttaagtagtagtagagattgtattgggtatagaaatgtacttcttttgttatgttatatttcattgccccctctctattttggttcctggccttggtttttgtttcttgtattttttttccatgtcgtctagctactgtagttgcccatcgtcaaagttttgtagagtggttagtgtttttggttgacagacattggtgctagatttgggatcagccttcctaaacagtaccatttactttagctcaatgatatgaataatgcttgtttgcaggacatattgctaagaatctgccacattatgtttgcttgaggtattaatttatccaggtgtttaatgctggagtacagttagaagatccctaatcaattgcttctcatttcagtcgtgtaactttattcatgctacaacaacgactttgagcgaacatgagaccactgagctctagagtgaatgaaggacgtcgtctttggaagtcagacatcacctagagctagggtgtccattcttgacatgtttctcttagtgataggtggatactgtctagttaggaacagagtcttgagggattgatggacgcatgcatcttcaattcctgtgtgttgtattactactggtacaatctccaattcttgtgaacttatgtatttggacttgtgtgaatttgtgatatgaacatatatccatgtgtttgaaatctatattgtatgtgatattttgtgttgcatgtgatattatgtttgtct

SEQ ID NO: 48067 - DNA, 1659 bp, Zea Mays
ccgcgcgcgcccgccgctacctgccagtcgcgcgcctgccgccagcgccccgccgccaccccacgcgcgccccaccgcccccgcgcgccggctcgtgtactccgctgtccgctcccattccactatggcctagctgcgtgctgctctggcatcggtcggtggataagcccagcaggcaagcaggcaggagactaggagagctcagcactgcacgcacgctcccctccccttactggccaaatcgatcgtccccttcaggttccaggctccggagcttgctttacttcagggacaacaatgacctcagggacaacaatgacctccaagacgagcggcagcataaccaccaacctgagcaccacggggaagctctcctccgtgggcagcagcttcatggcgtctgccggcagccgcagcaccagcggcggggtttgacaagggggccaagtactccgacgaccagatcctcgaggcgcccaacctccgcaccttcacattcatagagctcaagacggccaccaagaacttccgtccagacagcgtcctcggcgaaggagggttcgggagagtctacaaagggtgggtggatgagaagaccatggcgccgaccaagaacgacaccggcatggttgttgcggtcaagaagctcaactcggagagcatgcatgggtttgaggaatggcagagatcgtgagtcagagcgcaaggatcctgattatgacagaagctatgacagatcaatcgagttgagtttgttcattccaagtcattattgcatagagatatcaagcctgataattttctcatgggtctcgggaaaagagaaaaccaggtttatgttatcgattttggacttgcaaagaagtacagagatacatcaacacaccagcacattccatacagaacaaagccggagggatgacatggaataaaaaacaaaagtattcgggaaggttggtttaatacactgtcagccttccatggtagggcctgaaagctgggaacaaaaaacaaaagtatgaaaagatcagcgaaaggaaaattgctacttcaactgaggctctctgccgtggatatcctaccaaatttgcttcttacttccattactgtcgctcacagcgtttcgaagatgcaccggactatcagtacctgaagaatttgttcagagacctttttattcgggaaggacatattgctaagaatctgccacattatgtttgcttgaggtattaatttatccaggtgtttaatgctggagtacagttagaagatccctaatcaattgcttctcatttcagtcgtgtaactttattcatgctacaacaacgactttgagcgaacatgagaccactgagctctagagtgaatgaaggacgtcgtctttggaagtcagacatcacctagagctagggtgtccattcttgacatgtttctcttagtgataggtggatactgtctagttaggaacagagtcttgagggattgatggacgcatgcatcttcaattcctgtgtgttgtattactactggtacaatctccaattcttgtgaacttatgtatttggacttgtgtgaatttgtgatatgaacatatatccatgtgtttgaaatctatattgtatgtgatattttgtgttgcatgtgatattatgtttgtct

SEQ ID NO: 48068 - DNA, 1842 bp, Zea Mays
ccgcgcgcgcccgccgctacctgccagtcgcgcgcctgccgccagcgccccgccgccaccccacgcgcgccccaccgcccccgcgcgccggctcgtgtactccgctgtccgctcccattccactatggcctagctgcgtgctgctctggcatcggtcggtggataagcccagcaggcaagcaggcaggagactaggagagctcagcactgcacgcacgctcccctccccttactggccaaatcgatcgtccccttcaggttccaggctccggagcttgctttacttcaggttgtctagctgcatgttgaagtataattccggatagattcacagtttttatccgctaggaagggtggtaaaaggctaagtttttttttatgaattctctgcgttcttcactaatccccaccctaatcagtaaacacgcttacgaatcgtttcctaatcgtgtgacagggacaacaatgacctcagggacaacaatgacctccaagacgagcggcagcataaccaccaacctgagcaccacggggaagctctcctccgtgggcagcagcttcatggcgtctgccggcagccgcagcaccagcggcggggtttgacaagggggccaagtactccgacgaccagatcctcgaggcgcccaacctccgcaccttcacattcatagagctcaagacggccaccaagaacttccgtccagacagcgtcctcggcgaaggagggttcgggagagtctacaaagggtgggtggatgagaagaccatggcgccgaccaagaacgacaccggcatggttgttgcggtcaagaagctcaactcggagagcatgcatgggtttgaggaatggcagggttgcaattttcagagatcgtgagtcagagcgcaaggatcctgattatgacagaagctatgacagatcaatcgagttgagtttgttcattccaagtcattattgcatagagatatcaagcctgataattttctcatgggtctcgggaaaagagaaaaccaggtttatgttatcgattttggacttgcaaagaagtacagagatacatcaacacaccagcacattccatacagaacaaagccggagggatgacatggaataaaaaacaaaagtattcgggaaggttggtttaatacactgtcagccttccatggtagggcctgaaagctgggaacaaaaaacaaaagtatgaaaagatcagcgaaaggaaaattgctacttcaactgaggctctctgccgtggatatcctaccaaatttgcttcttacttccattactgtcgctcacagcgtttcgaagatgcaccggactatcagtacctgaagaatttgttcagagacctttttattcgggaaggacatattgctaagaatctgccacattatgtttgcttgaggtattaatttatccaggtgtttaatgctggagtacagttagaagatccctaatcaattgcttctcatttcagtcgtgtaactttattcatgctacaacaacgactttgagcgaacatgagaccactgagctctagagtgaatgaaggacgtcgtctttggaagtcagacatcacctagagctagggtgtccattcttgacatgtttctcttagtgataggtggatactgtctagttaggaacagagtcttgagggattgatggacgcatgcatcttcaattcctgtgtgttgtattactactggtacaatctccaattcttgtgaacttatgtatttggacttgtgtgaatttgtgatatgaacatatatccatgtgtttgaaatctatattgtatgtgatattttgtgttgcatgtgatattatgtttgtct

SEQ ID NO: 48069 - DNA, 1826 bp, Zea Mays
cgcgcgcgcccgccgctacctgccagtcgcgcgcctgccgccagcgccccgccgccaccccacgcgcgccccaccgcccccgcgcgccggctcgtgtactccgctgtccgctcccattccactatggcctagctgcgtgctgctctggcatcggtcggtggataagcccagcaggcaagcaggcaggagactaggagagctcagcactgcacgcacgctcccctccccttactggccaaatcgatcgtccccttcaggttccaggctccggagcttgctttacttcaggttgtctagctgcatgttgaagtataattccggatagattcacagtttttatccgctaggaagggtggtaaaaggctaagtttttttttatgaattctctgcgttcttcactaatccccaccctaatcagtaaacacgcttacgaatcgtttcctaatcgtgtgacagggacaacaatgacctcagggacaacaatgacctccaagacgagcggcagcataaccaccaacctgagcaccacggggaagctctcctccgtgggcagcagcttcatggcgtctgccggcagccgcagcaccagcggcggggtttgacaagggggccaagtactccgacgaccagatcctcgaggcgcccaacctccgcaccttcacattcatagagctcaagacggccaccaagaacttccgtccagacagcgtcctcggcgaaggagggttcgggagagtctacaaagggtgggtggatgagaagaccatggcgccgaccaagaacgacaccggcatggttgttgcggtcaagaagctcaactcggagagcatgcatgggtttgaggaatggcagagatcgtgagtcagagcgcaaggatcctgattatgacagaagctatgacagatcaatcgagttgagtttgttcattccaagtcattattgcatagagatatcaagcctgataattttctcatgggtctcgggaaaagagaaaaccaggtttatgttatcgattttggacttgcaaagaagtacagagatacatcaacacaccagcacattccatacagaacaaagccggagggatgacatggaataaaaaacaaaagtattcgggaaggttggtttaatacactgtcagccttccatggtagggcctgaaagctgggaacaaaaaacaaaagtatgaaaagatcagcgaaaggaaaattgctacttcaactgaggctctctgccgtggatatcctaccaaatttgcttcttacttccattactgtcgctcacagcgtttcgaagatgcaccggactatcagtacctgaagaatttgttcagagacctttttattcgggaaggacatattgctaagaatctgccacattatgtttgcttgaggtattaatttatccaggtgtttaatgctggagtacagttagaagatccctaatcaattgcttctcatttcagtcgtgtaactttattcatgctacaacaacgactttgagcgaacatgagaccactgagctctagagtgaatgaaggacgtcgtctttggaagtcagacatcacctagagctagggtgtccattcttgacatgtttctcttagtgataggtggatactgtctagttaggaacagagtcttgagggattgatggacgcatgcatcttcaattcctgtgtgttgtattactactggtacaatctccaattcttgtgaacttatgtatttggacttgtgtgaatttgtgatatgaacatatatccatgtgtttgaaatctatattgtatgtgatattttgtgttgcatgtgatattatgtttgtct

SEQ ID NO: 48070 - DNA, 1831 bp, Zea Mays
cgcgcgcgcccgccgctacctgccagtcgcgcgcctgccgccagcgccccgccgccaccccacgcgcgccccaccgcccccgcgcgccggctcgtgtactccgctgtccgctcccattccactatggcctagctgcgtgctgctctggcatcggtcggtggataagcccagcaggcaagcaggcaggagactaggagagctcagcactgcacgcacgctcccctccccttactggccaaatcgatcgtccccttcaggttccaggctccggagcttgctttacttcagggacaacaatgacctcagggacaacaatgacctccaagacgagcggcagcataaccaccaacctgagcaccacggggaagctctcctccgtgggcagcagcttcatggcgtctgccggcagccgcagcaccagcggcggggtttgacaagggggccaagtactccgacgaccagatcctcgaggcgcccaacctccgcaccttcacattcatagagctcaagacggccaccaagaacttccgtccagacagcgtcctcggcgaaggagggttcgggagagtctacaaagggtgggtggatgagaagaccatggcgccgaccaagaacgacaccggcatggttgttgcggtcaagaagctcaactcggagagcatgcatgggtttgaggaatggcagagatcgtgagtcagagcgcaaggatcctgattatgacagaagctatgacagggtttccaggccagttatacatggtcatataccaccccgcgtgccccgcgccgccagcccgcgcctccaccccgtgcgatctctgtttagatcaatcgagttgagtttgttcattccaagtcattattgcatagagatatcaagcctgataattttctcatgggtctcgggaaaagagaaaaccaggtttatgttatcgattttggacttgcaaagaagtacagagatacatcaacacaccagcacattccatacagaacaaagccggagggatgacatggaataaaaaacaaaagtattcgggaaggttggtttaatacactgtcagccttccatggtagggcctgaaagctgggaacaaaaaacaaaagtatgaaaagatcagcgaaaggaaaattgctacttcaactgaggctctctgccgtggatatcctaccaaatttgcttcttacttccattactgtcgctcacagcgtttcgaagatgcaccggactatcagtacctgaagaatttgttcagagacctttttattcgggaaggttttcagtttgattatgtttttgactggaccattctaaagtaccaacaggcatagatgaccactgcaccacctcgtgcaattgacatattgctaagaatctgccacattatgtttgcttgaggtattaatttatccaggtgtttaatgctggagtacagttagaagatccctaatcaattgcttctcatttcagtcgtgtaactttattcatgctacaacaacgactttgagcgaacatgagaccactgagctctagagtgaatgaaggacgtcgtctttggaagtcagacatcacctagagctagggtgtccattcttgacatgtttctcttagtgataggtggatactgtctagttaggaacagagtcttgagggattgatggacgcatgcatcttcaattcctgtgtgttgtattactactggtacaatctccaattcttgtgaacttatgtatttggacttgtgtgaatttgtgatatgaacatatatccatgtgtttgaaatctatattgtatgtgatattttgtgttgcatgtgatattatgtttgtct

SEQ ID NO: 48071 - DNA, 1846 bp, Zea Mays
cgcgcgcgcccgccgctacctgccagtcgcgcgcctgccgccagcgccccgccgccaccccacgcgcgccccaccgcccccgcgcgccggctcgtgtactccgctgtccgctcccattccactatggcctagctgcgtgctgctctggcatcggtcggtggataagcccagcaggcaagcaggcaggagactaggagagctcagcactgcacgcacgctcccctccccttactggccaaatcgatcgtccccttcaggttccaggctccggagcttgctttacttcagggacaacaatgacctcagggacaacaatgacctccaagacgagcggcagcataaccaccaacctgagcaccacggggaagctctcctccgtgggcagcagcttcatggcgtctgccggcagccgcagcaccagcggcggggtttgacaagggggccaagtactccgacgaccagatcctcgaggcgcccaacctccgcaccttcacattcatagagctcaagacggccaccaagaacttccgtccagacagcgtcctcggcgaaggagggttcgggagagtctacaaagggtgggtggatgagaagaccatggcgccgaccaagaacgacaccggcatggttgttgcggtcaagaagctcaactcggagagcatgcatgggtttgaggaatggcagggttgcaattttcagagatcgtgagtcagagcgcaaggatcctgattatgacagaagctatgacagggtttccaggccagttatacatggtcatataccaccccgcgtgccccgcgccgccagcccgcgcctccaccccgtgcgatctctgtttagatcaatcgagttgagtttgttcattccaagtcattattgcatagagatatcaagcctgataattttctcatgggtctcgggaaaagagaaaaccaggtttatgttatcgattttggacttgcaaagaagtacagagatacatcaacacaccagcacattccatacagaacaaagccggagggatgacatggaataaaaaacaaaagtattcgggaaggttggtttaatacactgtcagccttccatggtagggcctgaaagctgggaacaaaaaacaaaagtatgaaaagatcagcgaaaggaaaattgctacttcaactgaggctctctgccgtggatatcctaccaaatttgcttcttacttccattactgtcgctcacagcgtttcgaagatgcaccggactatcagtacctgaagaatttgttcagagacctttttattcgggaaggttttcagtttgattatgtttttgactggaccattctaaagtaccaacaggcatagatgaccactgcaccacctcgtgcaattgacatattgctaagaatctgccacattatgtttgcttgaggtattaatttatccaggtgtttaatgctggagtacagttagaagatccctaatcaattgcttctcatttcagtcgtgtaactttattcatgctacaacaacgactttgagcgaacatgagaccactgagctctagagtgaatgaaggacgtcgtctttggaagtcagacatcacctagagctagggtgtccattcttgacatgtttctcttagtgataggtggatactgtctagttaggaacagagtcttgagggattgatggacgcatgcatcttcaattcctgtgtgttgtattactactggtacaatctccaattcttgtgaacttatgtatttggacttgtgtgaatttgtgatatgaacatatatccatgtgtttgaaatctatattgtatgtgatattttgtgttgcatgtgatattatgtttgtct

SEQ ID NO: 48072 - DNA, 3141 bp, Zea Mays
cgcgcgcgcccgccgctacctgccagtcgcgcgcctgccgccagcgccccgccgccaccccacgcgcgccccaccgcccccgcgcgccggctcgtgtactccgctgtccgctcccattccactatggcctagctgcgtgctgctctggcatcggtcggtggataagcccagcaggcaagcaggcaggagactaggagagctcagcactgcacgcacgctcccctccccttactggccaaatcgatcgtccccttcaggttccaggctccggagcttgctttacttcaggttgtctagctgcatgttgaagtataattccggatgtatccttgaagtgtaaacatttaaggattgtgtaattctttgggtaccaaggcccatttttaaattttaaacaatccagtttttgcttgaatgtatcatcagagattcgcagtagggaacatcagagattaatatttcttgtcccttgaatgtatcatggcttgtttagaggcgggggcagcactttctgatctcaaattttgttcttcacttatatttatttcatcagagattcacagtttttatccgctaggaagggtggtaaaaggctaagtttttttttatgaattctctgcgttcttcactaatccccaccctaatcagtaaacacgcttacgaatcgtttcctaatcgtgtgacagggacaacaatgacctcagggacaacaatgacctccaagacgagcggcagcataaccaccaacctgagcaccacggggaagctctcctccgtgggcagcagcttcatggcgtctgccggcagccgcagcaccagcggcggggtttgacaagggggccaagtactccgacgaccagatcctcgaggcgcccaacctccgcaccttcacattcatagagctcaagacggccaccaagaacttccgtccagacagcgtcctcggcgaaggagggttcgggagagtctacaaagggtgggtggatgagaagaccatggcgccgaccaagaacgacaccggcatggttgttgcggtcaagaagctcaactcggagagcatgcatgggtttgaggaatggcagggttgcaattttcagagatcgtgagtcagagcgcaaggatcctgattatgacagaagctatgacaggaaacactaaatcttgtgatgtactccctctgttcctaagtctccagcgtattagtcatctgcacagtgaccaaggagcgctgatatgcttttactcgcagtctttttaaccgtgcactttcgaataaatctgcaattttggatcgtatcagagatgcagtgtttaagaaagtgagtttgtttcctgaattttatatttccaccaaatgtcattgattagcattgttacaattagaattttctacgtatatggtaataataacccactgaggctttgtttggataatgtagtattgacaccaatccactgaggctttgtatagtcattcccttgtgctcaactctttgtgatacaactatgatcagttgataaaagtggcacataacttgagcaagttttatattttgagtacctccctattgtaacatatcttgttacacttctaattttgtggctagaacatgaggtaactggtaagagagttcctttttcatttcatgtggtagggtttccaggccagttatacatggtcatataccaccccgcgtgccccgcgccgccagcccgcgcctccaccccgtgcgatctctgtttaggttcaagtttccacgaagcacatttctgctcaaccatctgctttcatttaactgcattatatattaatgtcctgtatttttctagatcaatcgagttgagtttgttcattccaagtcattattgcatagagatatcaagcctgataattttctcatgggtctcgggaaaagagaaaaccaggtttatgttatcgattttggacttgcaaagaagtacagagatacatcaacacaccagcacattccatacagaacaaagccggagggatgacatggaataaaaaacaaaagtattcgggaaggttggtttaatacactgtcagccttccatggtagggcctgaaagctgggaacaaaaaacaaaagtatgaaaagatcagcgaaaggaaaattgctacttcaactgaggctctctgccgtggatatcctaccaaatttgcttcttacttccattactgtcgctcacagcgtttcgaagatgcaccggactatcagtacctgaagaatttgttcagagacctttttattcgggaaggttttcagtttgattatgtttttgactggaccattctaaagtaccaacaggcatagatgaccactgcaccacctcgtgcaattgtctgtacaaggaataaacttaccctcctaccttaagtagtagtagagattgtattgggtatagaaatgtacttcttttgttatgttatatttcattgccccctctctattttggttcctggccttggtttttgtttcttgtattttttttccatgtcgtctagctactgtagttgcccatcgtcaaagttttgtagagtggttagtgtttttggttgacagacattggtgctagatttgggatcagccttcctaaacagtaccatttactttagctcaatgatatgaataatgcttgtttgcaggacatattgctaagaatctgccacattatgtttgcttgaggtattaatttatccaggtgtttaatgctggagtacagttagaagatccctaatcaattgcttctcatttcagtcgtgtaactttattcatgctacaacaacgactttgagcgaacatgagaccactgagctctagagtgaatgaaggacgtcgtctttggaagtcagacatcacctagagctagggtgtccattcttgacatgtttctcttagtgataggtggatactgtctagttaggaacagagtcttgagggattgatggacgcatgcatcttcaattcctgtgtgttgtattactactggtacaatctccaattcttgtgaacttatgtatttggacttgtgtgaatttgtgatatgaacatatatccatgtgtttgaaatctatattgtatgtgatattttgtgttgcatgtgatattatgtttgtct

SEQ ID NO: 48073 - DNA, 1931 bp, Zea Mays
cgcgcgcgcccgccgctacctgccagtcgcgcgcctgccgccagcgccccgccgccaccccacgcgcgccccaccgcccccgcgcgccggctcgtgtactccgctgtccgctcccattccactatggcctagctgcgtgctgctctggcatcggtcggtggataagcccagcaggcaagcaggcaggagactaggagagctcagcactgcacgcacgctcccctccccttactggccaaatcgatcgtccccttcaggttccaggctccggagcttgctttacttcaggttgtctagctgcatgttgaagtataattccggatagattcacagtttttatccgctaggaagggtggtaaaaggctaagtttttttttatgaattctctgcgttcttcactaatccccaccctaatcagtaaacacgcttacgaatcgtttcctaatcgtgtgacagggacaacaatgacctcagggacaacaatgacctccaagacgagcggcagcataaccaccaacctgagcaccacggggaagctctcctccgtgggcagcagcttcatggcgtctgccggcagccgcagcaccagcggcggggtttgacaagggggccaagtactccgacgaccagatcctcgaggcgcccaacctccgcaccttcacattcatagagctcaagacggccaccaagaacttccgtccagacagcgtcctcggcgaaggagggttcgggagagtctacaaagggtgggtggatgagaagaccatggcgccgaccaagaacgacaccggcatggttgttgcggtcaagaagctcaactcggagagcatgcatgggtttgaggaatggcagggttgcaattttcagagatcgtgagtcagagcgcaaggatcctgattatgacagaagctatgacagggtttccaggccagttatacatggtcatataccaccccgcgtgccccgcgccgccagcccgcgcctccaccccgtgcgatctctgtttagatcaatcgagttgagtttgttcattccaagtcattattgcatagagatatcaagcctgataattttctcatgggtctcgggaaaagagaaaaccaggtttatgttatcgattttggacttgcaaagaagtacagagatacatcaacacaccagcacattccatacagaacaaagccggagggatgacatggaataaaaaacaaaagtattcgggaaggttggtttaatacactgtcagccttccatggtagggcctgaaagctgggaacaaaaaacaaaagtatgaaaagatcagcgaaaggaaaattgctacttcaactgaggctctctgccgtggatatcctaccaaatttgcttcttacttccattactgtcgctcacagcgtttcgaagatgcaccggactatcagtacctgaagaatttgttcagagacctttttattcgggaaggacatattgctaagaatctgccacattatgtttgcttgaggtattaatttatccaggtgtttaatgctggagtacagttagaagatccctaatcaattgcttctcatttcagtcgtgtaactttattcatgctacaacaacgactttgagcgaacatgagaccactgagctctagagtgaatgaaggacgtcgtctttggaagtcagacatcacctagagctagggtgtccattcttgacatgtttctcttagtgataggtggatactgtctagttaggaacagagtcttgagggattgatggacgcatgcatcttcaattcctgtgtgttgtattactactggtacaatctccaattcttgtgaacttatgtatttggacttgtgtgaatttgtgatatgaacatatatccatgtgtttgaaatctatattgtatgtgatattttgtgttgcatgtgatattatgtttgtct

SEQ ID NO: 48074 - DNA, 1956 bp, Zea Mays
cgcgcgcgcccgccgctacctgccagtcgcgcgcctgccgccagcgccccgccgccaccccacgcgcgccccaccgcccccgcgcgccggctcgtgtactccgctgtccgctcccattccactatggcctagctgcgtgctgctctggcatcggtcggtggataagcccagcaggcaagcaggcaggagactaggagagctcagcactgcacgcacgctcccctccccttactggccaaatcgatcgtccccttcaggttccaggctccggagcttgctttacttcaggttgtctagctgcatgttgaagtataattccggatagattcacagtttttatccgctaggaagggtgggacaacaatgacctcagggacaacaatgacctccaagacgagcggcagcataaccaccaacctgagcaccacggggaagctctcctccgtgggcagcagcttcatggcgtctgccggcagccgcagcaccagcggcggggtttgacaagggggccaagtactccgacgaccagatcctcgaggcgcccaacctccgcaccttcacattcatagagctcaagacggccaccaagaacttccgtccagacagcgtcctcggcgaaggagggttcgggagagtctacaaagggtgggtggatgagaagaccatggcgccgaccaagaacgacaccggcatggttgttgcggtcaagaagctcaactcggagagcatgcatgggtttgaggaatggcagagatcgtgagtcagagcgcaaggatcctgattatgacagaagctatgacagggtttccaggccagttatacatggtcatataccaccccgcgtgccccgcgccgccagcccgcgcctccaccccgtgcgatctctgtttagatcaatcgagttgagtttgttcattccaagtcattattgcatagagatatcaagcctgataattttctcatgggtctcgggaaaagagaaaaccaggtttatgttatcgattttggacttgcaaagaagtacagagatacatcaacacaccagcacattccatacagaacaaagccggagggatgacatggaataaaaaacaaaagtattcgggaaggttggtttaatacactgtcagccttccatggtagggcctgaaagctgggaacaaaaaacaaaagtatgaaaagatcagcgaaaggaaaattgctacttcaactgaggctctctgccgtggatatcctaccaaatttgcttcttacttccattactgtcgctcacagcgtttcgaagatgcaccggactatcagtacctgaagaatttgttcagagacctttttattcgggaaggttttcagtttgattatgtttttgactggaccattctaaagtaccaacaggcatagatgaccactgcaccacctcgtgcaattgtctgtacaaggaataaacttaccctcctaccttaagtagtagtagagattgtattgggacatattgctaagaatctgccacattatgtttgcttgaggtattaatttatccaggtgtttaatgctggagtacagttagaagatccctaatcaattgcttctcatttcagtcgtgtaactttattcatgctacaacaacgactttgagcgaacatgagaccactgagctctagagtgaatgaaggacgtcgtctttggaagtcagacatcacctagagctagggtgtccattcttgacatgtttctcttagtgataggtggatactgtctagttaggaacagagtcttgagggattgatggacgcatgcatcttcaattcctgtgtgttgtattactactggtacaatctccaattcttgtgaacttatgtatttggacttgtgtgaatttgtgatatgaacatatatccatgtgtttgaaatctatattgtatgtgatattttgtgttgcatgtgatattatgtttgtct

SEQ ID NO: 48075 - DNA, 1916 bp, Zea Mays
cgcgcgcgcccgccgctacctgccagtcgcgcgcctgccgccagcgccccgccgccaccccacgcgcgccccaccgcccccgcgcgccggctcgtgtactccgctgtccgctcccattccactatggcctagctgcgtgctgctctggcatcggtcggtggataagcccagcaggcaagcaggcaggagactaggagagctcagcactgcacgcacgctcccctccccttactggccaaatcgatcgtccccttcaggttccaggctccggagcttgctttacttcaggttgtctagctgcatgttgaagtataattccggatagattcacagtttttatccgctaggaagggtggtaaaaggctaagtttttttttatgaattctctgcgttcttcactaatccccaccctaatcagtaaacacgcttacgaatcgtttcctaatcgtgtgacagggacaacaatgacctcagggacaacaatgacctccaagacgagcggcagcataaccaccaacctgagcaccacggggaagctctcctccgtgggcagcagcttcatggcgtctgccggcagccgcagcaccagcggcggggtttgacaagggggccaagtactccgacgaccagatcctcgaggcgcccaacctccgcaccttcacattcatagagctcaagacggccaccaagaacttccgtccagacagcgtcctcggcgaaggagggttcgggagagtctacaaagggtgggtggatgagaagaccatggcgccgaccaagaacgacaccggcatggttgttgcggtcaagaagctcaactcggagagcatgcatgggtttgaggaatggcagagatcgtgagtcagagcgcaaggatcctgattatgacagaagctatgacagggtttccaggccagttatacatggtcatataccaccccgcgtgccccgcgccgccagcccgcgcctccaccccgtgcgatctctgtttagatcaatcgagttgagtttgttcattccaagtcattattgcatagagatatcaagcctgataattttctcatgggtctcgggaaaagagaaaaccaggtttatgttatcgattttggacttgcaaagaagtacagagatacatcaacacaccagcacattccatacagaacaaagccggagggatgacatggaataaaaaacaaaagtattcgggaaggttggtttaatacactgtcagccttccatggtagggcctgaaagctgggaacaaaaaacaaaagtatgaaaagatcagcgaaaggaaaattgctacttcaactgaggctctctgccgtggatatcctaccaaatttgcttcttacttccattactgtcgctcacagcgtttcgaagatgcaccggactatcagtacctgaagaatttgttcagagacctttttattcgggaaggacatattgctaagaatctgccacattatgtttgcttgaggtattaatttatccaggtgtttaatgctggagtacagttagaagatccctaatcaattgcttctcatttcagtcgtgtaactttattcatgctacaacaacgactttgagcgaacatgagaccactgagctctagagtgaatgaaggacgtcgtctttggaagtcagacatcacctagagctagggtgtccattcttgacatgtttctcttagtgataggtggatactgtctagttaggaacagagtcttgagggattgatggacgcatgcatcttcaattcctgtgtgttgtattactactggtacaatctccaattcttgtgaacttatgtatttggacttgtgtgaatttgtgatatgaacatatatccatgtgtttgaaatctatattgtatgtgatattttgtgttgcatgtgatattatgtttgtct

SEQ ID NO: 48076 - DNA, 2459 bp, Zea Mays
cgcgcgcgcccgccgctacctgccagtcgcgcgcctgccgccagcgccccgccgccaccccacgcgcgccccaccgcccccgcgcgccggctcgtgtactccgctgtccgctcccattccactatggcctagctgcgtgctgctctggcatcggtcggtggataagcccagcaggcaagcaggcaggagactaggagagctcagcactgcacgcacgctcccctccccttactggccaaatcgatcgtccccttcaggttccaggctccggagcttgctttacttcaggttgtctagctgcatgttgaagtataattccggatgtatccttgaagtgtaaacatttaaggattgtgtaattctttgggtaccaaggcccatttttaaattttaaacaatccagtttttgcttgaatgtatcatcagagattcgcagtagggaacatcagagattaatatttcttgtcccttgaatgtatcatggcttgtttagaggcgggggcagcactttctgatctcaaattttgttcttcacttatatttatttcatcagagattcacagtttttatccgctaggaagggtggtaaaaggctaagtttttttttatgaattctctgcgttcttcactaatccccaccctaatcagtaaacacgcttacgaatcgtttcctaatcgtgtgacagggacaacaatgacctcagggacaacaatgacctccaagacgagcggcagcataaccaccaacctgagcaccacggggaagctctcctccgtgggcagcagcttcatggcgtctgccggcagccgcagcaccagcggcggggtttgacaagggggccaagtactccgacgaccagatcctcgaggcgcccaacctccgcaccttcacattcatagagctcaagacggccaccaagaacttccgtccagacagcgtcctcggcgaaggagggttcgggagagtctacaaagggtgggtggatgagaagaccatggcgccgaccaagaacgacaccggcatggttgttgcggtcaagaagctcaactcggagagcatgcatgggtttgaggaatggcagggttgcaattttcagagatcgtgagtcagagcgcaaggatcctgattatgacagaagctatgacagatcaatcgagttgagtttgttcattccaagtcattattgcatagagatatcaagcctgataattttctcatgggtctcgggaaaagagaaaaccaggtttatgttatcgattttggacttgcaaagaagtacagagatacatcaacacaccagcacattccatacagaacaaagccggagggatgacatggaataaaaaacaaaagtattcgggaaggttggtttaatacactgtcagccttccatggtagggcctgaaagctgggaacaaaaaacaaaagtatgaaaagatcagcgaaaggaaaattgctacttcaactgaggctctctgccgtggatatcctaccaaatttgcttcttacttccattactgtcgctcacagcgtttcgaagatgcaccggactatcagtacctgaagaatttgttcagagacctttttattcgggaaggttttcagtttgattatgtttttgactggaccattctaaagtaccaacaggcatagatgaccactgcaccacctcgtgcaattgtctgtacaaggaataaacttaccctcctaccttaagtagtagtagagattgtattgggtatagaaatgtacttcttttgttatgttatatttcattgccccctctctattttggttcctggccttggtttttgtttcttgtattttttttccatgtcgtctagctactgtagttgcccatcgtcaaagttttgtagagtggttagtgtttttggttgacagacattggtgctagatttgggatcagccttcctaaacagtaccatttactttagctcaatgatatgaataatgcttgtttgcaggacatattgctaagaatctgccacattatgtttgcttgaggtattaatttatccaggtgtttaatgctggagtacagttagaagatccctaatcaattgcttctcatttcagtcgtgtaactttattcatgctacaacaacgactttgagcgaacatgagaccactgagctctagagtgaatgaaggacgtcgtctttggaagtcagacatcacctagagctagggtgtccattcttgacatgtttctcttagtgataggtggatactgtctagttaggaacagagtcttgagggattgatggacgcatgcatcttcaattcctgtgtgttgtattactactggtacaatctccaattcttgtgaacttatgtatttggacttgtgtgaatttgtgatatgaacatatatccatgtgtttgaaatctatattgtatgtgatattttgtgttgcatgtgatattatgtttgtct

SEQ ID NO: 48077 - DNA, 1924 bp, Zea Mays
cgcgcgcgcccgccgctacctgccagtcgcgcgcctgccgccagcgccccgccgccaccccacgcgcgccccaccgcccccgcgcgccggctcgtgtactccgctgtccgctcccattccactatggcctagctgcgtgctgctctggcatcggtcggtggataagcccagcaggcaagcaggcaggagactaggagagctcagcactgcacgcacgctcccctccccttactggccaaatcgatcgtccccttcaggttccaggctccggagcttgctttacttcaggttgtctagctgcatgttgaagtataattccggatagattcacagtttttatccgctaggaagggtggtaaaaggctaagtttttttttatgaattctctgcgttcttcactaatccccaccctaatcagtaaacacgcttacgaatcgtttcctaatcgtgtgacagggacaacaatgacctcagggacaacaatgacctccaagacgagcggcagcataaccaccaacctgagcaccacggggaagctctcctccgtgggcagcagcttcatggcgtctgccggcagccgcagcaccagcggcggggtttgacaagggggccaagtactccgacgaccagatcctcgaggcgcccaacctccgcaccttcacattcatagagctcaagacggccaccaagaacttccgtccagacagcgtcctcggcgaaggagggttcgggagagtctacaaagggtgggtggatgagaagaccatggcgccgaccaagaacgacaccggcatggttgttgcggtcaagaagctcaactcggagagcatgcatgggtttgaggaatggcagggttgcaattttcagagatcgtgagtcagagcgcaaggatcctgattatgacagaagctatgacagatcaatcgagttgagtttgttcattccaagtcattattgcatagagatatcaagcctgataattttctcatgggtctcgggaaaagagaaaaccaggtttatgttatcgattttggacttgcaaagaagtacagagatacatcaacacaccagcacattccatacagaacaaagccggagggatgacatggaataaaaaacaaaagtattcgggaaggttggtttaatacactgtcagccttccatggtagggcctgaaagctgggaacaaaaaacaaaagtatgaaaagatcagcgaaaggaaaattgctacttcaactgaggctctctgccgtggatatcctaccaaatttgcttcttacttccattactgtcgctcacagcgtttcgaagatgcaccggactatcagtacctgaagaatttgttcagagacctttttattcgggaaggttttcagtttgattatgtttttgactggaccattctaaagtaccaacaggcatagatgaccactgcaccacctcgtgcaattgacatattgctaagaatctgccacattatgtttgcttgaggtattaatttatccaggtgtttaatgctggagtacagttagaagatccctaatcaattgcttctcatttcagtcgtgtaactttattcatgctacaacaacgactttgagcgaacatgagaccactgagctctagagtgaatgaaggacgtcgtctttggaagtcagacatcacctagagctagggtgtccattcttgacatgtttctcttagtgataggtggatactgtctagttaggaacagagtcttgagggattgatggacgcatgcatcttcaattcctgtgtgttgtattactactggtacaatctccaattcttgtgaacttatgtatttggacttgtgtgaatttgtgatatgaacatatatccatgtgtttgaaatctatattgtatgtgatattttgtgttgcatgtgatattatgtttgtct

SEQ ID NO: 48078 - DNA, 2218 bp, Zea Mays
cgcgcgcgcccgccgctacctgccagtcgcgcgcctgccgccagcgccccgccgccaccccacgcgcgccccaccgcccccgcgcgccggctcgtgtactccgctgtccgctcccattccactatggcctagctgcgtgctgctctggcatcggtcggtggataagcccagcaggcaagcaggcaggagactaggagagctcagcactgcacgcacgctcccctccccttactggccaaatcgatcgtccccttcaggttccaggctccggagcttgctttacttcaggttgtctagctgcatgttgaagtataattccggatagattcacagtttttatccgctaggaagggtgggacaacaatgacctcagggacaacaatgacctccaagacgagcggcagcataaccaccaacctgagcaccacggggaagctctcctccgtgggcagcagcttcatggcgtctgccggcagccgcagcaccagcggcggggtttgacaagggggccaagtactccgacgaccagatcctcgaggcgcccaacctccgcaccttcacattcatagagctcaagacggccaccaagaacttccgtccagacagcgtcctcggcgaaggagggttcgggagagtctacaaagggtgggtggatgagaagaccatggcgccgaccaagaacgacaccggcatggttgttgcggtcaagaagctcaactcggagagcatgcatgggtttgaggaatggcagggttgcaattttcagagatcgtgagtcagagcgcaaggatcctgattatgacagaagctatgacagggtttccaggccagttatacatggtcatataccaccccgcgtgccccgcgccgccagcccgcgcctccaccccgtgcgatctctgtttagatcaatcgagttgagtttgttcattccaagtcattattgcatagagatatcaagcctgataattttctcatgggtctcgggaaaagagaaaaccaggtttatgttatcgattttggacttgcaaagaagtacagagatacatcaacacaccagcacattccatacagaacaaagccggagggatgacatggaataaaaaacaaaagtattcgggaaggttggtttaatacactgtcagccttccatggtagggcctgaaagctgggaacaaaaaacaaaagtatgaaaagatcagcgaaaggaaaattgctacttcaactgaggctctctgccgtggatatcctaccaaatttgcttcttacttccattactgtcgctcacagcgtttcgaagatgcaccggactatcagtacctgaagaatttgttcagagacctttttattcgggaaggttttcagtttgattatgtttttgactggaccattctaaagtaccaacaggcatagatgaccactgcaccacctcgtgcaattgtctgtacaaggaataaacttaccctcctaccttaagtagtagtagagattgtattgggtatagaaatgtacttcttttgttatgttatatttcattgccccctctctattttggttcctggccttggtttttgtttcttgtattttttttccatgtcgtctagctactgtagttgcccatcgtcaaagttttgtagagtggttagtgtttttggttgacagacattggtgctagatttgggatcagccttcctaaacagtaccatttactttagctcaatgatatgaataatgcttgtttgcaggacatattgctaagaatctgccacattatgtttgcttgaggtattaatttatccaggtgtttaatgctggagtacagttagaagatccctaatcaattgcttctcatttcagtcgtgtaactttattcatgctacaacaacgactttgagcgaacatgagaccactgagctctagagtgaatgaaggacgtcgtctttggaagtcagacatcacctagagctagggtgtccattcttgacatgtttctcttagtgataggtggatactgtctagttaggaacagagtcttgagggattgatggacgcatgcatcttcaattcctgtgtgttgtattactactggtacaatctccaattcttgtgaacttatgtatttggacttgtgtgaatttgtgatatgaacatatatccatgtgtttgaaatctatattgtatgtgatattttgtgttgcatgtgatattatgtttgtct

SEQ ID NO: 48079 - DNA, 2229 bp, Zea Mays
cgcgcgcgcccgccgctacctgccagtcgcgcgcctgccgccagcgccccgccgccaccccacgcgcgccccaccgcccccgcgcgccggctcgtgtactccgctgtccgctcccattccactatggcctagctgcgtgctgctctggcatcggtcggtggataagcccagcaggcaagcaggcaggagactaggagagctcagcactgcacgcacgctcccctccccttactggccaaatcgatcgtccccttcaggttccaggctccggagcttgctttacttcaggttgtctagctgcatgttgaagtataattccggatagattcacagtttttatccgctaggaagggtggtaaaaggctaagtttttttttatgaattctctgcgttcttcactaatccccaccctaatcagtaaacacgcttacgaatcgtttcctaatcgtgtgacagggacaacaatgacctcagggacaacaatgacctccaagacgagcggcagcataaccaccaacctgagcaccacggggaagctctcctccgtgggcagcagcttcatggcgtctgccggcagccgcagcaccagcggcggggtttgacaagggggccaagtactccgacgaccagatcctcgaggcgcccaacctccgcaccttcacattcatagagctcaagacggccaccaagaacttccgtccagacagcgtcctcggcgaaggagggttcgggagagtctacaaagggtgggtggatgagaagaccatggcgccgaccaagaacgacaccggcatggttgttgcggtcaagaagctcaactcggagagcatgcatgggtttgaggaatggcagggttgcaattttcagagatcgtgagtcagagcgcaaggatcctgattatgacagaagctatgacagatcaatcgagttgagtttgttcattccaagtcattattgcatagagatatcaagcctgataattttctcatgggtctcgggaaaagagaaaaccaggtttatgttatcgattttggacttgcaaagaagtacagagatacatcaacacaccagcacattccatacagaacaaagccggagggatgacatggaataaaaaacaaaagtattcgggaaggttggtttaatacactgtcagccttccatggtagggcctgaaagctgggaacaaaaaacaaaagtatgaaaagatcagcgaaaggaaaattgctacttcaactgaggctctctgccgtggatatcctaccaaatttgcttcttacttccattactgtcgctcacagcgtttcgaagatgcaccggactatcagtacctgaagaatttgttcagagacctttttattcgggaaggttttcagtttgattatgtttttgactggaccattctaaagtaccaacaggcatagatgaccactgcaccacctcgtgcaattgtctgtacaaggaataaacttaccctcctaccttaagtagtagtagagattgtattgggtatagaaatgtacttcttttgttatgttatatttcattgccccctctctattttggttcctggccttggtttttgtttcttgtattttttttccatgtcgtctagctactgtagttgcccatcgtcaaagttttgtagagtggttagtgtttttggttgacagacattggtgctagatttgggatcagccttcctaaacagtaccatttactttagctcaatgatatgaataatgcttgtttgcaggacatattgctaagaatctgccacattatgtttgcttgaggtattaatttatccaggtgtttaatgctggagtacagttagaagatccctaatcaattgcttctcatttcagtcgtgtaactttattcatgctacaacaacgactttgagcgaacatgagaccactgagctctagagtgaatgaaggacgtcgtctttggaagtcagacatcacctagagctagggtgtccattcttgacatgtttctcttagtgataggtggatactgtctagttaggaacagagtcttgagggattgatggacgcatgcatcttcaattcctgtgtgttgtattactactggtacaatctccaattcttgtgaacttatgtatttggacttgtgtgaatttgtgatatgaacatatatccatgtgtttgaaatctatattgtatgtgatattttgtgttgcatgtgatattatgtttgtct

SEQ ID NO: 48080 - DNA, 1748 bp, Zea Mays
cgcgcgcgcccgccgctacctgccagtcgcgcgcctgccgccagcgccccgccgccaccccacgcgcgccccaccgcccccgcgcgccggctcgtgtactccgctgtccgctcccattccactatggcctagctgcgtgctgctctggcatcggtcggtggataagcccagcaggcaagcaggcaggagactaggagagctcagcactgcacgcacgctcccctccccttactggccaaatcgatcgtccccttcaggttccaggctccggagcttgctttacttcagggacaacaatgacctcagggacaacaatgacctccaagacgagcggcagcataaccaccaacctgagcaccacggggaagctctcctccgtgggcagcagcttcatggcgtctgccggcagccgcagcaccagcggcggggtttgacaagggggccaagtactccgacgaccagatcctcgaggcgcccaacctccgcaccttcacattcatagagctcaagacggccaccaagaacttccgtccagacagcgtcctcggcgaaggagggttcgggagagtctacaaagggtgggtggatgagaagaccatggcgccgaccaagaacgacaccggcatggttgttgcggtcaagaagctcaactcggagagcatgcatgggtttgaggaatggcagagatcgtgagtcagagcgcaaggatcctgattatgacagaagctatgacagggtttccaggccagttatacatggtcatataccaccccgcgtgccccgcgccgccagcccgcgcctccaccccgtgcgatctctgtttagatcaatcgagttgagtttgttcattccaagtcattattgcatagagatatcaagcctgataattttctcatgggtctcgggaaaagagaaaaccaggtttatgttatcgattttggacttgcaaagaagtacagagatacatcaacacaccagcacattccatacagaacaaagccggagggatgacatggaataaaaaacaaaagtattcgggaaggttggtttaatacactgtcagccttccatggtagggcctgaaagctgggaacaaaaaacaaaagtatgaaaagatcagcgaaaggaaaattgctacttcaactgaggctctctgccgtggatatcctaccaaatttgcttcttacttccattactgtcgctcacagcgtttcgaagatgcaccggactatcagtacctgaagaatttgttcagagacctttttattcgggaaggacatattgctaagaatctgccacattatgtttgcttgaggtattaatttatccaggtgtttaatgctggagtacagttagaagatccctaatcaattgcttctcatttcagtcgtgtaactttattcatgctacaacaacgactttgagcgaacatgagaccactgagctctagagtgaatgaaggacgtcgtctttggaagtcagacatcacctagagctagggtgtccattcttgacatgtttctcttagtgataggtggatactgtctagttaggaacagagtcttgagggattgatggacgcatgcatcttcaattcctgtgtgttgtattactactggtacaatctccaattcttgtgaacttatgtatttggacttgtgtgaatttgtgatatgaacatatatccatgtgtttgaaatctatattgtatgtgatattttgtgttgcatgtgatattatgtttgtct

SEQ ID NO: 48081 - DNA, 1814 bp, Zea Mays
cgcgcgcgcccgccgctacctgccagtcgcgcgcctgccgccagcgccccgccgccaccccacgcgcgccccaccgcccccgcgcgccggctcgtgtactccgctgtccgctcccattccactatggcctagctgcgtgctgctctggcatcggtcggtggataagcccagcaggcaagcaggcaggagactaggagagctcagcactgcacgcacgctcccctccccttactggccaaatcgatcgtccccttcaggttccaggctccggagcttgctttacttcagggacaacaatgacctcagggacaacaatgacctccaagacgagcggcagcataaccaccaacctgagcaccacggggaagctctcctccgtgggcagcagcttcatggcgtctgccggcagccgcagcaccagcggcggggtttgacaagggggccaagtactccgacgaccagatcctcgaggcgcccaacctccgcaccttcacattcatagagctcaagacggccaccaagaacttccgtccagacagcgtcctcggcgaaggagggttcgggagagtctacaaagggtgggtggatgagaagaccatggcgccgaccaagaacgacaccggcatggttgttgcggtcaagaagctcaactcggagagcatgcatgggtttgaggaatggcagggttgcaattttcagagatcgtgagtcagagcgcaaggatcctgattatgacagaagctatgacagatcaatcgagttgagtttgttcattccaagtcattattgcatagagatatcaagcctgataattttctcatgggtctcgggaaaagagaaaaccaggtttatgttatcgattttggacttgcaaagaagtacagagatacatcaacacaccagcacattccatacagaacaaagccggagggatgacatggaataaaaaacaaaagtattcgggaaggttggtttaatacactgtcagccttccatggtagggcctgaaagctgggaacaaaaaacaaaagtatgaaaagatcagcgaaaggaaaattgctacttcaactgaggctctctgccgtggatatcctaccaaatttgcttcttacttccattactgtcgctcacagcgtttcgaagatgcaccggactatcagtacctgaagaatttgttcagagacctttttattcgggaaggttttcagtttgattatgtttttgactggaccattctaaagtaccaacaggcatagatgaccactgcaccacctcgtgcaattgtctgtacaaggaataaacttaccctcctaccttaagtagtagtagagattgtattgggacatattgctaagaatctgccacattatgtttgcttgaggtattaatttatccaggtgtttaatgctggagtacagttagaagatccctaatcaattgcttctcatttcagtcgtgtaactttattcatgctacaacaacgactttgagcgaacatgagaccactgagctctagagtgaatgaaggacgtcgtctttggaagtcagacatcacctagagctagggtgtccattcttgacatgtttctcttagtgataggtggatactgtctagttaggaacagagtcttgagggattgatggacgcatgcatcttcaattcctgtgtgttgtattactactggtacaatctccaattcttgtgaacttatgtatttggacttgtgtgaatttgtgatatgaacatatatccatgtgtttgaaatctatattgtatgtgatattttgtgttgcatgtgatattatgtttgtct

SEQ ID NO: 48082 - DNA, 2374 bp, Zea Mays
cgcgcgcgcccgccgctacctgccagtcgcgcgcctgccgccagcgccccgccgccaccccacgcgcgccccaccgcccccgcgcgccggctcgtgtactccgctgtccgctcccattccactatggcctagctgcgtgctgctctggcatcggtcggtggataagcccagcaggcaagcaggcaggagactaggagagctcagcactgcacgcacgctcccctccccttactggccaaatcgatcgtccccttcaggttccaggctccggagcttgctttacttcaggttgtctagctgcatgttgaagtataattccggatagattcacagtttttatccgctaggaagggtggtaaaaggctaagtttttttttatgaattctctgcgttcttcactaatccccaccctaatcagtaaacacgcttacgaatcgtttcctaatcgtgtgacagggacaacaatgacctcagggacaacaatgacctccaagacgagcggcagcataaccaccaacctgagcaccacggggaagctctcctccgtgggcagcagcttcatggcgtctgccggcagccgcagcaccagcggcggggtttgacaagggggccaagtactccgacgaccagatcctcgaggcgcccaacctccgcaccttcacattcatagagctcaagacggccaccaagaacttccgtccagacagcgtcctcggcgaaggagggttcgggagagtctacaaagggtgggtggatgagaagaccatggcgccgaccaagaacgacaccggcatggttgttgcggtcaagaagctcaactcggagagcatgcatgggtttgaggaatggcagagatcgtgagtcagagcgcaaggatcctgattatgacagaagctatgacagtctttttaaccgtgcactttcgaataaatctgcaattttggatcgtatcagagatgcagtgtttaagaaaggtttccaggccagttatacatggtcatataccaccccgcgtgccccgcgccgccagcccgcgcctccaccccgtgcgatctctgtttagatcaatcgagttgagtttgttcattccaagtcattattgcatagagatatcaagcctgataattttctcatgggtctcgggaaaagagaaaaccaggtttatgttatcgattttggacttgcaaagaagtacagagatacatcaacacaccagcacattccatacagaacaaagccggagggatgacatggaataaaaaacaaaagtattcgggaaggttggtttaatacactgtcagccttccatggtagggcctgaaagctgggaacaaaaaacaaaagtatgaaaagatcagcgaaaggaaaattgctacttcaactgaggctctctgccgtggatatcctaccaaatttgcttcttacttccattactgtcgctcacagcgtttcgaagatgcaccggactatcagtacctgaagaatttgttcagagacctttttattcgggaaggttttcagtttgattatgtttttgactggaccattctaaagtaccaacaggcatagatgaccactgcaccacctcgtgcaattgtctgtacaaggaataaacttaccctcctaccttaagtagtagtagagattgtattgggtatagaaatgtacttcttttgttatgttatatttcattgccccctctctattttggttcctggccttggtttttgtttcttgtattttttttccatgtcgtctagctactgtagttgcccatcgtcaaagttttgtagagtggttagtgtttttggttgacagacattggtgctagatttgggatcagccttcctaaacagtaccatttactttagctcaatgatatgaataatgcttgtttgcaggacatattgctaagaatctgccacattatgtttgcttgaggtattaatttatccaggtgtttaatgctggagtacagttagaagatccctaatcaattgcttctcatttcagtcgtgtaactttattcatgctacaacaacgactttgagcgaacatgagaccactgagctctagagtgaatgaaggacgtcgtctttggaagtcagacatcacctagagctagggtgtccattcttgacatgtttctcttagtgataggtggatactgtctagttaggaacagagtcttgagggattgatggacgcatgcatcttcaattcctgtgtgttgtattactactggtacaatctccaattcttgtgaacttatgtatttggacttgtgtgaatttgtgatatgaacatatatccatgtgtttgaaatctatattgtatgtgatattttgtgttgcatgtgatattatgtttgtct

SEQ ID NO: 48083 - DNA, 2203 bp, Zea Mays
cgcgcgcgcccgccgctacctgccagtcgcgcgcctgccgccagcgccccgccgccaccccacgcgcgccccaccgcccccgcgcgccggctcgtgtactccgctgtccgctcccattccactatggcctagctgcgtgctgctctggcatcggtcggtggataagcccagcaggcaagcaggcaggagactaggagagctcagcactgcacgcacgctcccctccccttactggccaaatcgatcgtccccttcaggttccaggctccggagcttgctttacttcaggttgtctagctgcatgttgaagtataattccggatagattcacagtttttatccgctaggaagggtgggacaacaatgacctcagggacaacaatgacctccaagacgagcggcagcataaccaccaacctgagcaccacggggaagctctcctccgtgggcagcagcttcatggcgtctgccggcagccgcagcaccagcggcggggtttgacaagggggccaagtactccgacgaccagatcctcgaggcgcccaacctccgcaccttcacattcatagagctcaagacggccaccaagaacttccgtccagacagcgtcctcggcgaaggagggttcgggagagtctacaaagggtgggtggatgagaagaccatggcgccgaccaagaacgacaccggcatggttgttgcggtcaagaagctcaactcggagagcatgcatgggtttgaggaatggcagagatcgtgagtcagagcgcaaggatcctgattatgacagaagctatgacagggtttccaggccagttatacatggtcatataccaccccgcgtgccccgcgccgccagcccgcgcctccaccccgtgcgatctctgtttagatcaatcgagttgagtttgttcattccaagtcattattgcatagagatatcaagcctgataattttctcatgggtctcgggaaaagagaaaaccaggtttatgttatcgattttggacttgcaaagaagtacagagatacatcaacacaccagcacattccatacagaacaaagccggagggatgacatggaataaaaaacaaaagtattcgggaaggttggtttaatacactgtcagccttccatggtagggcctgaaagctgggaacaaaaaacaaaagtatgaaaagatcagcgaaaggaaaattgctacttcaactgaggctctctgccgtggatatcctaccaaatttgcttcttacttccattactgtcgctcacagcgtttcgaagatgcaccggactatcagtacctgaagaatttgttcagagacctttttattcgggaaggttttcagtttgattatgtttttgactggaccattctaaagtaccaacaggcatagatgaccactgcaccacctcgtgcaattgtctgtacaaggaataaacttaccctcctaccttaagtagtagtagagattgtattgggtatagaaatgtacttcttttgttatgttatatttcattgccccctctctattttggttcctggccttggtttttgtttcttgtattttttttccatgtcgtctagctactgtagttgcccatcgtcaaagttttgtagagtggttagtgtttttggttgacagacattggtgctagatttgggatcagccttcctaaacagtaccatttactttagctcaatgatatgaataatgcttgtttgcaggacatattgctaagaatctgccacattatgtttgcttgaggtattaatttatccaggtgtttaatgctggagtacagttagaagatccctaatcaattgcttctcatttcagtcgtgtaactttattcatgctacaacaacgactttgagcgaacatgagaccactgagctctagagtgaatgaaggacgtcgtctttggaagtcagacatcacctagagctagggtgtccattcttgacatgtttctcttagtgataggtggatactgtctagttaggaacagagtcttgagggattgatggacgcatgcatcttcaattcctgtgtgttgtattactactggtacaatctccaattcttgtgaacttatgtatttggacttgtgtgaatttgtgatatgaacatatatccatgtgtttgaaatctatattgtatgtgatattttgtgttgcatgtgatattatgtttgtct

SEQ ID NO: 48084 - DNA, 1756 bp, Zea Mays
cgcgcgcgcccgccgctacctgccagtcgcgcgcctgccgccagcgccccgccgccaccccacgcgcgccccaccgcccccgcgcgccggctcgtgtactccgctgtccgctcccattccactatggcctagctgcgtgctgctctggcatcggtcggtggataagcccagcaggcaagcaggcaggagactaggagagctcagcactgcacgcacgctcccctccccttactggccaaatcgatcgtccccttcaggttccaggctccggagcttgctttacttcagggacaacaatgacctcagggacaacaatgacctccaagacgagcggcagcataaccaccaacctgagcaccacggggaagctctcctccgtgggcagcagcttcatggcgtctgccggcagccgcagcaccagcggcggggtttgacaagggggccaagtactccgacgaccagatcctcgaggcgcccaacctccgcaccttcacattcatagagctcaagacggccaccaagaacttccgtccagacagcgtcctcggcgaaggagggttcgggagagtctacaaagggtgggtggatgagaagaccatggcgccgaccaagaacgacaccggcatggttgttgcggtcaagaagctcaactcggagagcatgcatgggtttgaggaatggcagggttgcaattttcagagatcgtgagtcagagcgcaaggatcctgattatgacagaagctatgacagatcaatcgagttgagtttgttcattccaagtcattattgcatagagatatcaagcctgataattttctcatgggtctcgggaaaagagaaaaccaggtttatgttatcgattttggacttgcaaagaagtacagagatacatcaacacaccagcacattccatacagaacaaagccggagggatgacatggaataaaaaacaaaagtattcgggaaggttggtttaatacactgtcagccttccatggtagggcctgaaagctgggaacaaaaaacaaaagtatgaaaagatcagcgaaaggaaaattgctacttcaactgaggctctctgccgtggatatcctaccaaatttgcttcttacttccattactgtcgctcacagcgtttcgaagatgcaccggactatcagtacctgaagaatttgttcagagacctttttattcgggaaggttttcagtttgattatgtttttgactggaccattctaaagtaccaacaggcatagatgaccactgcaccacctcgtgcaattgacatattgctaagaatctgccacattatgtttgcttgaggtattaatttatccaggtgtttaatgctggagtacagttagaagatccctaatcaattgcttctcatttcagtcgtgtaactttattcatgctacaacaacgactttgagcgaacatgagaccactgagctctagagtgaatgaaggacgtcgtctttggaagtcagacatcacctagagctagggtgtccattcttgacatgtttctcttagtgataggtggatactgtctagttaggaacagagtcttgagggattgatggacgcatgcatcttcaattcctgtgtgttgtattactactggtacaatctccaattcttgtgaacttatgtatttggacttgtgtgaatttgtgatatgaacatatatccatgtgtttgaaatctatattgtatgtgatattttgtgttgcatgtgatattatgtttgtct

SEQ ID NO: 48085 - DNA, 2310 bp, Zea Mays
cgcgcgcgcccgccgctacctgccagtcgcgcgcctgccgccagcgccccgccgccaccccacgcgcgccccaccgcccccgcgcgccggctcgtgtactccgctgtccgctcccattccactatggcctagctgcgtgctgctctggcatcggtcggtggataagcccagcaggcaagcaggcaggagactaggagagctcagcactgcacgcacgctcccctccccttactggccaaatcgatcgtccccttcaggttccaggctccggagcttgctttacttcaggttgtctagctgcatgttgaagtataattccggatagattcacagtttttatccgctaggaagggtggtaaaaggctaagtttttttttatgaattctctgcgttcttcactaatccccaccctaatcagtaaacacgcttacgaatcgtttcctaatcgtgtgacagggacaacaatgacctcagggacaacaatgacctccaagacgagcggcagcataaccaccaacctgagcaccacggggaagctctcctccgtgggcagcagcttcatggcgtctgccggcagccgcagcaccagcggcggggtttgacaagggggccaagtactccgacgaccagatcctcgaggcgcccaacctccgcaccttcacattcatagagctcaagacggccaccaagaacttccgtccagacagcgtcctcggcgaaggagggttcgggagagtctacaaagggtgggtggatgagaagaccatggcgccgaccaagaacgacaccggcatggttgttgcggtcaagaagctcaactcggagagcatgcatgggtttgaggaatggcagggttgcaattttcagagatcgtgagtcagagcgcaaggatcctgattatgacagaagctatgacaggccagttatacatggtcatataccaccccgcgtgccccgcgccgccagcccgcgcctccaccccgtgcgatctctgtttagatcaatcgagttgagtttgttcattccaagtcattattgcatagagatatcaagcctgataattttctcatgggtctcgggaaaagagaaaaccaggtttatgttatcgattttggacttgcaaagaagtacagagatacatcaacacaccagcacattccatacagaacaaagccggagggatgacatggaataaaaaacaaaagtattcgggaaggttggtttaatacactgtcagccttccatggtagggcctgaaagctgggaacaaaaaacaaaagtatgaaaagatcagcgaaaggaaaattgctacttcaactgaggctctctgccgtggatatcctaccaaatttgcttcttacttccattactgtcgctcacagcgtttcgaagatgcaccggactatcagtacctgaagaatttgttcagagacctttttattcgggaaggttttcagtttgattatgtttttgactggaccattctaaagtaccaacaggcatagatgaccactgcaccacctcgtgcaattgtctgtacaaggaataaacttaccctcctaccttaagtagtagtagagattgtattgggtatagaaatgtacttcttttgttatgttatatttcattgccccctctctattttggttcctggccttggtttttgtttcttgtattttttttccatgtcgtctagctactgtagttgcccatcgtcaaagttttgtagagtggttagtgtttttggttgacagacattggtgctagatttgggatcagccttcctaaacagtaccatttactttagctcaatgatatgaataatgcttgtttgcaggacatattgctaagaatctgccacattatgtttgcttgaggtattaatttatccaggtgtttaatgctggagtacagttagaagatccctaatcaattgcttctcatttcagtcgtgtaactttattcatgctacaacaacgactttgagcgaacatgagaccactgagctctagagtgaatgaaggacgtcgtctttggaagtcagacatcacctagagctagggtgtccattcttgacatgtttctcttagtgataggtggatactgtctagttaggaacagagtcttgagggattgatggacgcatgcatcttcaattcctgtgtgttgtattactactggtacaatctccaattcttgtgaacttatgtatttggacttgtgtgaatttgtgatatgaacatatatccatgtgtttgaaatctatattgtatgtgatattttgtgttgcatgtgatattatgtttgtct

SEQ ID NO: 48086 - DNA, 1741 bp, Zea Mays
cgcgcgcgcccgccgctacctgccagtcgcgcgcctgccgccagcgccccgccgccaccccacgcgcgccccaccgcccccgcgcgccggctcgtgtactccgctgtccgctcccattccactatggcctagctgcgtgctgctctggcatcggtcggtggataagcccagcaggcaagcaggcaggagactaggagagctcagcactgcacgcacgctcccctccccttactggccaaatcgatcgtccccttcaggttccaggctccggagcttgctttacttcagggacaacaatgacctcagggacaacaatgacctccaagacgagcggcagcataaccaccaacctgagcaccacggggaagctctcctccgtgggcagcagcttcatggcgtctgccggcagccgcagcaccagcggcggggtttgacaagggggccaagtactccgacgaccagatcctcgaggcgcccaacctccgcaccttcacattcatagagctcaagacggccaccaagaacttccgtccagacagcgtcctcggcgaaggagggttcgggagagtctacaaagggtgggtggatgagaagaccatggcgccgaccaagaacgacaccggcatggttgttgcggtcaagaagctcaactcggagagcatgcatgggtttgaggaatggcagagatcgtgagtcagagcgcaaggatcctgattatgacagaagctatgacagatcaatcgagttgagtttgttcattccaagtcattattgcatagagatatcaagcctgataattttctcatgggtctcgggaaaagagaaaaccaggtttatgttatcgattttggacttgcaaagaagtacagagatacatcaacacaccagcacattccatacagaacaaagccggagggatgacatggaataaaaaacaaaagtattcgggaaggttggtttaatacactgtcagccttccatggtagggcctgaaagctgggaacaaaaaacaaaagtatgaaaagatcagcgaaaggaaaattgctacttcaactgaggctctctgccgtggatatcctaccaaatttgcttcttacttccattactgtcgctcacagcgtttcgaagatgcaccggactatcagtacctgaagaatttgttcagagacctttttattcgggaaggttttcagtttgattatgtttttgactggaccattctaaagtaccaacaggcatagatgaccactgcaccacctcgtgcaattgacatattgctaagaatctgccacattatgtttgcttgaggtattaatttatccaggtgtttaatgctggagtacagttagaagatccctaatcaattgcttctcatttcagtcgtgtaactttattcatgctacaacaacgactttgagcgaacatgagaccactgagctctagagtgaatgaaggacgtcgtctttggaagtcagacatcacctagagctagggtgtccattcttgacatgtttctcttagtgataggtggatactgtctagttaggaacagagtcttgagggattgatggacgcatgcatcttcaattcctgtgtgttgtattactactggtacaatctccaattcttgtgaacttatgtatttggacttgtgtgaatttgtgatatgaacatatatccatgtgtttgaaatctatattgtatgtgatattttgtgttgcatgtgatattatgtttgtct

SEQ ID NO: 48087 - DNA, 3041 bp, Zea Mays
cgcgcgcgcccgccgctacctgccagtcgcgcgcctgccgccagcgccccgccgccaccccacgcgcgccccaccgcccccgcgcgccggctcgtgtactccgctgtccgctcccattccactatggcctagctgcgtgctgctctggcatcggtcggtggataagcccagcaggcaagcaggcaggagactaggagagctcagcactgcacgcacgctcccctccccttactggccaaatcgatcgtccccttcaggttccaggctccggagcttgctttacttcaggttgtctagctgcatgttgaagtataattccggatgtatccttgaagtgtaaacatttaaggattgtgtaattctttgggtaccaaggcccatttttaaattttaaacaatccagtttttgcttgaatgtatcatcagagattcgcagtagggaacatcagagattaatatttcttgtcccttgaatgtatcatggcttgtttagaggcgggggcagcactttctgatctcaaattttgttcttcacttatatttatttcatcagagattcacagtttttatccgctaggaagggtggtaaaaggctaagtttttttttatgaattctctgcgttcttcactaatccccaccctaatcagtaaacacgcttacgaatcgtttcctaatcgtgtgacagggacaacaatgacctcagggacaacaatgacctccaagacgagcggcagcataaccaccaacctgagcaccacggggaagctctcctccgtgggcagcagcttcatggcgtctgccggcagccgcagcaccagcggcggggtttgacaagggggccaagtactccgacgaccagatcctcgaggcgcccaacctccgcaccttcacattcatagagctcaagacggccaccaagaacttccgtccagacagcgtcctcggcgaaggagggttcgggagagtctacaaagggtgggtggatgagaagaccatggcgccgaccaagaacgacaccggcatggttgttgcggtcaagaagctcaactcggagagcatgcatgggtttgaggaatggcagagatcgtgagtcagagcgcaaggatcctgattatgacagaagctatgacaggaaacactaaatcttgtgatgtactccctctgttcctaagtctccagcgtattagtcatctgcacagtgaccaaggagcgctgatatgcttttactcgcagtctttttaaccgtgcactttcgaataaatctgcaattttggatcgtatcagagatgcagtgtttaagaaagtgagtttgtttcctgaattttatatttccaccaaatgtcattgattagcattgttacaattagaattttctacgtatatggtaataataacccactgaggctttgtttggataatgtagtattgacaccaatccactgaggctttgtatagtcattcccttgtgctcaactctttgtgatacaactatgatcagttgataaaagtggcacataacttgagcaagttttatattttgagtacctccctattgtaacatatcttgttacacttctaattttgtggctagaacatgaggtaactggtaagagagttcctttttcatttcatgtggtagggtttccaggccagttatacatggtcatataccaccccgcgtgccccgcgccgccagcccgcgcctccaccccgtgcgatctctgtttagatcaatcgagttgagtttgttcattccaagtcattattgcatagagatatcaagcctgataattttctcatgggtctcgggaaaagagaaaaccaggtttatgttatcgattttggacttgcaaagaagtacagagatacatcaacacaccagcacattccatacagaacaaagccggagggatgacatggaataaaaaacaaaagtattcgggaaggttggtttaatacactgtcagccttccatggtagggcctgaaagctgggaacaaaaaacaaaagtatgaaaagatcagcgaaaggaaaattgctacttcaactgaggctctctgccgtggatatcctaccaaatttgcttcttacttccattactgtcgctcacagcgtttcgaagatgcaccggactatcagtacctgaagaatttgttcagagacctttttattcgggaaggttttcagtttgattatgtttttgactggaccattctaaagtaccaacaggcatagatgaccactgcaccacctcgtgcaattgtctgtacaaggaataaacttaccctcctaccttaagtagtagtagagattgtattgggtatagaaatgtacttcttttgttatgttatatttcattgccccctctctattttggttcctggccttggtttttgtttcttgtattttttttccatgtcgtctagctactgtagttgcccatcgtcaaagttttgtagagtggttagtgtttttggttgacagacattggtgctagatttgggatcagccttcctaaacagtaccatttactttagctcaatgatatgaataatgcttgtttgcaggacatattgctaagaatctgccacattatgtttgcttgaggtattaatttatccaggtgtttaatgctggagtacagttagaagatccctaatcaattgcttctcatttcagtcgtgtaactttattcatgctacaacaacgactttgagcgaacatgagaccactgagctctagagtgaatgaaggacgtcgtctttggaagtcagacatcacctagagctagggtgtccattcttgacatgtttctcttagtgataggtggatactgtctagttaggaacagagtcttgagggattgatggacgcatgcatcttcaattcctgtgtgttgtattactactggtacaatctccaattcttgtgaacttatgtatttggacttgtgtgaatttgtgatatgaacatatatccatgtgtttgaaatctatattgtatgtgatattttgtgttgcatgtgatattatgtttgtct

SEQ ID NO: 48088 - DNA, 2561 bp, Zea Mays
cgcgcgcgcccgccgctacctgccagtcgcgcgcctgccgccagcgccccgccgccaccccacgcgcgccccaccgcccccgcgcgccggctcgtgtactccgctgtccgctcccattccactatggcctagctgcgtgctgctctggcatcggtcggtggataagcccagcaggcaagcaggcaggagactaggagagctcagcactgcacgcacgctcccctccccttactggccaaatcgatcgtccccttcaggttccaggctccggagcttgctttacttcagggacaacaatgacctcagggacaacaatgacctccaagacgagcggcagcataaccaccaacctgagcaccacggggaagctctcctccgtgggcagcagcttcatggcgtctgccggcagccgcagcaccagcggcggggtttgacaagggggccaagtactccgacgaccagatcctcgaggcgcccaacctccgcaccttcacattcatagagctcaagacggccaccaagaacttccgtccagacagcgtcctcggcgaaggagggttcgggagagtctacaaagggtgggtggatgagaagaccatggcgccgaccaagaacgacaccggcatggttgttgcggtcaagaagctcaactcggagagcatgcatgggtttgaggaatggcagggttgcaattttcagagatcgtgagtcagagcgcaaggatcctgattatgacagaagctatgacaggtcagtttcttttgtcgtaacacatctctttgatgctaaactcttagcgcaccgtagacaggaaagcttttatggctatttttaccatgcttctgctctgtagtttcttatgcattgtatgaagttcttcatttgactatcgtccaaaacttttcaagtcaactgcaaaatatcagtttgattgctaatgatgggatcctagtgaagcatgtcaataagaggattctttctttttataggaaacactaaatcttgtgatgtactccctctgttcctaagtctccagcgtattagtcatctgcacagtgaccaaggagcgctgatatgcttttactcgcagtctttttaaccgtgcactttcgaataaatctgcaattttggatcgtatcagagatgcagtgtttaagaaaggtttccaggccagttatacatggtcatataccaccccgcgtgccccgcgccgccagcccgcgcctccaccccgtgcgatctctgtttagatcaatcgagttgagtttgttcattccaagtcattattgcatagagatatcaagcctgataattttctcatgggtctcgggaaaagagaaaaccaggtttatgttatcgattttggacttgcaaagaagtacagagatacatcaacacaccagcacattccatacagaacaaagccggagggatgacatggaataaaaaacaaaagtattcgggaaggttggtttaatacactgtcagccttccatggtagggcctgaaagctgggaacaaaaaacaaaagtatgaaaagatcagcgaaaggaaaattgctacttcaactgaggctctctgccgtggatatcctaccaaatttgcttcttacttccattactgtcgctcacagcgtttcgaagatgcaccggactatcagtacctgaagaatttgttcagagacctttttattcgggaaggttttcagtttgattatgtttttgactggaccattctaaagtaccaacaggcatagatgaccactgcaccacctcgtgcaattgtctgtacaaggaataaacttaccctcctaccttaagtagtagtagagattgtattgggtatagaaatgtacttcttttgttatgttatatttcattgccccctctctattttggttcctggccttggtttttgtttcttgtattttttttccatgtcgtctagctactgtagttgcccatcgtcaaagttttgtagagtggttagtgtttttggttgacagacattggtgctagatttgggatcagccttcctaaacagtaccatttactttagctcaatgatatgaataatgcttgtttgcaggacatattgctaagaatctgccacattatgtttgcttgaggtattaatttatccaggtgtttaatgctggagtacagttagaagatccctaatcaattgcttctcatttcagtcgtgtaactttattcatgctacaacaacgactttgagcgaacatgagaccactgagctctagagtgaatgaaggacgtcgtctttggaagtcagacatcacctagagctagggtgtccattcttgacatgtttctcttagtgataggtggatactgtctagttaggaacagagtcttgagggattgatggacgcatgcatcttcaattcctgtgtgttgtattactactggtacaatctccaattcttgtgaacttatgtatttggacttgtgtgaatttgtgatatgaacatatatccatgtgtttgaaatctatattgtatgtgatattttgtgttgcatgtgatattatgtttgtct

SEQ ID NO: 48089 - DNA, 1999 bp, Zea Mays
cgcgcgcgcccgccgctacctgccagtcgcgcgcctgccgccagcgccccgccgccaccccacgcgcgccccaccgcccccgcgcgccggctcgtgtactccgctgtccgctcccattccactatggcctagctgcgtgctgctctggcatcggtcggtggataagcccagcaggcaagcaggcaggagactaggagagctcagcactgcacgcacgctcccctccccttactggccaaatcgatcgtccccttcaggttccaggctccggagcttgctttacttcaggttgtctagctgcatgttgaagtataattccggatagattcacagtttttatccgctaggaagggtggtaaaaggctaagtttttttttatgaattctctgcgttcttcactaatccccaccctaatcagtaaacacgcttacgaatcgtttcctaatcgtgtgacagggacaacaatgacctcagggacaacaatgacctccaagacgagcggcagcataaccaccaacctgagcaccacggggaagctctcctccgtgggcagcagcttcatggcgtctgccggcagccgcagcaccagcggcggggtttgacaagggggccaagtactccgacgaccagatcctcgaggcgcccaacctccgcaccttcacattcatagagctcaagacggccaccaagaacttccgtccagacagcgtcctcggcgaaggagggttcgggagagtctacaaagggtgggtggatgagaagaccatggcgccgaccaagaacgacaccggcatggttgttgcggtcaagaagctcaactcggagagcatgcatgggtttgaggaatggcagagatcgtgagtcagagcgcaaggatcctgattatgacagaagctatgacagggtttccaggccagttatacatggtcatataccaccccgcgtgccccgcgccgccagcccgcgcctccaccccgtgcgatctctgtttagatcaatcgagttgagtttgttcattccaagtcattattgcatagagatatcaagcctgataattttctcatgggtctcgggaaaagagaaaaccaggtttatgttatcgattttggacttgcaaagaagtacagagatacatcaacacaccagcacattccatacagaacaaagccggagggatgacatggaataaaaaacaaaagtattcgggaaggttggtttaatacactgtcagccttccatggtagggcctgaaagctgggaacaaaaaacaaaagtatgaaaagatcagcgaaaggaaaattgctacttcaactgaggctctctgccgtggatatcctaccaaatttgcttcttacttccattactgtcgctcacagcgtttcgaagatgcaccggactatcagtacctgaagaatttgttcagagacctttttattcgggaaggttttcagtttgattatgtttttgactggaccattctaaagtaccaacaggcatagatgaccactgcaccacctcgtgcaattgacatattgctaagaatctgccacattatgtttgcttgaggtattaatttatccaggtgtttaatgctggagtacagttagaagatccctaatcaattgcttctcatttcagtcgtgtaactttattcatgctacaacaacgactttgagcgaacatgagaccactgagctctagagtgaatgaaggacgtcgtctttggaagtcagacatcacctagagctagggtgtccattcttgacatgtttctcttagtgataggtggatactgtctagttaggaacagagtcttgagggattgatggacgcatgcatcttcaattcctgtgtgttgtattactactggtacaatctccaattcttgtgaacttatgtatttggacttgtgtgaatttgtgatatgaacatatatccatgtgtttgaaatctatattgtatgtgatattttgtgttgcatgtgatattatgtttgtct

SEQ ID NO: 48090 - DNA, 2229 bp, Zea Mays
cgcgcgcgcccgccgctacctgccagtcgcgcgcctgccgccagcgccccgccgccaccccacgcgcgccccaccgcccccgcgcgccggctcgtgtactccgctgtccgctcccattccactatggcctagctgcgtgctgctctggcatcggtcggtggataagcccagcaggcaagcaggcaggagactaggagagctcagcactgcacgcacgctcccctccccttactggccaaatcgatcgtccccttcaggttccaggctccggagcttgctttacttcaggttgtctagctgcatgttgaagtataattccggatgtatccttgaagtgtaaacatttaaggattgtgtaattctttgggtaccaaggcccatttttaaattttaaacaatccagtttttgcttgaatgtatcatcagagattcgcagtagggaacatcagagattaatatttcttgtcccttgaatgtatcatggcttgtttagaggcgggggcagcactttctgatctcaaattttgttcttcacttatatttatttcatcagagattcacagtttttatccgctaggaagggtggtaaaaggctaagtttttttttatgaattctctgcgttcttcactaatccccaccctaatcagtaaacacgcttacgaatcgtttcctaatcgtgtgacagggacaacaatgacctcagggacaacaatgacctccaagacgagcggcagcataaccaccaacctgagcaccacggggaagctctcctccgtgggcagcagcttcatggcgtctgccggcagccgcagcaccagcggcggggtttgacaagggggccaagtactccgacgaccagatcctcgaggcgcccaacctccgcaccttcacattcatagagctcaagacggccaccaagaacttccgtccagacagcgtcctcggcgaaggagggttcgggagagtctacaaagggtgggtggatgagaagaccatggcgccgaccaagaacgacaccggcatggttgttgcggtcaagaagctcaactcggagagcatgcatgggtttgaggaatggcagagatcgtgagtcagagcgcaaggatcctgattatgacagaagctatgacagggtttccaggccagttatacatggtcatataccaccccgcgtgccccgcgccgccagcccgcgcctccaccccgtgcgatctctgtttagatcaatcgagttgagtttgttcattccaagtcattattgcatagagatatcaagcctgataattttctcatgggtctcgggaaaagagaaaaccaggtttatgttatcgattttggacttgcaaagaagtacagagatacatcaacacaccagcacattccatacagaacaaagccggagggatgacatggaataaaaaacaaaagtattcgggaaggttggtttaatacactgtcagccttccatggtagggcctgaaagctgggaacaaaaaacaaaagtatgaaaagatcagcgaaaggaaaattgctacttcaactgaggctctctgccgtggatatcctaccaaatttgcttcttacttccattactgtcgctcacagcgtttcgaagatgcaccggactatcagtacctgaagaatttgttcagagacctttttattcgggaaggttttcagtttgattatgtttttgactggaccattctaaagtaccaacaggcatagatgaccactgcaccacctcgtgcaattgacatattgctaagaatctgccacattatgtttgcttgaggtattaatttatccaggtgtttaatgctggagtacagttagaagatccctaatcaattgcttctcatttcagtcgtgtaactttattcatgctacaacaacgactttgagcgaacatgagaccactgagctctagagtgaatgaaggacgtcgtctttggaagtcagacatcacctagagctagggtgtccattcttgacatgtttctcttagtgataggtggatactgtctagttaggaacagagtcttgagggattgatggacgcatgcatcttcaattcctgtgtgttgtattactactggtacaatctccaattcttgtgaacttatgtatttggacttgtgtgaatttgtgatatgaacatatatccatgtgtttgaaatctatattgtatgtgatattttgtgttgcatgtgatattatgtttgtct

SEQ ID NO: 48091 - DNA, 2322 bp, Zea Mays
cgcgcgcgcccgccgctacctgccagtcgcgcgcctgccgccagcgccccgccgccaccccacgcgcgccccaccgcccccgcgcgccggctcgtgtactccgctgtccgctcccattccactatggcctagctgcgtgctgctctggcatcggtcggtggataagcccagcaggcaagcaggcaggagactaggagagctcagcactgcacgcacgctcccctccccttactggccaaatcgatcgtccccttcaggttccaggctccggagcttgctttacttcagggacaacaatgacctcagggacaacaatgacctccaagacgagcggcagcataaccaccaacctgagcaccacggggaagctctcctccgtgggcagcagcttcatggcgtctgccggcagccgcagcaccagcggcggggtttgacaagggggccaagtactccgacgaccagatcctcgaggcgcccaacctccgcaccttcacattcatagagctcaagacggccaccaagaacttccgtccagacagcgtcctcggcgaaggagggttcgggagagtctacaaagggtgggtggatgagaagaccatggcgccgaccaagaacgacaccggcatggttgttgcggtcaagaagctcaactcggagagcatgcatgggtttgaggaatggcagggttgcaattttcagagatcgtgagtcagagcgcaaggatcctgattatgacagaagctatgacaggaaacactaaatcttgtgatgtactccctctgttcctaagtctccagcgtattagtcatctgcacagtgaccaaggagcgctgatatgcttttactcgcagtctttttaaccgtgcactttcgaataaatctgcaattttggatcgtatcagagatgcagtgtttaagaaaggtttccaggccagttatacatggtcatataccaccccgcgtgccccgcgccgccagcccgcgcctccaccccgtgcgatctctgtttagatcaatcgagttgagtttgttcattccaagtcattattgcatagagatatcaagcctgataattttctcatgggtctcgggaaaagagaaaaccaggtttatgttatcgattttggacttgcaaagaagtacagagatacatcaacacaccagcacattccatacagaacaaagccggagggatgacatggaataaaaaacaaaagtattcgggaaggttggtttaatacactgtcagccttccatggtagggcctgaaagctgggaacaaaaaacaaaagtatgaaaagatcagcgaaaggaaaattgctacttcaactgaggctctctgccgtggatatcctaccaaatttgcttcttacttccattactgtcgctcacagcgtttcgaagatgcaccggactatcagtacctgaagaatttgttcagagacctttttattcgggaaggttttcagtttgattatgtttttgactggaccattctaaagtaccaacaggcatagatgaccactgcaccacctcgtgcaattgtctgtacaaggaataaacttaccctcctaccttaagtagtagtagagattgtattgggtatagaaatgtacttcttttgttatgttatatttcattgccccctctctattttggttcctggccttggtttttgtttcttgtattttttttccatgtcgtctagctactgtagttgcccatcgtcaaagttttgtagagtggttagtgtttttggttgacagacattggtgctagatttgggatcagccttcctaaacagtaccatttactttagctcaatgatatgaataatgcttgtttgcaggacatattgctaagaatctgccacattatgtttgcttgaggtattaatttatccaggtgtttaatgctggagtacagttagaagatccctaatcaattgcttctcatttcagtcgtgtaactttattcatgctacaacaacgactttgagcgaacatgagaccactgagctctagagtgaatgaaggacgtcgtctttggaagtcagacatcacctagagctagggtgtccattcttgacatgtttctcttagtgataggtggatactgtctagttaggaacagagtcttgagggattgatggacgcatgcatcttcaattcctgtgtgttgtattactactggtacaatctccaattcttgtgaacttatgtatttggacttgtgtgaatttgtgatatgaacatatatccatgtgtttgaaatctatattgtatgtgatattttgtgttgcatgtgatattatgtttgtct

SEQ ID NO: 48092 - DNA, 2743 bp, Zea Mays
cgcgcgcgcccgccgctacctgccagtcgcgcgcctgccgccagcgccccgccgccaccccacgcgcgccccaccgcccccgcgcgccggctcgtgtactccgctgtccgctcccattccactatggcctagctgcgtgctgctctggcatcggtcggtggataagcccagcaggcaagcaggcaggagactaggagagctcagcactgcacgcacgctcccctccccttactggccaaatcgatcgtccccttcaggttccaggctccggagcttgctttacttcagggacaacaatgacctcagggacaacaatgacctccaagacgagcggcagcataaccaccaacctgagcaccacggggaagctctcctccgtgggcagcagcttcatggcgtctgccggcagccgcagcaccagcggcggggtttgacaagggggccaagtactccgacgaccagatcctcgaggcgcccaacctccgcaccttcacattcatagagctcaagacggccaccaagaacttccgtccagacagcgtcctcggcgaaggagggttcgggagagtctacaaagggtgggtggatgagaagaccatggcgccgaccaagaacgacaccggcatggttgttgcggtcaagaagctcaactcggagagcatgcatgggtttgaggaatggcagggttgcaattttcagagatcgtgagtcagagcgcaaggatcctgattatgacagaagctatgacaggaaacactaaatcttgtgatgtactccctctgttcctaagtctccagcgtattagtcatctgcacagtgaccaaggagcgctgatatgcttttactcgcagtctttttaaccgtgcactttcgaataaatctgcaattttggatcgtatcagagatgcagtgtttaagaaagtgagtttgtttcctgaattttatatttccaccaaatgtcattgattagcattgttacaattagaattttctacgtatatggtaataataacccactgaggctttgtttggataatgtagtattgacaccaatccactgaggctttgtatagtcattcccttgtgctcaactctttgtgatacaactatgatcagttgataaaagtggcacataacttgagcaagttttatattttgagtacctccctattgtaacatatcttgttacacttctaattttgtggctagaacatgaggtaactggtaagagagttcctttttcatttcatgtggtagggtttccaggccagttatacatggtcatataccaccccgcgtgccccgcgccgccagcccgcgcctccaccccgtgcgatctctgtttaggttcaagtttccacgaagcacatttctgctcaaccatctgctttcatttaactgcattatatattaatgtcctgtatttttctagatcaatcgagttgagtttgttcattccaagtcattattgcatagagatatcaagcctgataattttctcatgggtctcgggaaaagagaaaaccaggtttatgttatcgattttggacttgcaaagaagtacagagatacatcaacacaccagcacattccatacagaacaaagccggagggatgacatggaataaaaaacaaaagtattcgggaaggttggtttaatacactgtcagccttccatggtagggcctgaaagctgggaacaaaaaacaaaagtatgaaaagatcagcgaaaggaaaattgctacttcaactgaggctctctgccgtggatatcctaccaaatttgcttcttacttccattactgtcgctcacagcgtttcgaagatgcaccggactatcagtacctgaagaatttgttcagagacctttttattcgggaaggttttcagtttgattatgtttttgactggaccattctaaagtaccaacaggcatagatgaccactgcaccacctcgtgcaattgtctgtacaaggaataaacttaccctcctaccttaagtagtagtagagattgtattgggtatagaaatgtacttcttttgttatgttatatttcattgccccctctctattttggttcctggccttggtttttgtttcttgtattttttttccatgtcgtctagctactgtagttgcccatcgtcaaagttttgtagagtggttagtgtttttggttgacagacattggtgctagatttgggatcagccttcctaaacagtaccatttactttagctcaatgatatgaataatgcttgtttgcaggacatattgctaagaatctgccacattatgtttgcttgaggtattaatttatccaggtgtttaatgctggagtacagttagaagatccctaatcaattgcttctcatttcagtcgtgtaactttattcatgctacaacaacgactttgagcgaacatgagaccactgagctctagagtgaatgaaggacgtcgtctttggaagtcagacatcacctagagctagggtgtccattcttgacatgtttctcttagtgataggtggatactgtctagttaggaacagagtcttgagggattgatggacgcatgcatcttcaattcctgtgtgttgtattactactggtacaatctccaattcttgtgaacttatgtatttggacttgtgtgaatttgtgatatgaacatatatccatgtgtttgaaatctatattgtatgtgatattttgtgttgcatgtgatattatgtttgtct

SEQ ID NO: 48093 - DNA, 2710 bp, Zea Mays
cgcgcgcgcccgccgctacctgccagtcgcgcgcctgccgccagcgccccgccgccaccccacgcgcgccccaccgcccccgcgcgccggctcgtgtactccgctgtccgctcccattccactatggcctagctgcgtgctgctctggcatcggtcggtggataagcccagcaggcaagcaggcaggagactaggagagctcagcactgcacgcacgctcccctccccttactggccaaatcgatcgtccccttcaggttccaggctccggagcttgctttacttcaggttgtctagctgcatgttgaagtataattccggatagattcacagtttttatccgctaggaagggtggtaaaaggctaagtttttttttatgaattctctgcgttcttcactaatccccaccctaatcagtaaacacgcttacgaatcgtttcctaatcgtgtgacagggacaacaatgacctcagggacaacaatgacctccaagacgagcggcagcataaccaccaacctgagcaccacggggaagctctcctccgtgggcagcagcttcatggcgtctgccggcagccgcagcaccagcggcggggtttgacaagggggccaagtactccgacgaccagatcctcgaggcgcccaacctccgcaccttcacattcatagagctcaagacggccaccaagaacttccgtccagacagcgtcctcggcgaaggagggttcgggagagtctacaaagggtgggtggatgagaagaccatggcgccgaccaagaacgacaccggcatggttgttgcggtcaagaagctcaactcggagagcatgcatgggtttgaggaatggcagagatcgtgagtcagagcgcaaggatcctgattatgacagaagctatgacagtctttttaaccgtgcactttcgaataaatctgcaattttggatcgtatcagagatgcagtgtttaagaaagtgagtttgtttcctgaattttatatttccaccaaatgtcattgattagcattgttacaattagaattttctacgtatatggtaataataacccactgaggctttgtttggataatgtagtattgacaccaatccactgaggctttgtatagtcattcccttgtgctcaactctttgtgatacaactatgatcagttgataaaagtggcacataacttgagcaagttttatattttgagtacctccctattgtaacatatcttgttacacttctaattttgtggctagaacatgaggtaactggtaagagagttcctttttcatttcatgtggtagggtttccaggccagttatacatggtcatataccaccccgcgtgccccgcgccgccagcccgcgcctccaccccgtgcgatctctgtttagatcaatcgagttgagtttgttcattccaagtcattattgcatagagatatcaagcctgataattttctcatgggtctcgggaaaagagaaaaccaggtttatgttatcgattttggacttgcaaagaagtacagagatacatcaacacaccagcacattccatacagaacaaagccggagggatgacatggaataaaaaacaaaagtattcgggaaggttggtttaatacactgtcagccttccatggtagggcctgaaagctgggaacaaaaaacaaaagtatgaaaagatcagcgaaaggaaaattgctacttcaactgaggctctctgccgtggatatcctaccaaatttgcttcttacttccattactgtcgctcacagcgtttcgaagatgcaccggactatcagtacctgaagaatttgttcagagacctttttattcgggaaggttttcagtttgattatgtttttgactggaccattctaaagtaccaacaggcatagatgaccactgcaccacctcgtgcaattgtctgtacaaggaataaacttaccctcctaccttaagtagtagtagagattgtattgggtatagaaatgtacttcttttgttatgttatatttcattgccccctctctattttggttcctggccttggtttttgtttcttgtattttttttccatgtcgtctagctactgtagttgcccatcgtcaaagttttgtagagtggttagtgtttttggttgacagacattggtgctagatttgggatcagccttcctaaacagtaccatttactttagctcaatgatatgaataatgcttgtttgcaggacatattgctaagaatctgccacattatgtttgcttgaggtattaatttatccaggtgtttaatgctggagtacagttagaagatccctaatcaattgcttctcatttcagtcgtgtaactttattcatgctacaacaacgactttgagcgaacatgagaccactgagctctagagtgaatgaaggacgtcgtctttggaagtcagacatcacctagagctagggtgtccattcttgacatgtttctcttagtgataggtggatactgtctagttaggaacagagtcttgagggattgatggacgcatgcatcttcaattcctgtgtgttgtattactactggtacaatctccaattcttgtgaacttatgtatttggacttgtgtgaatttgtgatatgaacatatatccatgtgtttgaaatctatattgtatgtgatattttgtgttgcatgtgatattatgtttgtct

SEQ ID NO: 48094 - DNA, 2161 bp, Zea Mays
cgcgcgcgcccgccgctacctgccagtcgcgcgcctgccgccagcgccccgccgccaccccacgcgcgccccaccgcccccgcgcgccggctcgtgtactccgctgtccgctcccattccactatggcctagctgcgtgctgctctggcatcggtcggtggataagcccagcaggcaagcaggcaggagactaggagagctcagcactgcacgcacgctcccctccccttactggccaaatcgatcgtccccttcaggttccaggctccggagcttgctttacttcaggttgtctagctgcatgttgaagtataattccggatgtatccttgaagtgtaaacatttaaggattgtgtaattctttgggtaccaaggcccatttttaaattttaaacaatccagtttttgcttgaatgtatcatcagagattcgcagtagggaacatcagagattaatatttcttgtcccttgaatgtatcatggcttgtttagaggcgggggcagcactttctgatctcaaattttgttcttcacttatatttatttcatcagagattcacagtttttatccgctaggaagggtggtaaaaggctaagtttttttttatgaattctctgcgttcttcactaatccccaccctaatcagtaaacacgcttacgaatcgtttcctaatcgtgtgacagggacaacaatgacctcagggacaacaatgacctccaagacgagcggcagcataaccaccaacctgagcaccacggggaagctctcctccgtgggcagcagcttcatggcgtctgccggcagccgcagcaccagcggcggggtttgacaagggggccaagtactccgacgaccagatcctcgaggcgcccaacctccgcaccttcacattcatagagctcaagacggccaccaagaacttccgtccagacagcgtcctcggcgaaggagggttcgggagagtctacaaagggtgggtggatgagaagaccatggcgccgaccaagaacgacaccggcatggttgttgcggtcaagaagctcaactcggagagcatgcatgggtttgaggaatggcagggttgcaattttcagagatcgtgagtcagagcgcaaggatcctgattatgacagaagctatgacagggtttccaggccagttatacatggtcatataccaccccgcgtgccccgcgccgccagcccgcgcctccaccccgtgcgatctctgtttagatcaatcgagttgagtttgttcattccaagtcattattgcatagagatatcaagcctgataattttctcatgggtctcgggaaaagagaaaaccaggtttatgttatcgattttggacttgcaaagaagtacagagatacatcaacacaccagcacattccatacagaacaaagccggagggatgacatggaataaaaaacaaaagtattcgggaaggttggtttaatacactgtcagccttccatggtagggcctgaaagctgggaacaaaaaacaaaagtatgaaaagatcagcgaaaggaaaattgctacttcaactgaggctctctgccgtggatatcctaccaaatttgcttcttacttccattactgtcgctcacagcgtttcgaagatgcaccggactatcagtacctgaagaatttgttcagagacctttttattcgggaaggacatattgctaagaatctgccacattatgtttgcttgaggtattaatttatccaggtgtttaatgctggagtacagttagaagatccctaatcaattgcttctcatttcagtcgtgtaactttattcatgctacaacaacgactttgagcgaacatgagaccactgagctctagagtgaatgaaggacgtcgtctttggaagtcagacatcacctagagctagggtgtccattcttgacatgtttctcttagtgataggtggatactgtctagttaggaacagagtcttgagggattgatggacgcatgcatcttcaattcctgtgtgttgtattactactggtacaatctccaattcttgtgaacttatgtatttggacttgtgtgaatttgtgatatgaacatatatccatgtgtttgaaatctatattgtatgtgatattttgtgttgcatgtgatattatgtttgtct

SEQ ID NO: 48095 - DNA, 2214 bp, Zea Mays
cgcgcgcgcccgccgctacctgccagtcgcgcgcctgccgccagcgccccgccgccaccccacgcgcgccccaccgcccccgcgcgccggctcgtgtactccgctgtccgctcccattccactatggcctagctgcgtgctgctctggcatcggtcggtggataagcccagcaggcaagcaggcaggagactaggagagctcagcactgcacgcacgctcccctccccttactggccaaatcgatcgtccccttcaggttccaggctccggagcttgctttacttcaggttgtctagctgcatgttgaagtataattccggatagattcacagtttttatccgctaggaagggtggtaaaaggctaagtttttttttatgaattctctgcgttcttcactaatccccaccctaatcagtaaacacgcttacgaatcgtttcctaatcgtgtgacagggacaacaatgacctcagggacaacaatgacctccaagacgagcggcagcataaccaccaacctgagcaccacggggaagctctcctccgtgggcagcagcttcatggcgtctgccggcagccgcagcaccagcggcggggtttgacaagggggccaagtactccgacgaccagatcctcgaggcgcccaacctccgcaccttcacattcatagagctcaagacggccaccaagaacttccgtccagacagcgtcctcggcgaaggagggttcgggagagtctacaaagggtgggtggatgagaagaccatggcgccgaccaagaacgacaccggcatggttgttgcggtcaagaagctcaactcggagagcatgcatgggtttgaggaatggcagagatcgtgagtcagagcgcaaggatcctgattatgacagaagctatgacagatcaatcgagttgagtttgttcattccaagtcattattgcatagagatatcaagcctgataattttctcatgggtctcgggaaaagagaaaaccaggtttatgttatcgattttggacttgcaaagaagtacagagatacatcaacacaccagcacattccatacagaacaaagccggagggatgacatggaataaaaaacaaaagtattcgggaaggttggtttaatacactgtcagccttccatggtagggcctgaaagctgggaacaaaaaacaaaagtatgaaaagatcagcgaaaggaaaattgctacttcaactgaggctctctgccgtggatatcctaccaaatttgcttcttacttccattactgtcgctcacagcgtttcgaagatgcaccggactatcagtacctgaagaatttgttcagagacctttttattcgggaaggttttcagtttgattatgtttttgactggaccattctaaagtaccaacaggcatagatgaccactgcaccacctcgtgcaattgtctgtacaaggaataaacttaccctcctaccttaagtagtagtagagattgtattgggtatagaaatgtacttcttttgttatgttatatttcattgccccctctctattttggttcctggccttggtttttgtttcttgtattttttttccatgtcgtctagctactgtagttgcccatcgtcaaagttttgtagagtggttagtgtttttggttgacagacattggtgctagatttgggatcagccttcctaaacagtaccatttactttagctcaatgatatgaataatgcttgtttgcaggacatattgctaagaatctgccacattatgtttgcttgaggtattaatttatccaggtgtttaatgctggagtacagttagaagatccctaatcaattgcttctcatttcagtcgtgtaactttattcatgctacaacaacgactttgagcgaacatgagaccactgagctctagagtgaatgaaggacgtcgtctttggaagtcagacatcacctagagctagggtgtccattcttgacatgtttctcttagtgataggtggatactgtctagttaggaacagagtcttgagggattgatggacgcatgcatcttcaattcctgtgtgttgtattactactggtacaatctccaattcttgtgaacttatgtatttggacttgtgtgaatttgtgatatgaacatatatccatgtgtttgaaatctatattgtatgtgatattttgtgttgcatgtgatattatgtttgtct

SEQ ID NO: 48096 - DNA, 1899 bp, Zea Mays
cgcgcgcgcccgccgctacctgccagtcgcgcgcctgccgccagcgccccgccgccaccccacgcgcgccccaccgcccccgcgcgccggctcgtgtactccgctgtccgctcccattccactatggcctagctgcgtgctgctctggcatcggtcggtggataagcccagcaggcaagcaggcaggagactaggagagctcagcactgcacgcacgctcccctccccttactggccaaatcgatcgtccccttcaggttccaggctccggagcttgctttacttcagggacaacaatgacctcagggacaacaatgacctccaagacgagcggcagcataaccaccaacctgagcaccacggggaagctctcctccgtgggcagcagcttcatggcgtctgccggcagccgcagcaccagcggcggggtttgacaagggggccaagtactccgacgaccagatcctcgaggcgcccaacctccgcaccttcacattcatagagctcaagacggccaccaagaacttccgtccagacagcgtcctcggcgaaggagggttcgggagagtctacaaagggtgggtggatgagaagaccatggcgccgaccaagaacgacaccggcatggttgttgcggtcaagaagctcaactcggagagcatgcatgggtttgaggaatggcagagatcgtgagtcagagcgcaaggatcctgattatgacagaagctatgacagggtttccaggccagttatacatggtcatataccaccccgcgtgccccgcgccgccagcccgcgcctccaccccgtgcgatctctgtttagatcaatcgagttgagtttgttcattccaagtcattattgcatagagatatcaagcctgataattttctcatgggtctcgggaaaagagaaaaccaggtttatgttatcgattttggacttgcaaagaagtacagagatacatcaacacaccagcacattccatacagaacaaagccggagggatgacatggaataaaaaacaaaagtattcgggaaggttggtttaatacactgtcagccttccatggtagggcctgaaagctgggaacaaaaaacaaaagtatgaaaagatcagcgaaaggaaaattgctacttcaactgaggctctctgccgtggatatcctaccaaatttgcttcttacttccattactgtcgctcacagcgtttcgaagatgcaccggactatcagtacctgaagaatttgttcagagacctttttattcgggaaggttttcagtttgattatgtttttgactggaccattctaaagtaccaacaggcatagatgaccactgcaccacctcgtgcaattgtctgtacaaggaataaacttaccctcctaccttaagtagtagtagagattgtattgggtatagaaatgacatattgctaagaatctgccacattatgtttgcttgaggtattaatttatccaggtgtttaatgctggagtacagttagaagatccctaatcaattgcttctcatttcagtcgtgtaactttattcatgctacaacaacgactttgagcgaacatgagaccactgagctctagagtgaatgaaggacgtcgtctttggaagtcagacatcacctagagctagggtgtccattcttgacatgtttctcttagtgataggtggatactgtctagttaggaacagagtcttgagggattgatggacgcatgcatcttcaattcctgtgtgttgtattactactggtacaatctccaattcttgtgaacttatgtatttggacttgtgtgaatttgtgatatgaacatatatccatgtgtttgaaatctatattgtatgtgatattttgtgttgcatgtgatattatgtttgtct

SEQ ID NO: 48097 - DNA, 2134 bp, Zea Mays
cgcgcgcgcccgccgctacctgccagtcgcgcgcctgccgccagcgccccgccgccaccccacgcgcgccccaccgcccccgcgcgccggctcgtgtactccgctgtccgctcccattccactatggcctagctgcgtgctgctctggcatcggtcggtggataagcccagcaggcaagcaggcaggagactaggagagctcagcactgcacgcacgctcccctccccttactggccaaatcgatcgtccccttcaggttccaggctccggagcttgctttacttcagggacaacaatgacctcagggacaacaatgacctccaagacgagcggcagcataaccaccaacctgagcaccacggggaagctctcctccgtgggcagcagcttcatggcgtctgccggcagccgcagcaccagcggcggggtttgacaagggggccaagtactccgacgaccagatcctcgaggcgcccaacctccgcaccttcacattcatagagctcaagacggccaccaagaacttccgtccagacagcgtcctcggcgaaggagggttcgggagagtctacaaagggtgggtggatgagaagaccatggcgccgaccaagaacgacaccggcatggttgttgcggtcaagaagctcaactcggagagcatgcatgggtttgaggaatggcagggttgcaattttcagagatcgtgagtcagagcgcaaggatcctgattatgacagaagctatgacagggtttccaggccagttatacatggtcatataccaccccgcgtgccccgcgccgccagcccgcgcctccaccccatcaatcgagttgagtttgttcattccaagtcattattgcatagagatatcaagcctgataattttctcatgggtctcgggaaaagagaaaaccaggtttatgttatcgattttggacttgcaaagaagtacagagatacatcaacacaccagcacattccatacagaacaaagccggagggatgacatggaataaaaaacaaaagtattcgggaaggttggtttaatacactgtcagccttccatggtagggcctgaaagctgggaacaaaaaacaaaagtatgaaaagatcagcgaaaggaaaattgctacttcaactgaggctctctgccgtggatatcctaccaaatttgcttcttacttccattactgtcgctcacagcgtttcgaagatgcaccggactatcagtacctgaagaatttgttcagagacctttttattcgggaaggttttcagtttgattatgtttttgactggaccattctaaagtaccaacaggcatagatgaccactgcaccacctcgtgcaattgtctgtacaaggaataaacttaccctcctaccttaagtagtagtagagattgtattgggtatagaaatgtacttcttttgttatgttatatttcattgccccctctctattttggttcctggccttggtttttgtttcttgtattttttttccatgtcgtctagctactgtagttgcccatcgtcaaagttttgtagagtggttagtgtttttggttgacagacattggtgctagatttgggatcagccttcctaaacagtaccatttactttagctcaatgatatgaataatgcttgtttgcaggacatattgctaagaatctgccacattatgtttgcttgaggtattaatttatccaggtgtttaatgctggagtacagttagaagatccctaatcaattgcttctcatttcagtcgtgtaactttattcatgctacaacaacgactttgagcgaacatgagaccactgagctctagagtgaatgaaggacgtcgtctttggaagtcagacatcacctagagctagggtgtccattcttgacatgtttctcttagtgataggtggatactgtctagttaggaacagagtcttgagggattgatggacgcatgcatcttcaattcctgtgtgttgtattactactggtacaatctccaattcttgtgaacttatgtatttggacttgtgtgaatttgtgatatgaacatatatccatgtgtttgaaatctatattgtatgtgatattttgtgttgcatgtgatattatgtttgtct

SEQ ID NO: 48098 - DNA, 2810 bp, Zea Mays
cgcgcgcgcccgccgctacctgccagtcgcgcgcctgccgccagcgccccgccgccaccccacgcgcgccccaccgcccccgcgcgccggctcgtgtactccgctgtccgctcccattccactatggcctagctgcgtgctgctctggcatcggtcggtggataagcccagcaggcaagcaggcaggagactaggagagctcagcactgcacgcacgctcccctccccttactggccaaatcgatcgtccccttcaggttccaggctccggagcttgctttacttcaggttgtctagctgcatgttgaagtataattccggatagattcacagtttttatccgctaggaagggtggtaaaaggctaagtttttttttatgaattctctgcgttcttcactaatccccaccctaatcagtaaacacgcttacgaatcgtttcctaatcgtgtgacagggacaacaatgacctcagggacaacaatgacctccaagacgagcggcagcataaccaccaacctgagcaccacggggaagctctcctccgtgggcagcagcttcatggcgtctgccggcagccgcagcaccagcggcggggtttgacaagggggccaagtactccgacgaccagatcctcgaggcgcccaacctccgcaccttcacattcatagagctcaagacggccaccaagaacttccgtccagacagcgtcctcggcgaaggagggttcgggagagtctacaaagggtgggtggatgagaagaccatggcgccgaccaagaacgacaccggcatggttgttgcggtcaagaagctcaactcggagagcatgcatgggtttgaggaatggcagggttgcaattttcagagatcgtgagtcagagcgcaaggatcctgattatgacagaagctatgacagtctttttaaccgtgcactttcgaataaatctgcaattttggatcgtatcagagatgcagtgtttaagaaagtgagtttgtttcctgaattttatatttccaccaaatgtcattgattagcattgttacaattagaattttctacgtatatggtaataataacccactgaggctttgtttggataatgtagtattgacaccaatccactgaggctttgtatagtcattcccttgtgctcaactctttgtgatacaactatgatcagttgataaaagtggcacataacttgagcaagttttatattttgagtacctccctattgtaacatatcttgttacacttctaattttgtggctagaacatgaggtaactggtaagagagttcctttttcatttcatgtggtagggtttccaggccagttatacatggtcatataccaccccgcgtgccccgcgccgccagcccgcgcctccaccccgtgcgatctctgtttaggttcaagtttccacgaagcacatttctgctcaaccatctgctttcatttaactgcattatatattaatgtcctgtatttttctagatcaatcgagttgagtttgttcattccaagtcattattgcatagagatatcaagcctgataattttctcatgggtctcgggaaaagagaaaaccaggtttatgttatcgattttggacttgcaaagaagtacagagatacatcaacacaccagcacattccatacagaacaaagccggagggatgacatggaataaaaaacaaaagtattcgggaaggttggtttaatacactgtcagccttccatggtagggcctgaaagctgggaacaaaaaacaaaagtatgaaaagatcagcgaaaggaaaattgctacttcaactgaggctctctgccgtggatatcctaccaaatttgcttcttacttccattactgtcgctcacagcgtttcgaagatgcaccggactatcagtacctgaagaatttgttcagagacctttttattcgggaaggttttcagtttgattatgtttttgactggaccattctaaagtaccaacaggcatagatgaccactgcaccacctcgtgcaattgtctgtacaaggaataaacttaccctcctaccttaagtagtagtagagattgtattgggtatagaaatgtacttcttttgttatgttatatttcattgccccctctctattttggttcctggccttggtttttgtttcttgtattttttttccatgtcgtctagctactgtagttgcccatcgtcaaagttttgtagagtggttagtgtttttggttgacagacattggtgctagatttgggatcagccttcctaaacagtaccatttactttagctcaatgatatgaataatgcttgtttgcaggacatattgctaagaatctgccacattatgtttgcttgaggtattaatttatccaggtgtttaatgctggagtacagttagaagatccctaatcaattgcttctcatttcagtcgtgtaactttattcatgctacaacaacgactttgagcgaacatgagaccactgagctctagagtgaatgaaggacgtcgtctttggaagtcagacatcacctagagctagggtgtccattcttgacatgtttctcttagtgataggtggatactgtctagttaggaacagagtcttgagggattgatggacgcatgcatcttcaattcctgtgtgttgtattactactggtacaatctccaattcttgtgaacttatgtatttggacttgtgtgaatttgtgatatgaacatatatccatgtgtttgaaatctatattgtatgtgatattttgtgttgcatgtgatattatgtttgtct

SEQ ID NO: 48099 - DNA, 2896 bp, Zea Mays
cgcgcgcgcccgccgctacctgccagtcgcgcgcctgccgccagcgccccgccgccaccccacgcgcgccccaccgcccccgcgcgccggctcgtgtactccgctgtccgctcccattccactatggcctagctgcgtgctgctctggcatcggtcggtggataagcccagcaggcaagcaggcaggagactaggagagctcagcactgcacgcacgctcccctccccttactggccaaatcgatcgtccccttcaggttccaggctccggagcttgctttacttcaggttgtctagctgcatgttgaagtataattccggatagattcacagtttttatccgctaggaagggtggtaaaaggctaagtttttttttatgaattctctgcgttcttcactaatccccaccctaatcagtaaacacgcttacgaatcgtttcctaatcgtgtgacagggacaacaatgacctcagggacaacaatgacctccaagacgagcggcagcataaccaccaacctgagcaccacggggaagctctcctccgtgggcagcagcttcatggcgtctgccggcagccgcagcaccagcggcggggtttgacaagggggccaagtactccgacgaccagatcctcgaggcgcccaacctccgcaccttcacattcatagagctcaagacggccaccaagaacttccgtccagacagcgtcctcggcgaaggagggttcgggagagtctacaaagggtgggtggatgagaagaccatggcgccgaccaagaacgacaccggcatggttgttgcggtcaagaagctcaactcggagagcatgcatgggtttgaggaatggcagagatcgtgagtcagagcgcaaggatcctgattatgacagaagctatgacaggaaacactaaatcttgtgatgtactccctctgttcctaagtctccagcgtattagtcatctgcacagtgaccaaggagcgctgatatgcttttactcgcagtctttttaaccgtgcactttcgaataaatctgcaattttggatcgtatcagagatgcagtgtttaagaaagtgagtttgtttcctgaattttatatttccaccaaatgtcattgattagcattgttacaattagaattttctacgtatatggtaataataacccactgaggctttgtttggataatgtagtattgacaccaatccactgaggctttgtatagtcattcccttgtgctcaactctttgtgatacaactatgatcagttgataaaagtggcacataacttgagcaagttttatattttgagtacctccctattgtaacatatcttgttacacttctaattttgtggctagaacatgaggtaactggtaagagagttcctttttcatttcatgtggtagggtttccaggccagttatacatggtcatataccaccccgcgtgccccgcgccgccagcccgcgcctccaccccgtgcgatctctgtttaggttcaagtttccacgaagcacatttctgctcaaccatctgctttcatttaactgcattatatattaatgtcctgtatttttctagatcaatcgagttgagtttgttcattccaagtcattattgcatagagatatcaagcctgataattttctcatgggtctcgggaaaagagaaaaccaggtttatgttatcgattttggacttgcaaagaagtacagagatacatcaacacaccagcacattccatacagaacaaagccggagggatgacatggaataaaaaacaaaagtattcgggaaggttggtttaatacactgtcagccttccatggtagggcctgaaagctgggaacaaaaaacaaaagtatgaaaagatcagcgaaaggaaaattgctacttcaactgaggctctctgccgtggatatcctaccaaatttgcttcttacttccattactgtcgctcacagcgtttcgaagatgcaccggactatcagtacctgaagaatttgttcagagacctttttattcgggaaggttttcagtttgattatgtttttgactggaccattctaaagtaccaacaggcatagatgaccactgcaccacctcgtgcaattgtctgtacaaggaataaacttaccctcctaccttaagtagtagtagagattgtattgggtatagaaatgtacttcttttgttatgttatatttcattgccccctctctattttggttcctggccttggtttttgtttcttgtattttttttccatgtcgtctagctactgtagttgcccatcgtcaaagttttgtagagtggttagtgtttttggttgacagacattggtgctagatttgggatcagccttcctaaacagtaccatttactttagctcaatgatatgaataatgcttgtttgcaggacatattgctaagaatctgccacattatgtttgcttgaggtattaatttatccaggtgtttaatgctggagtacagttagaagatccctaatcaattgcttctcatttcagtcgtgtaactttattcatgctacaacaacgactttgagcgaacatgagaccactgagctctagagtgaatgaaggacgtcgtctttggaagtcagacatcacctagagctagggtgtccattcttgacatgtttctcttagtgataggtggatactgtctagttaggaacagagtcttgagggattgatggacgcatgcatcttcaattcctgtgtgttgtattactactggtacaatctccaattcttgtgaacttatgtatttggacttgtgtgaatttgtgatatgaacatatatccatgtgtttgaaatctatattgtatgtgatattttgtgttgcatgtgatattatgtttgtct

SEQ ID NO: 48100 - DNA, 2677 bp, Zea Mays
cgcgcgcgcccgccgctacctgccagtcgcgcgcctgccgccagcgccccgccgccaccccacgcgcgccccaccgcccccgcgcgccggctcgtgtactccgctgtccgctcccattccactatggcctagctgcgtgctgctctggcatcggtcggtggataagcccagcaggcaagcaggcaggagactaggagagctcagcactgcacgcacgctcccctccccttactggccaaatcgatcgtccccttcaggttccaggctccggagcttgctttacttcaggttgtctagctgcatgttgaagtataattccggatagattcacagtttttatccgctaggaagggtggtaaaaggctaagtttttttttatgaattctctgcgttcttcactaatccccaccctaatcagtaaacacgcttacgaatcgtttcctaatcgtgtgacagggacaacaatgacctcagggacaacaatgacctccaagacgagcggcagcataaccaccaacctgagcaccacggggaagctctcctccgtgggcagcagcttcatggcgtctgccggcagccgcagcaccagcggcggggtttgacaagggggccaagtactccgacgaccagatcctcgaggcgcccaacctccgcaccttcacattcatagagctcaagacggccaccaagaacttccgtccagacagcgtcctcggcgaaggagggttcgggagagtctacaaagggtgggtggatgagaagaccatggcgccgaccaagaacgacaccggcatggttgttgcggtcaagaagctcaactcggagagcatgcatgggtttgaggaatggcagggttgcaattttcagagatcgtgagtcagagcgcaaggatcctgattatgacagaagctatgacaggaaacactaaatcttgtgatgtactccctctgttcctaagtctccagcgtattagtcatctgcacagtgaccaaggagcgctgatatgcttttactcgcagtctttttaaccgtgcactttcgaataaatctgcaattttggatcgtatcagagatgcagtgtttaagaaaggtttccaggccagttatacatggtcatataccaccccgcgtgccccgcgccgccagcccgcgcctccaccccgtgcgatctctgtttaggttcaagtttccacgaagcacatttctgctcaaccatctgctttcatttaactgcattatatattaatgtcctgtatttttctagatcaatcgagttgagtttgttcattccaagtcattattgcatagagatatcaagcctgataattttctcatgggtctcgggaaaagagaaaaccaggtttatgttatcgattttggacttgcaaagaagtacagagatacatcaacacaccagcacattccatacagaacaaagccggagggatgacatggaataaaaaacaaaagtattcgggaaggttggtttaatacactgtcagccttccatggtagggcctgaaagctgggaacaaaaaacaaaagtatgaaaagatcagcgaaaggaaaattgctacttcaactgaggctctctgccgtggatatcctaccaaatttgcttcttacttccattactgtcgctcacagcgtttcgaagatgcaccggactatcagtacctgaagaatttgttcagagacctttttattcgggaaggttggtttaatacacccaatatttcatttaatgactaaaccatgtctgcatttctcagtgtagcaaaaatgctaacttagaattatgttatccattgggcaggttttcagtttgattatgtttttgactggaccattctaaagtaccaacaggcatagatgaccactgcaccacctcgtgcaattgtctgtacaaggaataaacttaccctcctaccttaagtagtagtagagattgtattgggtatagaaatgtacttcttttgttatgttatatttcattgccccctctctattttggttcctggccttggtttttgtttcttgtattttttttccatgtcgtctagctactgtagttgcccatcgtcaaagttttgtagagtggttagtgtttttggttgacagacattggtgctagatttgggatcagccttcctaaacagtaccatttactttagctcaatgatatgaataatgcttgtttgcaggacatattgctaagaatctgccacattatgtttgcttgaggtattaatttatccaggtgtttaatgctggagtacagttagaagatccctaatcaattgcttctcatttcagtcgtgtaactttattcatgctacaacaacgactttgagcgaacatgagaccactgagctctagagtgaatgaaggacgtcgtctttggaagtcagacatcacctagagctagggtgtccattcttgacatgtttctcttagtgataggtggatactgtctagttaggaacagagtcttgagggattgatggacgcatgcatcttcaattcctgtgtgttgtattactactggtacaatctccaattcttgtgaacttatgtatttggacttgtgtgaatttgtgatatgaacatatatccatgtgtttgaaatctatattgtatgtgatattttgtgttgcatgtgatattatgtttgtct

SEQ ID NO: 48101 - DNA, 2227 bp, Zea Mays
cgcgcgcgcccgccgctacctgccagtcgcgcgcctgccgccagcgccccgccgccaccccacgcgcgccccaccgcccccgcgcgccggctcgtgtactccgctgtccgctcccattccactatggcctagctgcgtgctgctctggcatcggtcggtggataagcccagcaggcaagcaggcaggagactaggagagctcagcactgcacgcacgctcccctccccttactggccaaatcgatcgtccccttcaggttccaggctccggagcttgctttacttcagggacaacaatgacctcagggacaacaatgacctccaagacgagcggcagcataaccaccaacctgagcaccacggggaagctctcctccgtgggcagcagcttcatggcgtctgccggcagccgcagcaccagcggcggggtttgacaagggggccaagtactccgacgaccagatcctcgaggcgcccaacctccgcaccttcacattcatagagctcaagacggccaccaagaacttccgtccagacagcgtcctcggcgaaggagggttcgggagagtctacaaagggtgggtggatgagaagaccatggcgccgaccaagaacgacaccggcatggttgttgcggtcaagaagctcaactcggagagcatgcatgggtttgaggaatggcagggttgcaattttcagagatcgtgagtcagagcgcaaggatcctgattatgacagaagctatgacaggccagttatacatggtcatataccaccccgcgtgccccgcgccgccagcccgcgcctccaccccgtgcgatctctgtttaggttcaagtttccacgaagcacatttctgctcaaccatctgctttcatttaactgcattatatattaatgtcctgtatttttctagatcaatcgagttgagtttgttcattccaagtcattattgcatagagatatcaagcctgataattttctcatgggtctcgggaaaagagaaaaccaggtttatgttatcgattttggacttgcaaagaagtacagagatacatcaacacaccagcacattccatacagaacaaagccggagggatgacatggaataaaaaacaaaagtattcgggaaggttggtttaatacactgtcagccttccatggtagggcctgaaagctgggaacaaaaaacaaaagtatgaaaagatcagcgaaaggaaaattgctacttcaactgaggctctctgccgtggatatcctaccaaatttgcttcttacttccattactgtcgctcacagcgtttcgaagatgcaccggactatcagtacctgaagaatttgttcagagacctttttattcgggaaggttttcagtttgattatgtttttgactggaccattctaaagtaccaacaggcatagatgaccactgcaccacctcgtgcaattgtctgtacaaggaataaacttaccctcctaccttaagtagtagtagagattgtattgggtatagaaatgtacttcttttgttatgttatatttcattgccccctctctattttggttcctggccttggtttttgtttcttgtattttttttccatgtcgtctagctactgtagttgcccatcgtcaaagttttgtagagtggttagtgtttttggttgacagacattggtgctagatttgggatcagccttcctaaacagtaccatttactttagctcaatgatatgaataatgcttgtttgcaggacatattgctaagaatctgccacattatgtttgcttgaggtattaatttatccaggtgtttaatgctggagtacagttagaagatccctaatcaattgcttctcatttcagtcgtgtaactttattcatgctacaacaacgactttgagcgaacatgagaccactgagctctagagtgaatgaaggacgtcgtctttggaagtcagacatcacctagagctagggtgtccattcttgacatgtttctcttagtgataggtggatactgtctagttaggaacagagtcttgagggattgatggacgcatgcatcttcaattcctgtgtgttgtattactactggtacaatctccaattcttgtgaacttatgtatttggacttgtgtgaatttgtgatatgaacatatatccatgtgtttgaaatctatattgtatgtgatattttgtgttgcatgtgatattatgtttgtct

SEQ ID NO: 48102 - DNA, 2287 bp, Zea Mays
cgcgcgcgcccgccgctacctgccagtcgcgcgcctgccgccagcgccccgccgccaccccacgcgcgccccaccgcccccgcgcgccggctcgtgtactccgctgtccgctcccattccactatggcctagctgcgtgctgctctggcatcggtcggtggataagcccagcaggcaagcaggcaggagactaggagagctcagcactgcacgcacgctcccctccccttactggccaaatcgatcgtccccttcaggttccaggctccggagcttgctttacttcaggttgtctagctgcatgttgaagtataattccggatgtatccttgaagtgtaaacatttaaggattgtgtaattctttgggtaccaaggcccatttttaaattttaaacaatccagtttttgcttgaatgtatcatcagagattcgcagtagggaacatcagagattaatatttcttgtcccttgaatgtatcatggcttgtttagaggcgggggcagcactttctgatctcaaattttgttcttcacttatatttatttcatcagagattcacagtttttatccgctaggaagggtggtaaaaggctaagtttttttttatgaattctctgcgttcttcactaatccccaccctaatcagtaaacacgcttacgaatcgtttcctaatcgtgtgacagggacaacaatgacctcagggacaacaatgacctccaagacgagcggcagcataaccaccaacctgagcaccacggggaagctctcctccgtgggcagcagcttcatggcgtctgccggcagccgcagcaccagcggcggggtttgacaagggggccaagtactccgacgaccagatcctcgaggcgcccaacctccgcaccttcacattcatagagctcaagacggccaccaagaacttccgtccagacagcgtcctcggcgaaggagggttcgggagagtctacaaagggtgggtggatgagaagaccatggcgccgaccaagaacgacaccggcatggttgttgcggtcaagaagctcaactcggagagcatgcatgggtttgaggaatggcagagatcgtgagtcagagcgcaaggatcctgattatgacagaagctatgacagggtttccaggccagttatacatggtcatataccaccccgcgtgccccgcgccgccagcccgcgcctccaccccgtgcgatctctgtttagatcaatcgagttgagtttgttcattccaagtcattattgcatagagatatcaagcctgataattttctcatgggtctcgggaaaagagaaaaccaggtttatgttatcgattttggacttgcaaagaagtacagagatacatcaacacaccagcacattccatacagaacaaagccggagggatgacatggaataaaaaacaaaagtattcgggaaggttggtttaatacactgtcagccttccatggtagggcctgaaagctgggaacaaaaaacaaaagtatgaaaagatcagcgaaaggaaaattgctacttcaactgaggctctctgccgtggatatcctaccaaatttgcttcttacttccattactgtcgctcacagcgtttcgaagatgcaccggactatcagtacctgaagaatttgttcagagacctttttattcgggaaggttttcagtttgattatgtttttgactggaccattctaaagtaccaacaggcatagatgaccactgcaccacctcgtgcaattgtctgtacaaggaataaacttaccctcctaccttaagtagtagtagagattgtattgggacatattgctaagaatctgccacattatgtttgcttgaggtattaatttatccaggtgtttaatgctggagtacagttagaagatccctaatcaattgcttctcatttcagtcgtgtaactttattcatgctacaacaacgactttgagcgaacatgagaccactgagctctagagtgaatgaaggacgtcgtctttggaagtcagacatcacctagagctagggtgtccattcttgacatgtttctcttagtgataggtggatactgtctagttaggaacagagtcttgagggattgatggacgcatgcatcttcaattcctgtgtgttgtattactactggtacaatctccaattcttgtgaacttatgtatttggacttgtgtgaatttgtgatatgaacatatatccatgtgtttgaaatctatattgtatgtgatattttgtgttgcatgtgatattatgtttgtct

SEQ ID NO: 48103 - DNA, 2306 bp, Zea Mays
cgcgcgcgcccgccgctacctgccagtcgcgcgcctgccgccagcgccccgccgccaccccacgcgcgccccaccgcccccgcgcgccggctcgtgtactccgctgtccgctcccattccactatggcctagctgcgtgctgctctggcatcggtcggtggataagcccagcaggcaagcaggcaggagactaggagagctcagcactgcacgcacgctcccctccccttactggccaaatcgatcgtccccttcaggttccaggctccggagcttgctttacttcagggacaacaatgacctcagggacaacaatgacctccaagacgagcggcagcataaccaccaacctgagcaccacggggaagctctcctccgtgggcagcagcttcatggcgtctgccggcagccgcagcaccagcggcggggtttgacaagggggccaagtactccgacgaccagatcctcgaggcgcccaacctccgcaccttcacattcatagagctcaagacggccaccaagaacttccgtccagacagcgtcctcggcgaaggagggttcgggagagtctacaaagggtgggtggatgagaagaccatggcgccgaccaagaacgacaccggcatggttgttgcggtcaagaagctcaactcggagagcatgcatgggtttgaggaatggcagggttgcaattttcagagatcgtgagtcagagcgcaaggatcctgattatgacagaagctatgacagtctttttaaccgtgcactttcgaataaatctgcaattttggatcgtatcagagatgcagtgtttaagaaaggtttccaggccagttatacatggtcatataccaccccgcgtgccccgcgccgccagcccgcgcctccaccccgtgcgatctctgtttaggttcaagtttccacgaagcacatttctgctcaaccatctgctttcatttaactgcattatatattaatgtcctgtatttttctagatcaatcgagttgagtttgttcattccaagtcattattgcatagagatatcaagcctgataattttctcatgggtctcgggaaaagagaaaaccaggtttatgttatcgattttggacttgcaaagaagtacagagatacatcaacacaccagcacattccatacagaacaaagccggagggatgacatggaataaaaaacaaaagtattcgggaaggttggtttaatacactgtcagccttccatggtagggcctgaaagctgggaacaaaaaacaaaagtatgaaaagatcagcgaaaggaaaattgctacttcaactgaggctctctgccgtggatatcctaccaaatttgcttcttacttccattactgtcgctcacagcgtttcgaagatgcaccggactatcagtacctgaagaatttgttcagagacctttttattcgggaaggttttcagtttgattatgtttttgactggaccattctaaagtaccaacaggcatagatgaccactgcaccacctcgtgcaattgtctgtacaaggaataaacttaccctcctaccttaagtagtagtagagattgtattgggtatagaaatgtacttcttttgttatgttatatttcattgccccctctctattttggttcctggccttggtttttgtttcttgtattttttttccatgtcgtctagctactgtagttgcccatcgtcaaagttttgtagagtggttagtgtttttggttgacagacattggtgctagatttgggatcagccttcctaaacagtaccatttactttagctcaatgatatgaataatgcttgtttgcaggacatattgctaagaatctgccacattatgtttgcttgaggtattaatttatccaggtgtttaatgctggagtacagttagaagatccctaatcaattgcttctcatttcagtcgtgtaactttattcatgctacaacaacgactttgagcgaacatgagaccactgagctctagagtgaatgaaggacgtcgtctttggaagtcagacatcacctagagctagggtgtccattcttgacatgtttctcttagtgataggtggatactgtctagttaggaacagagtcttgagggattgatggacgcatgcatcttcaattcctgtgtgttgtattactactggtacaatctccaattcttgtgaacttatgtatttggacttgtgtgaatttgtgatatgaacatatatccatgtgtttgaaatctatattgtatgtgatattttgtgttgcatgtgatattatgtttgtct

SEQ ID NO: 48104 - DNA, 2131 bp, Zea Mays
cgcgcgcgcccgccgctacctgccagtcgcgcgcctgccgccagcgccccgccgccaccccacgcgcgccccaccgcccccgcgcgccggctcgtgtactccgctgtccgctcccattccactatggcctagctgcgtgctgctctggcatcggtcggtggataagcccagcaggcaagcaggcaggagactaggagagctcagcactgcacgcacgctcccctccccttactggccaaatcgatcgtccccttcaggttccaggctccggagcttgctttacttcagggacaacaatgacctcagggacaacaatgacctccaagacgagcggcagcataaccaccaacctgagcaccacggggaagctctcctccgtgggcagcagcttcatggcgtctgccggcagccgcagcaccagcggcggggtttgacaagggggccaagtactccgacgaccagatcctcgaggcgcccaacctccgcaccttcacattcatagagctcaagacggccaccaagaacttccgtccagacagcgtcctcggcgaaggagggttcgggagagtctacaaagggtgggtggatgagaagaccatggcgccgaccaagaacgacaccggcatggttgttgcggtcaagaagctcaactcggagagcatgcatgggtttgaggaatggcagggttgcaattttcagagatcgtgagtcagagcgcaaggatcctgattatgacagaagctatgacagtctttttaaccgtgcactttcgaataaatctgcaattttggatcgtatcagagatgcagtgtttaagaaaatcaatcgagttgagtttgttcattccaagtcattattgcatagagatatcaagcctgataattttctcatgggtctcgggaaaagagaaaaccaggtttatgttatcgattttggacttgcaaagaagtacagagatacatcaacacaccagcacattccatacagaacaaagccggagggatgacatggaataaaaaacaaaagtattcgggaaggttggtttaatacactgtcagccttccatggtagggcctgaaagctgggaacaaaaaacaaaagtatgaaaagatcagcgaaaggaaaattgctacttcaactgaggctctctgccgtggatatcctaccaaatttgcttcttacttccattactgtcgctcacagcgtttcgaagatgcaccggactatcagtacctgaagaatttgttcagagacctttttattcgggaaggttttcagtttgattatgtttttgactggaccattctaaagtaccaacaggcatagatgaccactgcaccacctcgtgcaattgtctgtacaaggaataaacttaccctcctaccttaagtagtagtagagattgtattgggtatagaaatgtacttcttttgttatgttatatttcattgccccctctctattttggttcctggccttggtttttgtttcttgtattttttttccatgtcgtctagctactgtagttgcccatcgtcaaagttttgtagagtggttagtgtttttggttgacagacattggtgctagatttgggatcagccttcctaaacagtaccatttactttagctcaatgatatgaataatgcttgtttgcaggacatattgctaagaatctgccacattatgtttgcttgaggtattaatttatccaggtgtttaatgctggagtacagttagaagatccctaatcaattgcttctcatttcagtcgtgtaactttattcatgctacaacaacgactttgagcgaacatgagaccactgagctctagagtgaatgaaggacgtcgtctttggaagtcagacatcacctagagctagggtgtccattcttgacatgtttctcttagtgataggtggatactgtctagttaggaacagagtcttgagggattgatggacgcatgcatcttcaattcctgtgtgttgtattactactggtacaatctccaattcttgtgaacttatgtatttggacttgtgtgaatttgtgatatgaacatatatccatgtgtttgaaatctatattgtatgtgatattttgtgttgcatgtgatattatgtttgtct

SEQ ID NO: 48105 - DNA, 2911 bp, Zea Mays
cgcgcgcgcccgccgctacctgccagtcgcgcgcctgccgccagcgccccgccgccaccccacgcgcgccccaccgcccccgcgcgccggctcgtgtactccgctgtccgctcccattccactatggcctagctgcgtgctgctctggcatcggtcggtggataagcccagcaggcaagcaggcaggagactaggagagctcagcactgcacgcacgctcccctccccttactggccaaatcgatcgtccccttcaggttccaggctccggagcttgctttacttcaggttgtctagctgcatgttgaagtataattccggatagattcacagtttttatccgctaggaagggtggtaaaaggctaagtttttttttatgaattctctgcgttcttcactaatccccaccctaatcagtaaacacgcttacgaatcgtttcctaatcgtgtgacagggacaacaatgacctcagggacaacaatgacctccaagacgagcggcagcataaccaccaacctgagcaccacggggaagctctcctccgtgggcagcagcttcatggcgtctgccggcagccgcagcaccagcggcggggtttgacaagggggccaagtactccgacgaccagatcctcgaggcgcccaacctccgcaccttcacattcatagagctcaagacggccaccaagaacttccgtccagacagcgtcctcggcgaaggagggttcgggagagtctacaaagggtgggtggatgagaagaccatggcgccgaccaagaacgacaccggcatggttgttgcggtcaagaagctcaactcggagagcatgcatgggtttgaggaatggcagggttgcaattttcagagatcgtgagtcagagcgcaaggatcctgattatgacagaagctatgacaggaaacactaaatcttgtgatgtactccctctgttcctaagtctccagcgtattagtcatctgcacagtgaccaaggagcgctgatatgcttttactcgcagtctttttaaccgtgcactttcgaataaatctgcaattttggatcgtatcagagatgcagtgtttaagaaagtgagtttgtttcctgaattttatatttccaccaaatgtcattgattagcattgttacaattagaattttctacgtatatggtaataataacccactgaggctttgtttggataatgtagtattgacaccaatccactgaggctttgtatagtcattcccttgtgctcaactctttgtgatacaactatgatcagttgataaaagtggcacataacttgagcaagttttatattttgagtacctccctattgtaacatatcttgttacacttctaattttgtggctagaacatgaggtaactggtaagagagttcctttttcatttcatgtggtagggtttccaggccagttatacatggtcatataccaccccgcgtgccccgcgccgccagcccgcgcctccaccccgtgcgatctctgtttaggttcaagtttccacgaagcacatttctgctcaaccatctgctttcatttaactgcattatatattaatgtcctgtatttttctagatcaatcgagttgagtttgttcattccaagtcattattgcatagagatatcaagcctgataattttctcatgggtctcgggaaaagagaaaaccaggtttatgttatcgattttggacttgcaaagaagtacagagatacatcaacacaccagcacattccatacagaacaaagccggagggatgacatggaataaaaaacaaaagtattcgggaaggttggtttaatacactgtcagccttccatggtagggcctgaaagctgggaacaaaaaacaaaagtatgaaaagatcagcgaaaggaaaattgctacttcaactgaggctctctgccgtggatatcctaccaaatttgcttcttacttccattactgtcgctcacagcgtttcgaagatgcaccggactatcagtacctgaagaatttgttcagagacctttttattcgggaaggttttcagtttgattatgtttttgactggaccattctaaagtaccaacaggcatagatgaccactgcaccacctcgtgcaattgtctgtacaaggaataaacttaccctcctaccttaagtagtagtagagattgtattgggtatagaaatgtacttcttttgttatgttatatttcattgccccctctctattttggttcctggccttggtttttgtttcttgtattttttttccatgtcgtctagctactgtagttgcccatcgtcaaagttttgtagagtggttagtgtttttggttgacagacattggtgctagatttgggatcagccttcctaaacagtaccatttactttagctcaatgatatgaataatgcttgtttgcaggacatattgctaagaatctgccacattatgtttgcttgaggtattaatttatccaggtgtttaatgctggagtacagttagaagatccctaatcaattgcttctcatttcagtcgtgtaactttattcatgctacaacaacgactttgagcgaacatgagaccactgagctctagagtgaatgaaggacgtcgtctttggaagtcagacatcacctagagctagggtgtccattcttgacatgtttctcttagtgataggtggatactgtctagttaggaacagagtcttgagggattgatggacgcatgcatcttcaattcctgtgtgttgtattactactggtacaatctccaattcttgtgaacttatgtatttggacttgtgtgaatttgtgatatgaacatatatccatgtgtttgaaatctatattgtatgtgatattttgtgttgcatgtgatattatgtttgtct

SEQ ID NO: 48106 - DNA, 2343 bp, Zea Mays
cgcgcgcgcccgccgctacctgccagtcgcgcgcctgccgccagcgccccgccgccaccccacgcgcgccccaccgcccccgcgcgccggctcgtgtactccgctgtccgctcccattccactatggcctagctgcgtgctgctctggcatcggtcggtggataagcccagcaggcaagcaggcaggagactaggagagctcagcactgcacgcacgctcccctccccttactggccaaatcgatcgtccccttcaggttccaggctccggagcttgctttacttcaggttgtctagctgcatgttgaagtataattccggatgtatccttgaagtgtaaacatttaaggattgtgtaattctttgggtaccaaggcccatttttaaattttaaacaatccagtttttgcttgaatgtatcatcagagattcgcagtagggaacatcagagattaatatttcttgtcccttgaatgtatcatggcttgtttagaggcgggggcagcactttctgatctcaaattttgttcttcacttatatttatttcatcagagattcacagtttttatccgctaggaagggtgggacaacaatgacctcagggacaacaatgacctccaagacgagcggcagcataaccaccaacctgagcaccacggggaagctctcctccgtgggcagcagcttcatggcgtctgccggcagccgcagcaccagcggcggggtttgacaagggggccaagtactccgacgaccagatcctcgaggcgcccaacctccgcaccttcacattcatagagctcaagacggccaccaagaacttccgtccagacagcgtcctcggcgaaggagggttcgggagagtctacaaagggtgggtggatgagaagaccatggcgccgaccaagaacgacaccggcatggttgttgcggtcaagaagctcaactcggagagcatgcatgggtttgaggaatggcagagatcgtgagtcagagcgcaaggatcctgattatgacagaagctatgacagatcaatcgagttgagtttgttcattccaagtcattattgcatagagatatcaagcctgataattttctcatgggtctcgggaaaagagaaaaccaggtttatgttatcgattttggacttgcaaagaagtacagagatacatcaacacaccagcacattccatacagaacaaagccggagggatgacatggaataaaaaacaaaagtattcgggaaggttggtttaatacactgtcagccttccatggtagggcctgaaagctgggaacaaaaaacaaaagtatgaaaagatcagcgaaaggaaaattgctacttcaactgaggctctctgccgtggatatcctaccaaatttgcttcttacttccattactgtcgctcacagcgtttcgaagatgcaccggactatcagtacctgaagaatttgttcagagacctttttattcgggaaggttttcagtttgattatgtttttgactggaccattctaaagtaccaacaggcatagatgaccactgcaccacctcgtgcaattgtctgtacaaggaataaacttaccctcctaccttaagtagtagtagagattgtattgggtatagaaatgtacttcttttgttatgttatatttcattgccccctctctattttggttcctggccttggtttttgtttcttgtattttttttccatgtcgtctagctactgtagttgcccatcgtcaaagttttgtagagtggttagtgtttttggttgacagacattggtgctagatttgggatcagccttcctaaacagtaccatttactttagctcaatgatatgaataatgcttgtttgcaggacatattgctaagaatctgccacattatgtttgcttgaggtattaatttatccaggtgtttaatgctggagtacagttagaagatccctaatcaattgcttctcatttcagtcgtgtaactttattcatgctacaacaacgactttgagcgaacatgagaccactgagctctagagtgaatgaaggacgtcgtctttggaagtcagacatcacctagagctagggtgtccattcttgacatgtttctcttagtgataggtggatactgtctagttaggaacagagtcttgagggattgatggacgcatgcatcttcaattcctgtgtgttgtattactactggtacaatctccaattcttgtgaacttatgtatttggacttgtgtgaatttgtgatatgaacatatatccatgtgtttgaaatctatattgtatgtgatattttgtgttgcatgtgatattatgtttgtct

SEQ ID NO: 48107 - DNA, 1904 bp, Zea Mays
cgcgcgcgcccgccgctacctgccagtcgcgcgcctgccgccagcgccccgccgccaccccacgcgcgccccaccgcccccgcgcgccggctcgtgtactccgctgtccgctcccattccactatggcctagctgcgtgctgctctggcatcggtcggtggataagcccagcaggcaagcaggcaggagactaggagagctcagcactgcacgcacgctcccctccccttactggccaaatcgatcgtccccttcaggttccaggctccggagcttgctttacttcagggacaacaatgacctcagggacaacaatgacctccaagacgagcggcagcataaccaccaacctgagcaccacggggaagctctcctccgtgggcagcagcttcatggcgtctgccggcagccgcagcaccagcggcggggtttgacaagggggccaagtactccgacgaccagatcctcgaggcgcccaacctccgcaccttcacattcatagagctcaagacggccaccaagaacttccgtccagacagcgtcctcggcgaaggagggttcgggagagtctacaaagggtgggtggatgagaagaccatggcgccgaccaagaacgacaccggcatggttgttgcggtcaagaagctcaactcggagagcatgcatgggtttgaggaatggcagggttgcaattttcagagatcgtgagtcagagcgcaaggatcctgattatgacagaagctatgacagggtttccaggccagttatacatggtcatataccaccccgcgtgccccgcgccgccagcccgcgcctccaccccgtgcgatctctgtttagatcaatcgagttgagtttgttcattccaagtcattattgcatagagatatcaagcctgataattttctcatgggtctcgggaaaagagaaaaccaggtttatgttatcgattttggacttgcaaagaagtacagagatacatcaacacaccagcacattccatacagaacaaagccggagggatgacatggaataaaaaacaaaagtattcgggaaggttggtttaatacactgtcagccttccatggtagggcctgaaagctgggaacaaaaaacaaaagtatgaaaagatcagcgaaaggaaaattgctacttcaactgaggctctctgccgtggatatcctaccaaatttgcttcttacttccattactgtcgctcacagcgtttcgaagatgcaccggactatcagtacctgaagaatttgttcagagacctttttattcgggaaggttttcagtttgattatgtttttgactggaccattctaaagtaccaacaggcatagatgaccactgcaccacctcgtgcaattgtctgtacaaggaataaacttaccctcctaccttaagtagtagtagagattgtattgggacatattgctaagaatctgccacattatgtttgcttgaggtattaatttatccaggtgtttaatgctggagtacagttagaagatccctaatcaattgcttctcatttcagtcgtgtaactttattcatgctacaacaacgactttgagcgaacatgagaccactgagctctagagtgaatgaaggacgtcgtctttggaagtcagacatcacctagagctagggtgtccattcttgacatgtttctcttagtgataggtggatactgtctagttaggaacagagtcttgagggattgatggacgcatgcatcttcaattcctgtgtgttgtattactactggtacaatctccaattcttgtgaacttatgtatttggacttgtgtgaatttgtgatatgaacatatatccatgtgtttgaaatctatattgtatgtgatattttgtgttgcatgtgatattatgtttgtct

SEQ ID NO: 48108 - DNA, 1909 bp, Zea Mays
cgcgcgcgcccgccgctacctgccagtcgcgcgcctgccgccagcgccccgccgccaccccacgcgcgccccaccgcccccgcgcgccggctcgtgtactccgctgtccgctcccattccactatggcctagctgcgtgctgctctggcatcggtcggtggataagcccagcaggcaagcaggcaggagactaggagagctcagcactgcacgcacgctcccctccccttactggccaaatcgatcgtccccttcaggttccaggctccggagcttgctttacttcaggttgtctagctgcatgttgaagtataattccggatagattcacagtttttatccgctaggaagggtggtaaaaggctaagtttttttttatgaattctctgcgttcttcactaatccccaccctaatcagtaaacacgcttacgaatcgtttcctaatcgtgtgacagggacaacaatgacctcagggacaacaatgacctccaagacgagcggcagcataaccaccaacctgagcaccacggggaagctctcctccgtgggcagcagcttcatggcgtctgccggcagccgcagcaccagcggcggggtttgacaagggggccaagtactccgacgaccagatcctcgaggcgcccaacctccgcaccttcacattcatagagctcaagacggccaccaagaacttccgtccagacagcgtcctcggcgaaggagggttcgggagagtctacaaagggtgggtggatgagaagaccatggcgccgaccaagaacgacaccggcatggttgttgcggtcaagaagctcaactcggagagcatgcatgggtttgaggaatggcagagatcgtgagtcagagcgcaaggatcctgattatgacagaagctatgacagatcaatcgagttgagtttgttcattccaagtcattattgcatagagatatcaagcctgataattttctcatgggtctcgggaaaagagaaaaccaggtttatgttatcgattttggacttgcaaagaagtacagagatacatcaacacaccagcacattccatacagaacaaagccggagggatgacatggaataaaaaacaaaagtattcgggaaggttggtttaatacactgtcagccttccatggtagggcctgaaagctgggaacaaaaaacaaaagtatgaaaagatcagcgaaaggaaaattgctacttcaactgaggctctctgccgtggatatcctaccaaatttgcttcttacttccattactgtcgctcacagcgtttcgaagatgcaccggactatcagtacctgaagaatttgttcagagacctttttattcgggaaggttttcagtttgattatgtttttgactggaccattctaaagtaccaacaggcatagatgaccactgcaccacctcgtgcaattgacatattgctaagaatctgccacattatgtttgcttgaggtattaatttatccaggtgtttaatgctggagtacagttagaagatccctaatcaattgcttctcatttcagtcgtgtaactttattcatgctacaacaacgactttgagcgaacatgagaccactgagctctagagtgaatgaaggacgtcgtctttggaagtcagacatcacctagagctagggtgtccattcttgacatgtttctcttagtgataggtggatactgtctagttaggaacagagtcttgagggattgatggacgcatgcatcttcaattcctgtgtgttgtattactactggtacaatctccaattcttgtgaacttatgtatttggacttgtgtgaatttgtgatatgaacatatatccatgtgtttgaaatctatattgtatgtgatattttgtgttgcatgtgatattatgtttgtct

SEQ ID NO: 48109 - DNA, 2170 bp, Zea Mays
caattttatatggcaccgttttggtctatttcataaaaacctagaggcgaccggctagcgccatatcccgcgccgccgccgccgccgccaacgcttaatgctagtgttcctccggcgaggcctcttgctcgtccggcagcccaccacccgcgtccttgccaaaccgtctctccgccctgcttgtctcttcgtccaccacttcgccgtcgacacgatgggtgagggttctgctgctggtaaggacgcgaaggggaaggggaaggggaagaccaaggccgccgccgcggattcggccctggtcgttcgcgacgactcctacctagaggcggtcactcagaagaggattcgcttcttcgaggagatccaggcaaggcaagccgtcgagcggctgaatatcggcggcgaagttatcaaggtaactttgcctgatggcgctatcaaggagggtaagaaatggataacaaccccaatggatattgctaaggagatatcaagtggatttgcagctagttgtttgatagctcaagtggacgaaacactctgggacatggggaggccactcgaaggtgattgtaaattgcaaatgttcaagtttgataccaatgaaggtcgtgacaccttctggcactcaagtgctcatattcttggagaatctattgagagagcatatggatgcaagctgtgtattgggccttgcaccacaagaggggagggtttctactatgatgcttactacaatgatcagacattgaatgaggagcactttggtatcattgaaaaccaagctaaaaaggctgttgcggaaaagcaaccgtttgaacgcattgaggtcagcagggcagaagctcttgaaatgtttgctgagaatgaattcaaggttgaaatcattaatgagttgcctgaggacaagaccattactgtatacaggtgtggtcctttagttgacctatgccgtgggccacacatcccaaatacttcctttgtcaaagctttcgcttgtctgaaggcttcatcatcatattggagaggaaaagttgaccgcgaaagcctgcagagagtatatggaatttctttccctgattctcgacgtctcacggaatataaacattttctagaggaagctaagaaacgtgatcataggatattagggaaagcacaggaactcttctttttccatgaacttagccctggaagctgcttcttccttccacatggtgctaggatatataacaaactgatggacttcatgcgacaacagtacagagatagaggataccaagaggtgttgagcccaaatatttacaatatgcaactatgggaaacttctggacacgccgcaaactataaggagaacatgtttgtttttgagatcgagaaacaggaatttggacttaagccaatgaattgtccaggacactgtctaatgtttgctaatagggttcggtcgtacagagagttgcctcttcgcatggctgattttggagtgcttcatagaaatgagcttagtggtgctcttacaggtttgacacgtgttagaagattccagcaggatgatgctcatatcttctgcagagaagaccaaatcaaggatgaagttaaggctgttttggaattcatcaattatgtttatgagatatttggcttcaaatatgagttggagttgtctacgagaccagagaagtatctaggtgaagttgaaacttggaacaaagctgagcaacaattgacagaagctttaaatgagtttgggaagccatggaagattaatgaaggggatggtgctttctacggcccaaaaattgatattggtgtgtttgatgcccttaagaggaaatttcagtgtgcaaccctacagctggattttcagctgcccattcggttcaagctggcttattctgctgaggatgaagccaaaattgaaaggcctgtgatgatacacagggcaatcctaggttcggttgaaaggatgcttgccattcttttggagcattacaatggtaaatggcccttatggctaagccctcgccaggccattgtttgctcggtatcttctggttcagtggaatatgcgaaacaggttcttgccactctacatgaagctggttttcatgttgatattgacgcgagtgacaggacaatacaaaagaagaaggaattgcatgtagccaac

SEQ ID NO: 48110 - DNA, 2775 bp, Zea Mays
ctatttcataaaaacctagaggcgaccggctagcgccatatcccgcgccgccgccgccgccgccaacgcttaatgctagtgttcctccggcgaggcctcttgctcgtccggcagcccaccacccgcgtccttgccaaaccgtctctccgccctgcttgtctcttcgtccaccacttcgccgtcgacacgatgggtgagggttctgctgctggtaaggacgcgaaggggaaggggaaggggaagaccaaggccgccgccgcggattcggccctggtcgttcgcgacgactcctacctagaggcggtcactcagaagaggattcgcttcttcgaggagatccaggcaaggcaagccgtcgagcggctgaatatcggcggcgaagttatcaaggtaactttgcctgatggcgctatcaaggagggtaagaaatggataacaaccccaatggatattgctaaggagatatcaagtggatttgcagctagttgtttgatagctcaagtggacgaaacactctgggacatggggaggccactcgaaggtgattgtaaattgcaaatgttcaagtttgataccaatgaaggtcgtgacaccttctggcactcaagtgctcatattcttggagaatctattgagagagcatatggatgcaagctgtgtattgggccttgcaccacaagaggggagggtttctactatgatgcttactacaatgatcagacattgaatgaggagcactttggtatcattgaaaaccaagctaaaaaggctgttgcggaaaagcaaccgtttgaacgcattgaggtcagcagggcagaagctcttgaaatgtttgctgagaatgaattcaaggttgaaatcattaatgagttgcctgaggacaagaccattactgtatacaggtgtggtcctttagttgacctatgccgtgggccacacatcccaaatacttcctttgtcaaagctttcgcttgtctgaaggcttcatcatcatattggagaggaaaagttgaccgcgaaagcctgcagagagtatatggaatttctttccctgattctcgacgtctcacggaatataaacattttctagaggaagctaagaaacgtgatcataggatattagggaaagcacaggaactcttctttttccatgaacttagccctggaagctgcttcttccttccacatggtgctaggatatataacaaactgatggacttcatgcgacaacagtacagagatagaggataccaagaggtgttgagcccaaatatttacaatatgcaactatgggaaacttctggacacgccgcaaactataaggagaacatgtttgtttttgagatcgagaaacaggaatttggacttaagccaatgaattgtccaggacactgtctaatgtttgctaatagggttcggtcgtacagagagttgcctcttcgcatggctgattttggagtgcttcatagaaatgagcttagtggtgctcttacaggtttgacacgtgttagaagattccagcaggatgatgctcatatcttctgcagagaagaccaagtaggttttatttgtgtaaaccatgcctgtttactatcctttagaatggaatgaattcgtgttgtacttccattagtgtatgatgttacgataattaattttatatccttaagtgcttaacacctgcaccctgcatacattctaatttgcattagaaaagtttacaatatggttactgtttcttccttttctctgacagtagatgtactttaaaagattgttttttgttgcagatcaaggatgaagttaaggctgttttggaattcatcaattatgtttatgagatatttggcttcaaatatgagttggagttgtctacgagaccagagaagtatctaggtgaagttgaaacttggaacaaagctgagcaacaattgacagaagctttaaatgagtttgggaagccatggaagattaatgaaggggatggtgctttctacggcccaaaaattgatattggtgtgtttgatgcccttaagaggaaatttcagtgtgcaaccctacagctggattttcagctgcccattcggttcaagctggcttattctgctgaggatgaagccaaaattgaaaggcctgtgatgatacacagggcaatcctaggttcggttgaaaggatgcttgccattcttttggagcattacaatggtaaatggcccttatggctaagccctcgccaggccattgtttgctcggtatcttctggttcagtggaatatgcgaaacaggttcttgccactctacatgaagctggttttcatgttgatattgacgcgagtgacaggacaatacaaaagaaggtacgggaagctcaactggcccaattcaactacattcttgtcgtaggtgcacaagaggccgagactggaaatatatgcgttagggtaagagacaatgctgacctggtcacaacgagtgtagatggcttcatcacacgtttgagggaggaaatcgcagccttcaaatgattttgatgctgcataatttcctactactcgtttgtgattttgacgagtttttagtgaccagcatcgagttcctcgtgttactgttcttgtttgtatgaagctaaaaggttgtctttttgttattaattacagatgcgaagttaaatactgccgctagtaaaaaaatatgcttgttgacttccagtgatttacgttactgttggacagtgtcttcagttttcgccctctcttaccacccaccatgttgacc

SEQ ID NO: 48111 - DNA, 1712 bp, Zea Mays
caaccttccttgctactgtcttgttgaaatcattaatgagttgcctgaggacaagaccattactgtatacaggtgtggtcctttagttgacctatgccgtgggccacacatcccaaatacttcctttgtcaaagctttcgcttgtctgaaggcttcatcatcatattggagaggaaaagttgaccgcgaaagcctgcagagagtatatggaatttctttccctgattctcgacgtctcacggaatataaacattttctagaggaagctaagaaacgtgatcataggatattagggaaagcacaggaactcttctttttccatgaacttagccctggaagctgcttcttccttccacatggtgctaggatatataacaaactgatggacttcatgcgacaacagtacagagatagaggataccaagaggtgttgagcccaaatatttacaatatgcaactatgggaaacttctggacacgccgcaaactataaggagaacatgtttgtttttgagatcgagaaacaggaatttggacttaagccaatgaattgtccaggacactgtctaatgtttgctaatagggttcggtcgtacagagagttgcctcttcgcatggctgattttggagtgcttcatagaaatgagcttagtggtgctcttacaggtttgacacgtgttagaagattccagcaggatgatgctcatatcttctgcagagaagaccaaatcaaggatgaagttaaggctgttttggaattcatcaattatgtttatgagatatttggcttcaaatatgagttggagttgtctacgagaccagagaagtatctaggtgaagttgaaacttggaacaaagctgagcaacaattgacagaagctttaaatgagtttgggaagccatggaagattaatgaaggggatggtgctttctacggcccaaaaattgatattggtgtgtttgatgcccttaagaggaaatttcagtgtgcaaccctacagctggattttcagctgcccattcggttcaagctggcttattctgctgaggatgaagccaaaattgaaaggcctgtgatgatacacagggcaatcctaggttcggttgaaaggatgcttgccattcttttggagcattacaatggtaaatggcccttatggctaagccctcgccaggccattgtttgctcggtatcttctggttcagtggaatatgcgaaacaggttcttgccactctacatgaagctggttttcatgttgatattgacgcgagtgacaggacaatacaaaagaaggtacgggaagctcaactggcccaattcaactacattcttgtcgtaggtgcacaagaggccgagactggaaatatatgcgttagggtaagagacaatgctgacctggtcacaacgagtgtagatggcttcatcacacgtttgagggaggaaatcgcagccttcaaatgattttgatgctgcataatttcctactactcgtttgtgattttgacgagtttttagtgaccagcatcgagttcctcgtgttactgttcttgtttgtatgaagctaaaaggttgtctttttgttattaattacagatgcgaagttaaatactgccgctagtaaaaaaatatgcttgttgacttccagtgatttacgttactgttggacagtgtcttcagttttcgccctctcttaccacccaccatgttgacc

SEQ ID NO: 48112 - DNA, 1172 bp, Zea Mays
atttaagcttggcaattgctgctccaatcatccttctgtcgtatcttcattttcgagggagttgcctcttcgcatggctgattttggagtgcttcatagaaatgagcttagtggtgctcttacaggtttgacacgtgttagaagattccagcaggatgatgctcatatcttctgcagagaagaccaaatcaaggatgaagttaaggctgttttggaattcatcaattatgtttatgagatatttggcttcaaatatgagttggagttgtctacgagaccagagaagtatctaggtgaagttgaaacttggaacaaagctgagcaacaattgacagaagctttaaatgagtttgggaagccatggaagattaatgaaggggatggtgctttctacggcccaaaaattgatattggtgtgtttgatgcccttaagaggaaatttcagtgtgcaaccctacagctggattttcagctgcccattcggttcaagctggcttattctgctgaggatgaagccaaaattgaaaggcctgtgatgatacacagggcaatcctaggttcggttgaaaggatgcttgccattcttttggagcattacaatggtaaatggcccttatggctaagccctcgccaggccattgtttgctcggtatcttctggttcagtggaatatgcgaaacaggttcttgccactctacatgaagctggttttcatgttgatattgacgcgagtgacaggacaatacaaaagaaggtacgggaagctcaactggcccaattcaactacattcttgtcgtaggtgcacaagaggccgagactggaaatatatgcgttagggtaagagacaatgctgacctggtcacaacgagtgtagatggcttcatcacacgtttgagggaggaaatcgcagccttcaaatgattttgatgctgcataatttcctactactcgtttgtgattttgacgagtttttagtgaccagcatcgagttcctcgtgttactgttcttgtttgtatgaagctaaaaggttgtctttttgttattaattacagatgcgaagttaaatactgccgctagtaaaaaaatatgcttgttgacttccagtgatttacgttactgttggacagtgtcttcagttttcgccctctcttaccacccaccatgttgacc

SEQ ID NO: 48113 - DNA, 1550 bp, Zea Mays
cattgcactagtttagaggacattcttgtactgctcatcagcccgccatctgtcggccccacatggcgatccagcctcggcccctccacgtcgccctctccccagctgcttccgccgcccctccccatcgcgtcgcccgtctgcaaactgccgcctttgccgatccgcctccacatctccgcctggaagacgagaaacgaggaagacgatcccacctcgcctggaaaacgcatcccaagacttcaaccttcctttccggccggagatccgcttcgcatctccgcgacagatccgggcaaacgggccgatgcagttcttcggcggctcgtcgctgacgtcggtcgcgccggaggcgaccccagccccggcggcgccccctggtacgggcacgggcgccagcgcgcaggtcctctacgtcttcaaccgcaacggcgtctgcctgctctaccgcgagtggcaccgccccctccgcacgctcgaccccacccaggatcacaagctcatgttcgggctcctcttctcccttcgctccttcaccgccaagatcgacccaaccacggcagaaaagggaaatcttggtgtgccactactgccaggccaaggttgttcgttttatagcttcaagacaaacacatacaaactgaactttacggagagcccttctggtataaagcttatactaattacacatccaaggactggtgatcagcgagactcgctaaagcatatctacaacctatatgtggaatacgttgtaaaaaatcctctgtatgctcctggaacaccaatcaaacaatgggttggtgaggcaaaaaaaggtccatttcatgttctttagcgtgatatcaccatttcgtggatggtagacttttctggtggaaaatttgcacagccgcaccatgggagctgcagtattcttgtgtaccgacctcaatttgacagctctactgtgacaacactcctgtagcctgtttgtttgatcgttacggatgcattcgacagggaagctgcattgtgcattgtcgcttctagtgtgacgtgtacatgattaatccatgggttattgcgtcaccgttcaagggggttcatggtcaagtagtaattatttcatatttgaaccggtcgccttgtcagatgactagactgaaacatcatgttttccgcttgagacattgtatgatttgtatggttggctgctaggataaagtcatatcaggaaacgtgatactaaaggtcttcatgctaggcgatttcggtctcggtcgtatccggtagtctccagattatcagaatgttgactgcatgaaatgcatatacaccatcctaactgttctaataagtcaagtttttggcgactcaatcattggctaagagcaacttcaaaagaatatattctttctattctcttagaacagagattttagatttttttagaaaaatgtctttcaacagtttatctaaatggttattcaaatgtaatcatcttctattccgacggtagttaaagatataaaatgtgaatgacgctaaagtgcaaacaagataaaaaa

SEQ ID NO: 48114 - DNA, 1782 bp, Zea Mays
cattgcactagtttagaggacattcttgtactgctcatcagcccgccatctgtcggccccacatggcgatccagcctcggcccctccacgtcgccctctccccagctgcttccgccgcccctccccatcgcgtcgcccgtctgcaaactgccgcctttgccgatccgcctccacatctccgcctggaagacgagaaacgaggaagacgatcccacctcgcctggaaaacgcatcccaagacttcaaccttcctttccggccggagatccgcttcgcatctccgcgacagatccgggcaaacgggccgatgcagttcttcggcggctcgtcgctgacgtcggtcgcgccggaggcgaccccagccccggcggcgccccctggtacgggcacgggcgccagcgcgcaggtcctctacgtcttcaaccgcaacggcgtctgcctgctctaccgcgagtggcaccgccccctccgcacgctcgaccccacccaggatcacaagctcatgttcgggctcctcttctcccttcgctccttcaccgccaagatcgacccaaccacggcagaaaagggaaatcttggtgtgccactactgccaggccaaggttgttcgttttatagcttcaagacaaacacatacaaactgaactttacggagagcccttctggtataaagcttatactaattacacatccaaggactggtgatcagcgagactcgctaaagcatatctacaacctatatgtggaatacgttgtaaaaaatcctctgtatgctcctggaacaccaatcaagtgcgaacttttcaacaaacatctcgatcaatacgtgagaacaataatttgatgtcattgagagagccattgactcaccttcgtccttgttcagctgagcattgtgttccagtttcacacaatgcggtcttactgtttatctagaactggcacaaccgagaaggcaggcaggcatagctgctaatatacatgtctttctcatacttatcaccagtgaaatgtttatttgcagacaatgggttggtgaggcaaaaaaaggtccatttcatgttctttagcgtgatatcaccatttcgtggatggtagacttttctggtggaaaatttgcacagccgcaccatgggagctgcagtattcttgtgtaccgacctcaatttgacagctctactgtgacaacactcctgtagcctgtttgtttgatcgttacggatgcattcgacagggaagctgcattgtgcattgtcgcttctagtgtgacgtgtacatgattaatccatgggttattgcgtcaccgttcaagggggttcatggtcaagtagtaattatttcatatttgaaccggtcgccttgtcagatgactagactgaaacatcatgttttccgcttgagacattgtatgatttgtatggttggctgctaggataaagtcatatcaggaaacgtgatactaaaggtcttcatgctaggcgatttcggtctcggtcgtatccggtagtctccagattatcagaatgttgactgcatgaaatgcatatacaccatcctaactgttctaataagtcaagtttttggcgactcaatcattggctaagagcaacttcaaaagaatatattctttctattctcttagaacagagattttagatttttttagaaaaatgtctttcaacagtttatctaaatggttattcaaatgtaatcatcttctattccgacggtagttaaagatataaaatgtgaatgacgctaaagtgcaaacaagataaaaaa

SEQ ID NO: 48115 - DNA, 871 bp, Zea Mays
ataagaacttgcatctgggggttgcccatgacttccacaacctcttccaaggtgcgaacttttcaacaaacatctcgatcaatacgtgagaacaataatttgatgtcattgagacaatgggttggtgaggcaaaaaaaggtccatttcatgttctttagcgtgatatcaccatttcgtggatggtagacttttctggtggaaaatttgcacagccgcaccatgggagctgcagtattcttgtgtaccgacctcaatttgacagctctactgtgacaacactcctgtagcctgtttgtttgatcgttacggatgcattcgacagggaagctgcattgtgcattgtcgcttctagtgtgacgtgtacatgattaatccatgggttattgcgtcaccgttcaagggggttcatggtcaagtagtaattatttcatatttgaaccggtcgccttgtcagatgactagactgaaacatcatgttttccgcttgagacattgtatgatttgtatggttggctgctaggataaagtcatatcaggaaacgtgatactaaaggtcttcatgctaggcgatttcggtctcggtcgtatccggtagtctccagattatcagaatgttgactgcatgaaatgcatatacaccatcctaactgttctaataagtcaagtttttggcgactcaatcattggctaagagcaacttcaaaagaatatattctttctattctcttagaacagagattttagatttttttagaaaaatgtctttcaacagtttatctaaatggttattcaaatgtaatcatcttctattccgacggtagttaaagatataaaatgtgaatgacgctaaagtgcaaacaagataaaaaa

SEQ ID NO: 48116 - DNA, 2389 bp, Zea Mays
aaaaaattgctgcgtgcgccccgccgcctacacacgcctagcccgctccccaagaaagagcccccgcacacaggctgggaggggagcgaaagcgaaacgtattaaactcgcgtacatcatcaaccgcatgcgctgatgcgcactgccactgccccggagaaattcaaatcccaagccccacaagcaaattaccccagcatcaaatcagcggccggccggccggcagctctcggtcgatccactgcggtttccagtcccgaataatcccaattcccaatcgattcgaagcttccttccttcgaggagagggggaggtggaaggcgcgggggaagctctgcttagggttcggaggtggccggcgccgccgcggggcggggacggcagggggatggatccggagcagacgttcctgcgggtgcacgcgcgcttatcggggacgctttcccagctgctcacgccgcggatccgcctcgtcctcgagtacctctacctcgccggcgccgtcgcgctcttctgcctgctcgtcgtcatgcacacgaacttcgtgcagcagcctggttgctcaagtgaattttctggaattgaatttggagaagcacaacttgtccaaatcaagattatcagtgggggattatggtccagcagaggtgcttcttacatcatggatctccagaacctgggacgttcagctgagaaaattttagaggttaatggtgataagttcaacattttggcatctaaattttggtcaacctgggttggccctggagctaggaggagcttaccagatttgaaggcagccggagagggttctgtacaccaccctttatctgctaaggagtcatttaaagcagcagtgacatttttgttcagaaaatggtaccttcgtgctgtttcattctggaagaacataaagcaactttcagaaaataccctccagttaatggtcagatcaaattggaacgatttcctacatattattaaggatcttcaactaccaagcatggatcatcttatttcgacaatagtgcaatggtttgagaggagaagtaaagcatttgagcctacttatttatatggcgtggaaaagggttatttcttgctttctgaaggtgctaaaactcgtcatggtgtccgaacaatcaatatcacaatttctgctcgaaatccttgctttggaaacaggtggcagcaacttttgataaacagcattgttggatatgatactatacttacaaacagcttggtgaattctcctggtcatggctatttatacaactttcagacgaaggagctctatgatcttagttatgggcatgaaccaccagaaggtcctacaagatttggagattactttgtgacaaaatgtggtgtccttctaatgtcactctttgtctttttcacaaccaccatgtctgtttcatttactttgagagaaacacaatcccgcatgcttagattcacagtgcagcttcaacaccatgcacgccaccacctgccaacctttcagttgatattcgtgcatgtcatcgaatcattggtttttgtgccgattatgattgggattctcttttttctatttgagttctatgatgatcaattgcttgcgtttcttgttttgactcttgtatggttatgcgagctattcacgatgatcagtgtgcggacatccatatcgatgcagttctttccacgcttcttcttgctgtattttttggttttccatatctacttcttctcatatacctatggcttctcatatctggctttctctgctacggcagcattcatgcagcacctgattttatatttttggaaccgttttgaggtgccagctctccagagattcatgcgaagtcgagcacacattcaccagcaaacagagatgttcgtgatcatggtcaagattacaccgatccacctcgaaatggaaatgatcaggtgacatagaatcacggggatgaaagtgggccaattactgaactcgagtgcttgggcggcagtagtctctttctaatatgatataatgccagcacctcccgtcaaaaggataatgacgaatattggtggcaactatacagactggtgtcgctggagatgccatgttagtgttatctgtttctcacttttttagttagtaggtaagggtgaaggttgtatctatattcattacatgtgcacattccctaccgtctgaatgggagcgcccgtcccagtcctgtacagaaatgtcaactcacagcagattgtgcacattctttttgtactcccatgggcgggtgctggcctggaacatgcagtgtgtgcaccactgtcactgaattggacagttaatggtttggatacatcgttgcatgtactgttccaacttccaaattctgaattctg

SEQ ID NO: 48117 - DNA, 2797 bp, Zea Mays
ccccgccgcctacacacgcctagcccgctccccaagaaagagcccccgcacacaggctgggaggggagcgaaagcgaaacgtattaaactcgcgtacatcatcaaccgcatgcgctgatgcgcactgccactgccccggagaaattcaaatcccaagccccacaagcaaattaccccagcatcaaatcagcggccggccggccggcagctctcggtcgatccactgcggtttccagtcccgaataatcccaattcccaatcgattcgaagcttccttccttcgaggagagggggaggtggaaggcgcgggggaagctctgcttagggttcggaggtggccggcgccgccgcggggcggggacggcagggggatggatccggagcagacgttcctgcgggtgcacgcgcgcttatcggggacgctttcccagctgctcacgccgcggatccgcctcgtcctcgagtacctctacctcgccggcgccgtcgcgctcttctgcctgctcgtcgtcatgcacacgaacttcgtgcagcagcctggttgctcaagtgaattttctggaattgaatttggagaagcacaacttgtccaaatcaagattatcagtgggggattatggtccagcagaggtgcttcttacatcatggatctccagaacctgggacgttcagctgagaaaattttagaggttaatggtgataagttcaacattttggcatctaaattttggtcaacctgggttggccctggagctaggaggagtaagctaatgtttagaacttggaaaggagacaaagaatttgaacctcaatcagagaatacagctgacacaactgttaccacgactattccaggcttaccagatttgaaggcagccggagagggttctgtacaccaccctttatctgctaaggagtcatttaaagcagcagtgacatttttgttcagaaaatggtaccttcgtgctgtttcattctggaagaacataaagcaactttcagaaaataccctccagttaatggtcagatcaaattggaacgatttcctacatattattaaggatcttcaactaccaagcatggatcatcttatttcgacaatagtgcaatggtttgagaggagaagtaaagcatttgagcctacttatttatatggcgtggaaaagggttatttcttgctttctgaaggtgctaaaactcgtcatggtgtccgaacaatcaatatcacaatttctgctcgaaatccttgctttggaaacaggtggcagcaacttttgataaacagcattgttggatatgatactatacttacaaacagcttggtgaattctcctggtcatggctatttatacaactttcagacgaaggagctctatgatcttagttatgggcatgaaccaccagaaggtcctacaagatttggagattactttgtgacaaaatgtggtgtccttctaatgtcactctttgtctttttcacaaccaccatgtctgtttcatttactttgagagaaacacaatcccgcatgcttagattcacagtgcagcttcaacaccatgcacgccaccacctgccaacctttcagttgatattcgtgcatgtcatcgaatcattggtttttgtgccgattatgattgggattctcttttttctatttgagttctatgatgatcaattgcttgcgtttcttgttttgactcttgtatggttatgcgagctattcacgatgatcagtgtgcggacatccatatcgatgcagttctttccacgcttcttcttgctgtattttttggttttccatatctacttcttctcatatacctatggcttctcatatctggctttctctgctacggcagcattcatgcagcacctgattttatatttttggaaccgttttgagctctccagagattcatgcgaagtcgagcacacattcaccagcaaacaggtgtccacattacatcctcaactatctacacttctaccttacacattgctagggtaaatgtgagggaccctggtacaataaacgatggcctcggtgctgctcgtgaagcagatgccctattggttcaggatgagtctaccaggagccagcaagagggtcaacagaatggaatttctgagccagctgccaacaatgctctccagtatcaagagcaaaaccctcagcgagctggaagtacccctgcaggctcaggctccctcaacccatttgggtcccttttgctgtggttgctgggaggcggtgcttctgatggcatagtttctttcttctctatgttcagagatgttcgtgatcatggtcaagattacaccgatccacctcgaaatggaaatgatcaggtgacatagaatcacggggatgaaagtgggccaattactgaactcgagtgcttgggcggcagtagtctctttctaatatgatataatgccagcacctcccgtcaaaaggataatgacgaatattggtggcaactatacagactggtgtcgctggagatgccatgttagtgttatctgtttctcacttttttagttagtaggtaagggtgaaggttgtatctatattcattacatgtgcacattccctaccgtctgaatgggagcgcccgtcccagtcctgtacagaaatgtcaactcacagcagattgtgcacattctttttgtactcccatgggcgggtgctggcctggaacatgcagtgtgtgcaccactgtcactgaattggacagttaatggtttggatacatcgttgcatgtactgttccaacttccaaattctgaattctg

SEQ ID NO: 48118 - DNA, 2600 bp, Zea Mays
ccccgccgcctacacacgcctagcccgctccccaagaaagagcccccgcacacaggctgggaggggagcgaaagcgaaacgtattaaactcgcgtacatcatcaaccgcatgcgctgatgcgcactgccactgccccggagaaattcaaatcccaagccccacaagcaaattaccccagcatcaaatcagcggccggccggccggcagctctcggtcgatccactgcggtttccagtcccgaataatcccaattcccaatcgattcgaagcttccttccttcgaggagagggggaggtggaaggcgcgggggaagctctgcttagggttcggaggtggccggcgccgccgcggggcggggacggcagggggatggatccggagcagacgttcctgcgggtgcacgcgcgcttatcggggacgctttcccagctgctcacgccgcggatccgcctcgtcctcgagtacctctacctcgccggcgccgtcgcgctcttctgcctgctcgtcgtcatgcacacgaacttcgtgcagcagcctggttgctcaagtgaattttctggaattgaatttggagaagcacaacttgtccaaatcaagattatcagtgggggattatggtccagcagaggtgcttcttacatcatggatctccagaacctgggacgttcagctgagaaaattttagaggttaatggtgataagttcaacattttggcatctaaattttggtcaacctgggttggccctggagctaggaggagcttaccagatttgaaggcagccggagagggttctgtacaccaccctttatctgctaaggagtcatttaaagcagcagtgacatttttgttcagaaaatggtaccttcgtgctgtttcattctggaagaacataaagcaactttcagaaaataccctccagttaatggtcagatcaaattggaacgatttcctacatattattaaggatcttcaactaccaagcatggatcatcttatttcgacaatagtgcaatggtttgagaggagaagtaaagcatttgagcctacttatttatatggcgtggaaaagggttatttcttgctttctgaaggtgctaaaactcgtcatggtgtccgaacaatcaatatcacaatttctgctcgaaatccttgctttggaaacaggtggcagcaacttttgataaacagcattgttggatatgatactatacttacaaacagcttggtgaattctcctggtcatggctatttatacaactttcagacgaaggagctctatgatcttagttatgggcatgaaccaccagaaggtcctacaagatttggagattactttgtgacaaaatgtggtgtccttctaatgtcactctttgtctttttcacaaccaccatgtctgtttcatttactttgagagaaacacaatcccgcatgcttagattcacagtgcagcttcaacaccatgcacgccaccacctgccaacctttcagttgatattcgtgcatgtcatcgaatcattggtttttgtgccgattatgattgggattctcttttttctatttgagttctatgatgatcaattgcttgcgtttcttgttttgactcttgtatggttatgcgagctattcacgatgatcagtgtgcggacatccatatcgatgcagttctttccacgcttcttcttgctgtattttttggttttccatatctacttcttctcatatacctatggcttctcatatctggctttctctgctacggcagcattcatgcagcacctgattttatatttttggaaccgttttgaggtgccagctctccagagattcatgcgaagtcgagcacacattcaccagcaaacagatgccctattggttcaggatgagtctaccaggagccagcaagagggtcaacagaatggaatttctgagccagctgccaacaatgctctccagtatcaagagcaaaaccctcagcgagctggaagtacccctgcaggctcaggctccctcaacccatttgggtcccttttgctgtggttgctgggaggcggtgcttctgatggcatagtttctttcttctctatgttcagagatgttcgtgatcatggtcaagattacaccgatccacctcgaaatggaaatgatcaggtgacatagaatcacggggatgaaagtgggccaattactgaactcgagtgcttgggcggcagtagtctctttctaatatgatataatgccagcacctcccgtcaaaaggataatgacgaatattggtggcaactatacagactggtgtcgctggagatgccatgttagtgttatctgtttctcacttttttagttagtaggtaagggtgaaggttgtatctatattcattacatgtgcacattccctaccgtctgaatgggagcgcccgtcccagtcctgtacagaaatgtcaactcacagcagattgtgcacattctttttgtactcccatgggcgggtgctggcctggaacatgcagtgtgtgcaccactgtcactgaattggacagttaatggtttggatacatcgttgcatgtactgttccaacttccaaattctgaattctg

SEQ ID NO: 48119 - DNA, 2583 bp, Zea Mays
ccccgccgcctacacacgcctagcccgctccccaagaaagagcccccgcacacaggctgggaggggagcgaaagcgaaacgtattaaactcgcgtacatcatcaaccgcatgcgctgatgcgcactgccactgccccggagaaattcaaatcccaagccccacaagcaaattaccccagcatcaaatcagcggccggccggccggcagctctcggtcgatccactgcggtttccagtcccgaataatcccaattcccaatcgattcgaagcttccttccttcgaggagagggggaggtggaaggcgcgggggaagctctgcttagggttcggaggtggccggcgccgccgcggggcggggacggcagggggatggatccggagcagacgttcctgcgggtgcacgcgcgcttatcggggacgctttcccagctgctcacgccgcggatccgcctcgtcctcgagtacctctacctcgccggcgccgtcgcgctcttctgcctgctcgtcgtcatgcacacgaacttcgtgcagcagcctggttgctcaagtgaattttctggaattgaatttggagaagcacaacttgtccaaatcaagattatcagtgggggattatggtccagcagaggtgcttcttacatcatggatctccagaacctgggacgttcagctgagaaaattttagaggttaatggtgataagttcaacattttggcatctaaattttggtcaacctgggttggccctggagctaggaggagcttaccagatttgaaggcagccggagagggttctgtacaccaccctttatctgctaaggagtcatttaaagcagcagtgacatttttgttcagaaaatggtaccttcgtgctgtttcattctggaagaacataaagcaactttcagaaaataccctccagttaatggtcagatcaaattggaacgatttcctacatattattaaggatcttcaactaccaagcatggatcatcttatttcgacaatagtgcaatggtttgagaggagaagtaaagcatttgagcctacttatttatatggcgtggaaaagggttatttcttgctttctgaaggtgctaaaactcgtcatggtgtccgaacaatcaatatcacaatttctgctcgaaatccttgctttggaaacaggtggcagcaacttttgataaacagcattgttggatatgatactatacttacaaacagcttggtgaattctcctggtcatggctatttatacaactttcagacgaaggagctctatgatcttagttatgggcatgaaccaccagaaggtcctacaagatttggagattactttgtgacaaaatgtggtgtccttctaatgtcactctttgtctttttcacaaccaccatgtctgtttcatttactttgagagaaacacaatcccgcatgcttagattcacagtgcagcttcaacaccatgcacgccaccacctgccaacctttcagttgatattcgtgcatgtcatcgaatcattggtttttgtgccgattatgattgggattctcttttttctatttgagttctatgatgatcaattgcttgcgtttcttgttttgactcttgtatggttatgcgagctattcacgatgatcagtgtgcggacatccatatcgatgcagttctttccacgcttcttcttgctgtattttttggttttccatatctacttcttctcatatacctatggcttctcatatctggctttctctgctacggcagcattcatgcagcacctgattttatatttttggaaccgttttgaggtgccagctctccagagattcatgcgaagtcgagcacacattcaccagcaaacaggatgagtctaccaggagccagcaagagggtcaacagaatggaatttctgagccagctgccaacaatgctctccagtatcaagagcaaaaccctcagcgagctggaagtacccctgcaggctcaggctccctcaacccatttgggtcccttttgctgtggttgctgggaggcggtgcttctgatggcatagtttctttcttctctatgttcagagatgttcgtgatcatggtcaagattacaccgatccacctcgaaatggaaatgatcaggtgacatagaatcacggggatgaaagtgggccaattactgaactcgagtgcttgggcggcagtagtctctttctaatatgatataatgccagcacctcccgtcaaaaggataatgacgaatattggtggcaactatacagactggtgtcgctggagatgccatgttagtgttatctgtttctcacttttttagttagtaggtaagggtgaaggttgtatctatattcattacatgtgcacattccctaccgtctgaatgggagcgcccgtcccagtcctgtacagaaatgtcaactcacagcagattgtgcacattctttttgtactcccatgggcgggtgctggcctggaacatgcagtgtgtgcaccactgtcactgaattggacagttaatggtttggatacatcgttgcatgtactgttccaacttccaaattctgaattctg

SEQ ID NO: 48120 - DNA, 2287 bp, Zea Mays
cgccgcctacacacgcctagcccgctccccaagaaagagcccccgcacacaggctgggaggggagcgaaagcgaaacgtattaaactcgcgtacatcatcaaccgcatgcgctgatgcgcactgccactgccccggagaaattcaaatcccaagccccacaagcaaattaccccagcatcaaatcagcggccggccggccggcagctctcggtcgatccactgcggtttccagtcccgaataatcccaattcccaatcgattcgaagcttccttccttcgaggagagggggaggtggaaggcgcgggggaagctctgcttagggttcggaggtggccggcgccgccgcggggcggggacggcagggggatggatccggagcagacgttcctgcgggtgcacgcgcgcttatcggggacgctttcccagctgctcacgccgcggatccgcctcgtcctcgagtacctctacctcgccggcgccgtcgcgctcttctgcctgctcgtcgtcatgcacacgaacttcgtgcagcagcctggttgctcaagtgaattttctggaattgaatttggagaagcacaacttgtccaaatcaagattatcagtgggggattatggtccagcagaggtgcttcttacatcatggatctccagaacctgggacgttcagctgagaaaattttagaggttaatggtgataagttcaacattttggcatctaaattttggtcaacctgggttggccctggagctaggaggagcttaccagatttgaaggcagccggagagggttctgtacaccaccctttatctgctaaggagtcatttaaagcagcagtgacatttttgttcagaaaatggtaccttcgtgctgtttcattctggaagaacataaagcaactttcagaaaataccctccagttaatggtcagatcaaattggaacgatttcctacatattattaaggatcttcaactaccaagcatggatcatcttatttcgacaatagtgcaatggtttgagaggagaagtaaagcatttgagcctacttatttatatggcgtggaaaagggttatttcttgctttctgaaggtgctaaaactcgtcatggtgtccgaacaatcaatatcacaatttctgctcgaaatccttgctttggaaacaggtggcagcaacttttgataaacagcattgttggatatgatactatacttacaaacagcttggtgaattctcctggtcatggctatttatacaactttcagacgaaggagctctatgatcttagttatgggcatgaaccaccagaaggtcctacaagatttggagtgtgcggacatccatatcgatgcagttctttccacgcttcttcttgctgtattttttggttttccatatctacttcttctcatatacctatggcttctcatatctggctttctctgctacggcagcattcatgcagcacctgattttatatttttggaaccgttttgaggtgccagctctccagagattcatgcgaagtcgagcacacattcaccagcaaacagatgccctattggttcaggatgagtctaccaggagccagcaagagggtcaacagaatggaatttctgagccagctgccaacaatgctctccagtatcaagagcaaaaccctcagcgagctggaagtacccctgcaggctcaggctccctcaacccatttgggtcccttttgctgtggttgctgggaggcggtgcttctgatggcatagtttctttcttctctatgttcagagatgttcgtgatcatggtcaagattacaccgatccacctcgaaatggaaatgatcaggtgacatagaatcacggggatgaaagtgggccaattactgaactcgagtgcttgggcggcagtagtctctttctaatatgatataatgccagcacctcccgtcaaaaggataatgacgaatattggtggcaactatacagactggtgtcgctggagatgccatgttagtgttatctgtttctcacttttttagttagtaggtaagggtgaaggttgtatctatattcattacatgtgcacattccctaccgtctgaatgggagcgcccgtcccagtcctgtacagaaatgtcaactcacagcagattgtgcacattctttttgtactcccatgggcgggtgctggcctggaacatgcagtgtgtgcaccactgtcactgaattggacagttaatggtttggatacatcgttgcatgtactgttccaacttccaaattctgaattctg

SEQ ID NO: 48121 - DNA, 2703 bp, Zea Mays
cgccgcctacacacgcctagcccgctccccaagaaagagcccccgcacacaggctgggaggggagcgaaagcgaaacgtattaaactcgcgtacatcatcaaccgcatgcgctgatgcgcactgccactgccccggagaaattcaaatcccaagccccacaagcaaattaccccagcatcaaatcagcggccggccggccggcagctctcggtcgatccactgcggtttccagtcccgaataatcccaattcccaatcgattcgaagcttccttccttcgaggagagggggaggtggaaggcgcgggggaagctctgcttagggttcggaggtggccggcgccgccgcggggcggggacggcagggggatggatccggagcagacgttcctgcgggtgcacgcgcgcttatcggggacgctttcccagctgctcacgccgcggatccgcctcgtcctcgagtacctctacctcgccggcgccgtcgcgctcttctgcctgctcgtcgtcatgcacacgaacttcgtgcagcagcctggttgctcaagtgaattttctggaattgaatttggagaagcacaacttgtccaaatcaagattatcagtgggggattatggtccagcagaggtgcttcttacatcatggatctccagaacctgggacgttcagctgagaaaattttagaggttaatggtgataagttcaacattttggcatctaaattttggtcaacctgggttggccctggagctaggaggagcttaccagatttgaaggcagccggagagggttctgtacaccaccctttatctgctaaggagtcatttaaagcagcagtgacatttttgttcagaaaatggtaccttcgtgctgtttcattctggaagaacataaagcaactttcagaaaataccctccagttaatggtcagatcaaattggaacgatttcctacatattattaaggatcttcaactaccaagcatggatcatcttatttcgacaatagtgcaatggtttgagaggagaagtaaagcatttgagcctacttatttatatggcgtggaaaagggttatttcttgctttctgaaggtgctaaaactcgtcatggtgtccgaacaatcaatatcacaatttctgctcgaaatccttgctttggaaacaggtggcagcaacttttgataaacagcattgttggatatgatactatacttacaaacagcttggtgaattctcctggtcatggctatttatacaactttcagacgaaggagctctatgatcttagttatgggcatgaaccaccagaaggtcctacaagatttggagattactttgtgacaaaatgtggtgtccttctaatgtcactctttgtctttttcacaaccaccatgtctgtttcatttactttgagagaaacacaatcccgcatgcttagattcacagcttcaacaccatgcacgccaccacctgccaacctttcagttgatattcgtgcatgtcatcgaatcattggtttttgtgccgattatgattgggattctcttttttctatttgagttctatgatgatcaattgcttgcgtttcttgttttgactcttgtatggttatgcgagctattcacgatgatcagtgtgcggacatccatatcgatgcagttctttccacgcttcttcttgctgtattttttggttttccatatctacttcttctcatatacctatggcttctcatatctggctttctctgctacggcagcattcatgcagcacctgattttatatttttggaaccgttttgaggtgccagctctccagagattcatgcgaagtcgagcacacattcaccagcaaacaggtgtccacattacatcctcaactatctacacttctaccttacacattgctagggtaaatgtgagggaccctggtacaataaacgatggcctcggtgctgctcgtgaagcagatgccctattggttcaggatgagtctaccaggagccagcaagagggtcaacagaatggaatttctgagccagctgccaacaatgctctccagtatcaagagcaaaaccctcagcgagctggaagtacccctgcaggctcaggctccctcaacccatttgggtcccttttgctgtggttgctgggaggcggtgcttctgatggcatagtttctttcttctctatgttcagagatgttcgtgatcatggtcaagattacaccgatccacctcgaaatggaaatgatcaggtgacatagaatcacggggatgaaagtgggccaattactgaactcgagtgcttgggcggcagtagtctctttctaatatgatataatgccagcacctcccgtcaaaaggataatgacgaatattggtggcaactatacagactggtgtcgctggagatgccatgttagtgttatctgtttctcacttttttagttagtaggtaagggtgaaggttgtatctatattcattacatgtgcacattccctaccgtctgaatgggagcgcccgtcccagtcctgtacagaaatgtcaactcacagcagattgtgcacattctttttgtactcccatgggcgggtgctggcctggaacatgcagtgtgtgcaccactgtcactgaattggacagttaatggtttggatacatcgttgcatgtactgttccaacttccaaattctgaattctg

SEQ ID NO: 48122 - DNA, 2363 bp, Zea Mays
cgccgcctacacacgcctagcccgctccccaagaaagagcccccgcacacaggctgggaggggagcgaaagcgaaacgtattaaactcgcgtacatcatcaaccgcatgcgctgatgcgcactgccactgccccggagaaattcaaatcccaagccccacaagcaaattaccccagcatcaaatcagcggccggccggccggcagctctcggtcgatccactgcggtttccagtcccgaataatcccaattcccaatcgattcgaagcttccttccttcgaggagagggggaggtggaaggcgcgggggaagctctgcttagggttcggaggtggccggcgccgccgcggggcggggacggcagggggatggatccggagcagacgttcctgcgggtgcacgcgcgcttatcggggacgctttcccagctgctcacgccgcggatccgcctcgtcctcgagtacctctacctcgccggcgccgtcgcgctcttctgcctgctcgtcgtcatgcacacgaacttcgtgcagcagcctggttgctcaagtgaattttctggaattgaatttggagaagcacaacttgtccaaatcaagattatcagtgggggattatggtccagcagaggtgcttcttacatcatggatctccagaacctgggacgttcagctgagaaaattttagaggttaatggtgataagttcaacattttggcatctaaattttggtcaacctgggttggccctggagctaggaggagcttaccagatttgaaggcagccggagagggttctgtacaccaccctttatctgctaaggagtcatttaaagcagcagtgacatttttgttcagaaaatggtaccttcgtgctgtttcattctggaagaacataaagcaactttcagaaaataccctccagttaatgatcaaattggaacgatttcctacatattattaaggatcttcaactaccaagcatggatcatcttatttcgacaatagtgcaatggtttgagaggagaagtaaagcatttgagcctacttatttatatggcgtggaaaagggttatttcttgctttctgaaggtgctaaaactcgtcatggtgtccgaacaatcaatatcacaatttctgctcgaaatccttgctttggaaacaggtggcagcaacttttgataaacagcattgttggatatgatactatacttacaaacagcttggtgaattctcctggtcatggctatttatacaactttcagacgaaggagctctatgatcttagttatgggcatgaaccaccagaaggtcctacaagatttggagattactttgtgacaaaatgtggtgtccttctaatgtcactctttgtctttttcacaaccaccatgtctgtttcatttactttgagagaaacacaatcccgcatgcttagattcacagtgcagcttcaacaccatgcacgccaccacctgccaacctttcagttgatattcgtgcatgtcatcgaatcattggtttttgtgccgattatgattgggattctcttttttctatttgagttctatgatgatcaattgcttgcgtttcttgttttgactcttgtatggttatgcgagctattcacgatgatcagtgtgcggacatccatatcgatgcagttctttccacgcttcttcttgctgtattttttggttttccatatctacttcttctcatatacctatggcttctcatatctggctttctctgctacggcagcattcatgcagcacctgattttatatttttggaaccgttttgaggtgccagctctccagagattcatgcgaagtcgagcacacattcaccagcaaacagagatgttcgtgatcatggtcaagattacaccgatccacctcgaaatggaaatgatcaggtgacatagaatcacggggatgaaagtgggccaattactgaactcgagtgcttgggcggcagtagtctctttctaatatgatataatgccagcacctcccgtcaaaaggataatgacgaatattggtggcaactatacagactggtgtcgctggagatgccatgttagtgttatctgtttctcacttttttagttagtaggtaagggtgaaggttgtatctatattcattacatgtgcacattccctaccgtctgaatgggagcgcccgtcccagtcctgtacagaaatgtcaactcacagcagattgtgcacattctttttgtactcccatgggcgggtgctggcctggaacatgcagtgtgtgcaccactgtcactgaattggacagttaatggtttggatacatcgttgcatgtactgttccaacttccaaattctgaattctg

SEQ ID NO: 48123 - DNA, 2505 bp, Zea Mays
cgccgcctacacacgcctagcccgctccccaagaaagagcccccgcacacaggctgggaggggagcgaaagcgaaacgtattaaactcgcgtacatcatcaaccgcatgcgctgatgcgcactgccactgccccggagaaattcaaatcccaagccccacaagcaaattaccccagcatcaaatcagcggccggccggccggcagctctcggtcgatccactgcggtttccagtcccgaataatcccaattcccaatcgattcgaagcttccttccttcgaggagagggggaggtggaaggcgcgggggaagctctgcttagggttcggaggtggccggcgccgccgcggggcggggacggcagggggatggatccggagcagacgttcctgcgggtgcacgcgcgcttatcggggacgctttcccagctgctcacgccgcggatccgcctcgtcctcgagtacctctacctcgccggcgccgtcgcgctcttctgcctgctcgtcgtcatgcacacgaacttcgtgcagcagcctggttgctcaagtgaattttctggaattgaatttggagaagcacaacttgtccaaatcaagattatcagtgggggattatggtccagcagaggtgcttcttacatcatggatctccagaacctgggacgttcagctgagaaaattttagaggttaatggtgataagttcaacattttggcatctaaattttggtcaacctgggttggccctggagctaggaggagcttaccagatttgaaggcagccggagagggttctgtacaccaccctttatctgctaaggagtcatttaaagcagcagtgacatttttgttcagaaaatggtaccttcgtgctgtttcattctggaagaacataaagcaactttcagaaaataccctccagttaatggtcagatcaaattggaacgatttcctacatattattaaggatcttcaactaccaagcatggatcatcttatttcgacaatagtgcaatggtttgagaggagaagtaaagcatttgagcctacttatttatatggcgtggaaaagggttatttcttgctttctgaaggtgctaaaactcgtcatggtgtccgaacaatcaatatcacaatttctgctcgaaatccttgctttggaaacaggtggcagcaacttttgataaacagcattgttggatatgatactatacttacaaacagcttggtgaattctcctggtcatggctatttatacaactttcagacgaaggagctctatgatcttagttatgggcatgaaccaccagaaggtcctacaagatttggagattatgattgggattctcttttttctatttgagttctatgatgatcaattgcttgcgtttcttgttttgactcttgtatggttatgcgagctattcacgatgatcagtgtgcggacatccatatcgatgcagttctttccacgcttcttcttgctgtattttttggttttccatatctacttcttctcatatacctatggcttctcatatctggctttctctgctacggcagcattcatgcagcacctgattttatatttttggaaccgttttgaggtgccagctctccagagattcatgcgaagtcgagcacacattcaccagcaaacaggtgtccacattacatcctcaactatctacacttctaccttacacattgctagggtaaatgtgagggaccctggtacaataaacgatggcctcggtgctgctcgtgaagcagatgccctattggttcaggatgagtctaccaggagccagcaagagggtcaacagaatggaatttctgagccagctgccaacaatgctctccagtatcaagagcaaaaccctcagcgagctggaagtacccctgcaggctcaggctccctcaacccatttgggtcccttttgctgtggttgctgggaggcggtgcttctgatggcatagtttctttcttctctatgttcagagatgttcgtgatcatggtcaagattacaccgatccacctcgaaatggaaatgatcaggtgacatagaatcacggggatgaaagtgggccaattactgaactcgagtgcttgggcggcagtagtctctttctaatatgatataatgccagcacctcccgtcaaaaggataatgacgaatattggtggcaactatacagactggtgtcgctggagatgccatgttagtgttatctgtttctcacttttttagttagtaggtaagggtgaaggttgtatctatattcattacatgtgcacattccctaccgtctgaatgggagcgcccgtcccagtcctgtacagaaatgtcaactcacagcagattgtgcacattctttttgtactcccatgggcgggtgctggcctggaacatgcagtgtgtgcaccactgtcactgaattggacagttaatggtttggatacatcgttgcatgtactgttccaacttccaaattctgaattctg

SEQ ID NO: 48124 - DNA, 2573 bp, Zea Mays
cgccgcctacacacgcctagcccgctccccaagaaagagcccccgcacacaggctgggaggggagcgaaagcgaaacgtattaaactcgcgtacatcatcaaccgcatgcgctgatgcgcactgccactgccccggagaaattcaaatcccaagccccacaagcaaattaccccagcatcaaatcagcggccggccggccggcagctctcggtcgatccactgcggtttccagtcccgaataatcccaattcccaatcgattcgaagcttccttccttcgaggagagggggaggtggaaggcgcgggggaagctctgcttagggttcggaggtggccggcgccgccgcggggcggggacggcagggggatggatccggagcagacgttcctgcgggtgcacgcgcgcttatcggggacgctttcccagctgctcacgccgcggatccgcctcgtcctcgagtacctctacctcgccggcgccgtcgcgctcttctgcctgctcgtcgtcatgcacacgaacttcgtgcagcagcctggttgctcaagtgaattttctggaattgaatttggagaagcacaacttgtccaaatcaagattatcagtgggggattatggtccagcagaggtgcttcttacatcatggatctccagaacctgggacgttcagctgagaaaattttagaggttaatggtgataagttcaacattttggcatctaaattttggtcaacctgggttggccctggagctaggaggagcttaccagatttgaaggcagccggagagggttctgtacaccaccctttatctgctaaggagtcatttaaagcagcagtgacatttttgttcagaaaatggtaccttcgtgctgtttcattctggaagaacataaagcaactttcagaaaataccctccagttaatggtcagatcaaattggaacgatttcctacatattattaaggatcttcaactaccaagcatggatcatcttatttcgacaatagtgcaatggtttgagaggagaagtaaagcatttgagcctacttatttatatggcgtggaaaagggttatttcttgctttctgaaggtgctaaaactcgtcatggctatttatacaactttcagacgaaggagctctatgatcttagttatgggcatgaaccaccagaaggtcctacaagatttggagattactttgtgacaaaatgtggtgtccttctaatgtcactctttgtctttttcacaaccaccatgtctgtttcatttactttgagagaaacacaatcccgcatgcttagattcacagtgcagcttcaacaccatgcacgccaccacctgccaacctttcagttgatattcgtgcatgtcatcgaatcattggtttttgtgccgattatgattgggattctcttttttctatttgagttctatgatgatcaattgcttgcgtttcttgttttgactcttgtatggttatgcgagctattcacgatgatcagtgtgcggacatccatatcgatgcagttctttccacgcttcttcttgctgtattttttggttttccatatctacttcttctcatatacctatggcttctcatatctggctttctctgctacggcagcattcatgcagcacctgattttatatttttggaaccgttttgaggtgccagctctccagagattcatgcgaagtcgagcacacattcaccagcaaacaggtgtccacattacatcctcaactatctacacttctaccttacacattgctagggtaaatgtgagggaccctggtacaataaacgatggcctcggtgctgctcgtgaagcagatgccctattggttcaggatgagtctaccaggagccagcaagagggtcaacagaatggaatttctgagccagctgccaacaatgctctccagtatcaagagcaaaaccctcagcgagctggaagtacccctgcaggctcaggctccctcaacccatttgggtcccttttgctgtggttgctgggaggcggtgcttctgatggcatagtttctttcttctctatgttcagagatgttcgtgatcatggtcaagattacaccgatccacctcgaaatggaaatgatcaggtgacatagaatcacggggatgaaagtgggccaattactgaactcgagtgcttgggcggcagtagtctctttctaatatgatataatgccagcacctcccgtcaaaaggataatgacgaatattggtggcaactatacagactggtgtcgctggagatgccatgttagtgttatctgtttctcacttttttagttagtaggtaagggtgaaggttgtatctatattcattacatgtgcacattccctaccgtctgaatgggagcgcccgtcccagtcctgtacagaaatgtcaactcacagcagattgtgcacattctttttgtactcccatgggcgggtgctggcctggaacatgcagtgtgtgcaccactgtcactgaattggacagttaatggtttggatacatcgttgcatgtactgttccaacttccaaattctgaattctg

SEQ ID NO: 48125 - DNA, 2703 bp, Zea Mays
cgccgcctacacacgcctagcccgctccccaagaaagagcccccgcacacaggctgggaggggagcgaaagcgaaacgtattaaactcgcgtacatcatcaaccgcatgcgctgatgcgcactgccactgccccggagaaattcaaatcccaagccccacaagcaaattaccccagcatcaaatcagcggccggccggccggcagctctcggtcgatccactgcggtttccagtcccgaataatcccaattcccaatcgattcgaagcttccttccttcgaggagagggggaggtggaaggcgcgggggaagctctgcttagggttcggaggtggccggcgccgccgcggggcggggacggcagggggatggatccggagcagacgttcctgcgggtgcacgcgcgcttatcggggacgctttcccagctgctcacgccgcggatccgcctcgtcctcgagtacctctacctcgccggcgccgtcgcgctcttctgcctgctcgtcgtcatgcacacgaacttcgtgcagcagcctggttgctcaagtgaattttctggaattgaatttggagaagcacaacttgtccaaatcaagattatcagtgggggattatggtccagcagaggtgcttcttacatcatggatctccagaacctgggacgttcagctgagaaaattttagaggttaatggtgataagttcaacattttggcatctaaattttggtcaacctgggttggccctggagctaggaggagcttaccagatttgaaggcagccggagagggttctgtacaccaccctttatctgctaaggagtcatttaaagcagcagtgacatttttgttcagaaaatggtaccttcgtgctgtttcattctggaagaacataaagcaactttcagaaaataccctccagttaatgatcaaattggaacgatttcctacatattattaaggatcttcaactaccaagcatggatcatcttatttcgacaatagtgcaatggtttgagaggagaagtaaagcatttgagcctacttatttatatggcgtggaaaagggttatttcttgctttctgaaggtgctaaaactcgtcatggtgtccgaacaatcaatatcacaatttctgctcgaaatccttgctttggaaacaggtggcagcaacttttgataaacagcattgttggatatgatactatacttacaaacagcttggtgaattctcctggtcatggctatttatacaactttcagacgaaggagctctatgatcttagttatgggcatgaaccaccagaaggtcctacaagatttggagattactttgtgacaaaatgtggtgtccttctaatgtcactctttgtctttttcacaaccaccatgtctgtttcatttactttgagagaaacacaatcccgcatgcttagattcacagtgcagcttcaacaccatgcacgccaccacctgccaacctttcagttgatattcgtgcatgtcatcgaatcattggtttttgtgccgattatgattgggattctcttttttctatttgagttctatgatgatcaattgcttgcgtttcttgttttgactcttgtatggttatgcgagctattcacgatgatcagtgtgcggacatccatatcgatgcagttctttccacgcttcttcttgctgtattttttggttttccatatctacttcttctcatatacctatggcttctcatatctggctttctctgctacggcagcattcatgcagcacctgattttatatttttggaaccgttttgaggtgccagctctccagagattcatgcgaagtcgagcacacattcaccagcaaacaggtgtccacattacatcctcaactatctacacttctaccttacacattgctagggtaaatgtgagggaccctggtacaataaacgatggcctcggtgctgctcgtgaagcagatgccctattggttcaggatgagtctaccaggagccagcaagagggtcaacagaatggaatttctgagccagctgccaacaatgctctccagtatcaagagcaaaaccctcagcgagctggaagtacccctgcaggctcaggctccctcaacccatttgggtcccttttgctgtggttgctgggaggcggtgcttctgatggcatagtttctttcttctctatgttcagagatgttcgtgatcatggtcaagattacaccgatccacctcgaaatggaaatgatcaggtgacatagaatcacggggatgaaagtgggccaattactgaactcgagtgcttgggcggcagtagtctctttctaatatgatataatgccagcacctcccgtcaaaaggataatgacgaatattggtggcaactatacagactggtgtcgctggagatgccatgttagtgttatctgtttctcacttttttagttagtaggtaagggtgaaggttgtatctatattcattacatgtgcacattccctaccgtctgaatgggagcgcccgtcccagtcctgtacagaaatgtcaactcacagcagattgtgcacattctttttgtactcccatgggcgggtgctggcctggaacatgcagtgtgtgcaccactgtcactgaattggacagttaatggtttggatacatcgttgcatgtactgttccaacttccaaattctgaattctg

SEQ ID NO: 48126 - DNA, 1647 bp, Zea Mays
tccactctccagagtccagacctccactgtccactccaaagccgcagcagcgggcaaaaccaggcacccgcacgatccgattcggcttccgtctcactcatctcgcccggcctccgcggagagatctggcggcggaggcgatgccactgggcgacggcgcggaggcggcggacttcgtgctgccggacgagctcctggcggcgctgccgcgggacccctacgagcagctggatctggcacgccgcatcaccgcgctggcggtgtccgggcgggtgtccggcctggagcgggaggcggggcgcctgcgggcggaggccgcggggaaggaccgcgagaacgccgagctccgggagcgagtggtgctgctcgacaccgcgctgcaggagaccaacgccaggctccgcgccgcgctcgaggacaatattaagctcagcaaggagcgagactcgctggcgcagacgtccaagaagctggcgcgcgacctgcagaagctggagtcattcaagaggcatctgatgcagtcgttgcgtgatgatagttcatcaccacaggaaacagttgacattacaacatgtgaccagccagtagcaacaaaagcatcgtttagtggagatggtggatctggcagccaccctacaacaaatatatttagtgaatctttggatgctggaagtacgaaccgagacggcaaatatctaccacagcaacaccgaagctgatgtctggtgctacctcgccaacaaaatctcgaattgaagctcacatgtcaatgacaccatggtatccatcaagcaagcagtcctcggcagctagctcacctccacgaggaggttcaaacccaggtcggactcctcgtgttgatggaaaggaattttttcgccaagccaggagtcgtctatcctatgaacaatttggagcattcttagccaacatcaaagaactcaatgcccataagcagtcccgtgaggaaactctcaagaaagctgaggagatctttggtccagaaaacaaagatctatatctgtctttccgaggcttgctaaatcgtagcatgccgtaggctccgtatgtctctttgtaatgaagttgccgcattggcaacttattgccatctaagttgtggatttgaagatctagttggaagttttgccccccataatccacactaggtttaacgagcgtcgagcggacctctctgaacaactgagtgcgcaaaccagagttgctcctgtaagtgttgcacctgtcgagtgctaaactataggatgcatcctgtcatggtgcctacattcttcgtaaaaccatgaaacagaatcttgggagtaaaattccatctcgtccccaactcaatcatcaattgcaatcggtagctgcatcttgttctgttaacctcgaactaactttttcgttttgctctgtttgtactgaggtttctctgtgaaaagttgatttcgcagctaacaaaagttggcacatgattctgagaacacgggcaatgaaaagaggaaaacactcggacaaacattggtaagatcgatctgcatttccacagcagagttcacctgttttaactaggcagtagatgcacaccaatacctgtaaccatgttccaccttctcatggaaggacagccaaaaaaatcaagcc

SEQ ID NO: 48127 - DNA, 2907 bp, Zea Mays
cggaaaagaggcagcaccgcagaagccgcgtccgattcgttcacgcaaccacgcgttcgtgggccgcctctctctcataaaatccaccgccctcgtcgccaaaatccccccaatcccaccgccagtctccgcccgcgcctcagaagtcagaaccctagccccggcgacgccttcagatccggcgcccttatccggcggaatcgctcgctcctaccaccggttgccgcgtcccggcatctcggctacccggcgtcctgtacccgacttctacgccctcgatctcccccagccgtcgtcacgaggaatcgtttgctccacaggctacgtctccaccaagcctgcatcgacgactcgaaggatccgtgccgtcgtcgatcgccgatcgcctcttcgtagatcgaatctgttcagtgttctgctattcgttgtatttcatctgagatctgaaaaaagtattcgggccatctcgagatagagaggccttcataggcggagaaaaagaaacaggactcgccatccatcatgggtgttgtctattaccaatataagagtgaaaaggaaatctgttctatgcccgtgccccatgcttttatttctgtgtctgaactcaagcagcttatcatgacgagcggtaggcacggccgtggtcgaacccgcggtcgtgccacagaggatattgtcatctccaacgcccaaactggcgaagaatatgcagatgaaagagcatccataccacagaacacaactgtgttggtccgcagaatttccattcctgggcaactgtcagagaagattgttttgtcccctaggccggaagtcacagaagaatgttctgtaccttgcaagtcggtggttactgactcaagctcaaagtcatgttcttccacagtagtgcaagatgaagatgctgtaattgcagcagtaattgatgctgctgaactcaaatgggaacagctcccctctaaaagaggacaagacagtggaaggtttacatcaagacgtaactatgggccgttggaaggggaaacacctccacccggctatgtctgccgctcttgtggtgttccaggccatttcattcaacactgctcacaggaaaacaagatgcctccacctggatacatttgctacagatgccgaattccagggcattttatccaccattgtccaagcattggcgatcccaagttcgacaacaataaaatgagtcggtctcttgtcccagtagttacacctgtcgatggcattttggattcacttgtcccgtctgccccagccggggctgttgatgacttgccagcagagctccactgccgactatgtaaaaaagtgatgagagatgcagtattgacaagcaagtgctgttttgacagtttttgtgatagatgcattcgggattatattattaaagagtcgaagtgcatttgtggagtggagacactagcagatgacctcattccaaatcaaacacttcggagcacaatcagcaatatgttgggaacacagacaagcagtggtggtagtggtacaacaagacacagaagttcgtcaggcagcaaccctaacccaaaaatacagagccacactgcttctgttgcgtcagcaagggaggtgaagcagtctatagaccatcagctaccagcggtatctgcacctgattatgtgctccaggttgccacagaaggtgacctggtgaaccagcctctagagaaattagcagccactgctgaaatccttagcaaatatgaaggcaattctgcagaagtgtcagtagagaaggcggtagcaaatgctgaagccctcaaagtgaaggatggaagtgaaacgacttcgaatgccaccactgtttcagggtcccgagaacatgatgtcacaaggacagatcaagcaaagaagaagcggaagaaggcagacttaaccaagaacgttcagcctaacaatgttggctatggttacaatgtttcttttgaccctgcatattacaatcccttcatcaatggacatccttgggcaactgaaccctacatgtatagctcaatggggatgccgtacgctggttatccgatggatccatattgtgcaaatccaatggatccatattgtgagtatccaatggatccatattgtgtgaatccaatgcaaggctatccagcaagctaccaaaggcctgaaactgagcccatgcgtcgtgggagcactgcggctgccagagcacctttaaagcaccgtgagaggagtgaccggcaccggcccaaggacactcgtcttcagccccaatcaacagagcacaagcgacggctggtctcctctcatggaacaaggtcaaactcagatagaagggaccatgggcattcttatggggcatcctgagtagacttatttgaggatcattctactaggaagcggatgcccgttttctcccggagtagtatgatggtagacaaatcggtggagatcgagacggttccaggagtatgatgactcgtgagtcgtgaagaggacgcaagctacgaggaacgtaatttcaagacgagatggggtcatagatcatcaggaggcgtggacacaaggcactgtcctaaacttggcagaccaagtgcagcaatatattgctggtcaccagtgctcacctattgatcttcttatactcgtaattgtatgtatgcccctgaaagcagaagaaagattgtcacaaagcagagggaactttcggttccctagcgaaatgtattgatattaaacattttttttgtattaatgctaagagtgttgccagctctctctataatgcgaactctccaaataatttcgctatgtttccgagctctcaaattatttggtctcccttctaccctgtgagaaccgtgttgtcgttgataataagtgcaccaaagacttccagtcttt

SEQ ID NO: 48128 - DNA, 834 bp, Zea Mays
cagcaccgcagaagccgcgtccgattcgttcacgcaaccacgcgttcgtgggccgcctctctctcataaaatccaccgccctcgtcgccaaaatccccccaatcccaccgccagtctccgcccgcgcctcagaagtcagaaccctagccccggcgacgccttcagatccggcgcccttatccggcggaatcgctcgctcctaccaccggttgccgcgtcccggcatctcggctacccggcgtcctgtacccgacttctacgccctcgatctcccccagccgtcgtcacgaggaatcgtttgctccacaggctacgtctccaccaagcctgcatcgacgactcgaaggatccgtgccgtcgtcgatcgccgatcgcctcttcgtagatcgaatctgttcagtgttctgctattcgttgtatttcatctgagatctgaaaaaagtattcgggccatctcgagatagagaggccttcataggcggagaaaaagaaacaggactcgccatccatcatgggtgttgtctattaccaatataagagtgaaaaggaaatctgttctatgcccgtgccccatgcttttatttctgtgtctgaactcaagcagcttatcatgacgagcggtaggcacggccgtggtcgaacccgcggtcgtgccacagaggatattgtcatctccaacgcccaaactggcgaagaatatgcagatgaaagagcatccataccacagaacacaactgtgttggtccgcagaatttccattcctgggcaactgtcagagaagattgttttgtcccctagggcagagaaatgaggactaagcgtactaacatcatg

SEQ ID NO: 48129 - DNA, 699 bp, Zea Mays
caacaataggagacgaacaaactttggctttgggtgtgcggcgggcggcggcaccgtggcagttggcattgtggtctgtagactgcagcagccggtaggactctgcgtctcctcccgtccttcggttctgcctgcggcggacagatctgctgctcgacttctccggttgtccctgtggcggatggcacatcggcaagccaggcagccagctcgtcagctctaaatcagttaggaaatattgattatgatccgtgacgatgtcaaacagtggaggcaagggatgtcgtccccgtgccaaatccatgccacccaagaagcaactaggtatttctagtttcttgcctgaacctccatcgctgccatcttcttggaaagatagcaccagtggtgccaatttcatttcagggacaaagaggacattatgtgcaagagacagtcaggggattccagggtcttcgtctgtaggagcaaagagtgttactgctggtgatgctactgctcgtttaccacttgaaccagggattgatggtactagcacacagattcagtaactattcattctattttgactgatctaaaaccttcggaaacaattcatatcactcctaatcctcagccctgcatggattttgaggaacaagatgctgatagtgatcccgatgtcatgaatgattatggtgagctttaactgcgagtcta

SEQ ID NO: 48130 - DNA, 752 bp, Zea Mays
caaactttggctttgggtgtgcggcgggcggcggcaccgtggcagttggcattgtggtctgtagactgcagcagccggtaggactctgcgtctcctcccgtccttcggttctgcctgcggcggacagatctgctgctcgacttctccggttgtccctgtggcggatggcacatcggcaagccaggcagccagctcgtcagctctaaatcagttaggaaatattgattatgatccgtgacgatgtcaaacagtggaggcaagggatgtcgtccccgtgccaaatccatgccacccaagaagcaactaggtatttctagtttcttgcctgaacctccatcgctgccatcttcttggaaagatagcaccagtggtgccaatttcatttcagggacaaagaggacattatgtgcaagagacagtcaggggattccagggtcttcgtctgtaggagcaaagagtgttactgctggtgatgctactgctcgtttaccacttgaaccagggattgatggtactagcacacaggtaatagcgcctgctattggtattgtgagtatcgatgatgacaaggaggacgatgagggacatgtaggtgattcagtaactattcattctattttgactgatctaaaaccttcggaaacaattcatatcactcctaatcctcagccctgcatggattttgaggaacaagatgctgatagtgatcccgatgtcatgaatgattatggtgagctttaactgcgagtcta

SEQ ID NO: 48131 - DNA, 2136 bp, Zea Mays
caccaatccgacagaaacgaacaaggacttagtacttttgaacacacgcgcccagggcggtccgccaccgcagcagcagaaggtatgcagtatgctactgctgctctccgcctagcggccggcggctatatatatgcatgaatgggcggccatccttaagcagcaaataaaggtagcatatatagctcgctagacgagttgcagagagcaagtagattgctatatatcagcaatataatgtcgatgcattacttggccgctctgtcggcggtggctctgggagctatcttgcttctccgttcggccttcaaatggatgaacggcgcccggacgggtaaagacgaagggcggatgctgccgccggggtcgaggggcctgccgctcctcggcgagacgctcgagttcttcgcggcgtcgccgacccttgagctagtgcccttcttcaagcggcggctggagaggttcgggcccatcttccggacgaacatagttggcgaggacctgatcgtgtcgctggacccggagctgaacgcgcgcgtgctgcagcaggaggagcgcggcttccagatctggtacccctcctctttcatgcgcgtgttcggcgacgacaacatcatctccgcgctcggcccgctccaccgccacatcaggaacctcgtgctccgcctcttcggccccgaggccctccgcctggtgctgctccgtgacgtgcagcggagcgcgcgcgacgagctgcgctcatggctcgaccacccggacgtcgaggtcaggacggccacctccaggatgatattcgccgtcacggcgaagaagctgatcagccacgacgacgcggcgtcgggaggaagcctgtggaaatgcttcgacgcctggaccaaggggctgctgtcgttcccgctctgcgttccggggacagccttctacaagtgcatgcagggacgcaagaacgtcatgaagatactgaagcagcagctcgacgagcgcaggaacacggccgagcgcaggaccgtggatttcttcgacctcgtgatcgacgagctcaacaagcccgaccctataatgaacgagaacatcgcgttggacctgttgttcctgctcctcttcgcgagccacgagacgacgtcgatgggactgaccgcgatactcaagttcctcacggacaacccaaaggccctgcaagaattgaccgaggagcatgaaaaaatcgtggaaacaagggtggatccggactctgatatcacctgggaggagtacaagtctatgagattcacatctcatgttatacatgaatctcttaggctagcaaacatcgctccggtggtgttcagacaggcaaaccaagacgtatacataaaggctcacctgaactcaaaggtttacgaggaccccacggcgttcaatccatggagatggaaggatactcccgaaccagttggtggttcaaaggattttatggcctttgggggtggtttgcggttatgtgttggagctgactttgccaagctgcaaatggctatgttcatccactgcttggttaccaagtacagttggaagcccatcagcaaaggaacgatggtgttttatcccggtctacgatttccggaaggctttcacatccagcttcttgcaaaagcatgaaattttattgctggaaaagatttgcacacggggtactaaaaatatgctttttcgttagtaattatagttgtgtaataaaaaaactaaagagacaattgaatatgagtaggttttaattggtcatatctaatacacataaatatacgaacgtgctactaaacctcataaagaaaagcgaactagagcaagacttcaagatcacgcatcagcctactgtacgtgagatgcccaaagcacgtacgagcggtgaccagcaaatcagaaatgcgaagtacgcgcgtagatgaaaggcttttttttttgaaaaaatggtttatgtagtatggtttcccaattttcaagatgtatgcctttatactgaatgttgtaatgtaatgcatgtaattgtttccacttatatataataagttcagctaaggcactggtgaattattgtaattttcctttcccgtagaatatacctgaaccttgaattgaatacaactttatatatgtcac

SEQ ID NO: 48132 - DNA, 972 bp, Zea Mays
cttgataataaatataccacccaaagagctttctcgtcactgctctcccggccctctctagtctcaacgtttcattccttgagctttgcgatgacatgggagcagcgttagggcgcaggacgtagacgacgacgtacggtcaccggccggcatccatggacgattcaagctcacagccagccacaattgatgcatgcagagtgagcggaggagaagagagaaaccaaaggagggaggaggacgacgacgaggagacggcggcggcggaggcagaggccggcaacggcagccagctgatggtggtgcccgaggacgggtacgagtggaagaagtacggccagaagttcatcaagaacatccagaaaatcaggagctacttccggtgccggcacaggctgtgcggcgccaagaagaaggtggagtggcacccgcgcgaccccagcgcggccctccgcgtcgtctacgatggcgcgcaccagcacggcgccgcgccgccggcggctccggagcagggcggcggcggcggcgcctccaacagatacgagctgggcgcgcagtacttcggcgccgggccggccgggtcagggtgacacctgacaacgcgaggaggaaggccggccggcgtcgcgccacgcatgcatcagttctggctgccgctgcttccaggttccatctctttcgctgcgcaacggacgacggcggcggcaggtggctggtgctgccggtgccggttgacgccttgcgccggcgcaacgtgatgttgagtgcggattggctgttgctgcacgctccgatcaactctgttattgtcctagtaattaggacgatggcgcatatggtttttttatgcatcaaaaataaaatactctctctatcccaaatcaaaattcttttttagataattaataaatccatacagtaattgttttatatatgtgtctagattcatcttcttatatttttggactgagg

SEQ ID NO: 48133 - DNA, 793 bp, Zea Mays
atggcgccatcctcccctctgctctgccatcgaggagtgctagagctttttgatgtgcttggctgggatctgagggtgccagcgtgccagagcacacgtttggatgccaggatggatcacatcgtcgggggcaagttcaagctcaggaagaagatcaggagtgaatcatttggggaaatttacctcgccgtgaacgtgcagaatggcgaggaagtggctgtcaaactggaatcagtcacatcacgccatccacaacttcactatgaatcaaaactatacatgcttttgcagggtggaactgggattccacatcttaagtggttcggggtggaggggcagtacaatgtcatggtaactctagtggacagaatcatagctctgttagcactattttatcaaggcaaccttcgactgcccgatgaagacctatggcttcctcacgcctgaattctggagccataccaagttttccatgactctgttccagcaatacacggacctgctggcgaaggctaccaagggtcttgtgctttaggcctgaactgagacagtagagccttatgatggtttgatgtgtctaaatgcactttcttatatattaagaactgtgggagtcaactttggaccctgtttgctggccgcttcgatgattttgccttttggtaagcaacatccactagagaatggccttttttgttttcttccctctatctctttcttgcaagggaatcttctatgcttagaactgaatgcagtgatcagtacatgtatttgttttgaagcttgtatttac

SEQ ID NO: 48134 - DNA, 2538 bp, Zea Mays
gctcagttatggcgcgacatgcacggccgcaagaagaaccacgaggagcagagctgtcgcggcggcggcgcgtcgtctccccgctgccgacggagtgatctgtatggtgaagttgcaggcgtccgtggacgggttctgcgacgtgggcacggcgaggccctggaagtagcagctgccctccacctggttctgcacctggaagtacatgttgaaggcgtaggacgcgttgccggcggcgtccaggccgttgcacgaggagccgtagccgagcgaggtgcagtcggagaaggtgcaggcgtaggtgacgctgtcgccgatcttgctcgtgtcctgcgcgttggggttgacgacgcaccactggcggggcaggtactggaccccccgcgccgccacgagcgccgtgttccggccctgcccagacaggtccatggcgtacttgggctggccgtcgtagcgcatgatgccccagtggcgctcgaagttgcccggcgccacgctcttggcgtcctcgtcgatgaggctgaacaggtagacctcgatgtactggcccgggcgcagcggcgtgccggcgctggccgccagcttccgcagcaggcccgcgtagaacttctgcgcgaacgcggccgtggcgtgcttgtcgccgtcggtcggccacccgacctcgccgaccacgacggggaggccgccgacgcccgccgcggccagcgcggacacgagcgtgtcgaagttggcgtcgaacacgttggtgtactggatgccgttgtccacgacggggctgcccgtgccgtcgaagaaggcgtagtccagcgggaagtcgtcgttgtcgtagaggctcaggaacgggtagatgttgacggtgaagggcgcgccgctctggttcaggaactgcacgatctccgtcatgaggccggcgatgtcgggccggaaccgccccgccgacggcaccaggttgtccttgggcgagttgtacacgtcggcgttcagcggcaccgtcgccttgatggtgtcgccgaagccggcgtcgttcagcgcgcgctggatgttctgcagggcgggcaacgtgacgttcaggaacgtgccgttgaaagacgacaggaagggctcattcccgacagctacgtacctgcacgcaaacgtttgtacgactgattaatcgggtattttcagacacgctttagtgggtgtttgaatgcactagagataatagttagtagctaaaattagttgaaacatccaaacaccctatctaatagttcagctattagttatttttggtaaattagttatatctaacaattttaagggggtgtttgaatgcactagaactaatagttagttgactaaaaattgttagtacaattagctagctaacaaataactacccaactattaactaatttaccaaaaatagctaatagctgaactattagctaggatgtttggatgtctcaactaattttagccactaactattatctctagtacattcaaacacccctttagccaactaactattagttctagtgctttcaaacactaccttagtgtcgtaaccgctacttatctcatgattcttcgaagcgaaaaattagacacgcaaaatcaaagtagttatctgaaaaagtttaaatagttctcatgtcgtatagagtagtgggcgcccggtggccactgcagttagataagggtgctaatactttcagatgtgcatgcaactttttctgcagacatttcggtccagaagacaacaaccaatccaaggttagattcttcagactgcaaaccgcacaaatgcaatggatatccgtaactttgtgctgcaaattgttctttttttttccgtcgccgaaaagccatgggcacgaacagtgcctagagaagaatgttgcaacttgttgatgtcacttcattactcatgagaaggcttttctgaatcagccggtagaaaaaccgcgtcaccctaaaccctaaaattgcaggcttgcagccactgcataccgcatagcattaaccaaagagggcttctaactaaacaatttattttatggaaacagccggtataaataattgagtttgtaaccgatatgcggagaatttttttcaccgaaaatacatatagagctcaagaaacaaagaaggacacacaaaaagtaaggaggatcgaaactaagaggagctagttaatttatgttttatgtgtgcgctatggaagtctgttttgctgaagtgcacgttcacagcttttggtactactttgttgtcaccgatataaagtttccatttttcaggggagatatatagaaagccacagcagacgcagccaacaaatgcagagctgaaaaggatcacaccaagacggcaaaggccaattgttcttgccatatcctttcgacctttcctttggaagaaaaaaaacagaaggcgcagggggtaggatcatgtgaaaaaaaaaaagaggcagtaaccagcagggactcacttgatgttcacgccgccgtcgaagttatagcggctgacgttctggcgcacccagtccct

SEQ ID NO: 48135 - DNA, 2781 bp, Zea Mays
caatatatgtcatccttctttcctcacctcaaataaacgaacaagagtattattgtctttatgaataatctatatttgtataatctagactaccaaacaactatatgtagattatattatgtctagattataatttagattatataatttacagattatataatctataagctgaaacaaacaggctctacctctccatcttccggcccatagccgcatctctgcaagtgggccctctcccgcggggagggcgatggacccgaagctgctgcggcatggaaatctgagaagtattgtcctccccccagtccccagacttgcgcgcgcctccgctgctgcgactgcgagcccaagaaaaattttcctctacgagcgcatggaggtgtccgctgggctccggctgccgcccgtcgctgcggcagcgtcgctccttggctgtcggtccgcgtcggtgccgccgcgcgcggcggcttcccattctgtgcggtccgtgtcccgcgcggttaagatcagagcagctgcaattaacggcctccaaagaaacagaagtaatctcgaatcattattctgctacgacaaatctgtccccgagcaggacattggagaaccatctggtctaaatctggaaaagaagaatgtcggggacaagcctccctgctcaagctgtgaagctaaaggtgccttgctgtgtgcaacgtgcgctggttcaggcttgtacgtcgactcgatactagagagccagggaatcatcgtgaaagtcagatgcctaggttgcggtggaactgggaacatcatgtgctccaaatgtggaggccgtgggcatacataacatgaacgctaaagcttgcaccttgcagatcaaaggagttgactctatggagaattttctctgtgttacatgttacggtgtgctgagctagctgctgtagctacatcgagacatgctttagaaggctaagttaatgaactatcctcttttactttttttttgttccccacttcccctcattccgtgcttaaaagcatgatgcgtcatgggatttcatgtgatgttgtaatcgtaaaggtgtaatggtatgtgaaagacacacttcgtacatggaggagaatgagagattaaattcagttgtgctagtactcctgtgcattaaatttttactcaaacgctctgcttcacagtgcttgtggatatgggctttcgctctcctccacaaatcacaatgctcgtgcatacggaatttcctgacggaccacgcagccgcaggagcagtccgccgccacacatagcgctcgacaaaatactcgtggctgataagctcattgttgactcgactcgttttcaattttatcgcgagctaaactaccatcttagctcggtttgttaaggagccagctcgttagctcgaactagcaactatttgttagaaaagcaaagcctacacttgtattggatgaactaataaatgatgagctttgttaatttgatgttggattcatgcgatatgtgaaactataagtattattacactttttttagttttaaattatctaggattaactagaaattgattatattgttttaataatatgtatattgttttttaccgtggctcgcgacctaaagaagctagctcaagattgaactgagccgagctggctcgatatgcagccctagccacataattcattagcttgcacaaacctcatgggcatgtgttacagttttttttcctgaagattttttctgagaatctgactgtaaagagaatcttagtatcataaaaaaagattacatgtggaggaacatgaataaatttatagagtttaggatctttaatgtgactgattcctactattacgatgactcgatcgatcatgcgttcacgttaatttttgacggttttcaataaaagcgattctcacaaaagtgcttgaaaatctaggtgtttgatagttcgcaatatcttctagtagttaaaagctgaaaaagttaaaagaaacggcccgctcgtgcgccgccgctgcccgtgcaaccgtccaccaccgcgacgcaagctgctcccacttatagatgtccaaacgggcggcacggcccgacccaactcggcccggcccgtttgagcccgacacggttaagcccgaccacttaaccgtaccgtgtcgtgccgcccgacgggctcatacctcttcctgagcacggcacggtggaggcccgaccgtgccgggcggcccgaatagcacgacccatttagtagcccgtgccggctcgagcccgcaaaacacaaaactatatttagcaaaaaaaaccctaaaaccgacaacacaaaaaacctaaaacttacagcacaaaaaccctaaaacaaagaactgtccacataatcaaatttgctccactcggtaagaaaatttagcaaagaagaaccgatgcaactcacctacaggcgcggtgctcgcccggcgccgtcggaaccgctccagcacgccgcgcagcaccacatcgagggtgtcctccatgccgtcgccgaacccatcggacgatgacgcgtacaccagccgcgggatcatcttcaccacgcgctcctgcatccgttgcacccgccgctcactgagccccttaagaacataggaggagggaggaggtgccgagtgtgcaccgtgccgtcgtagggaggagggagccaggagcgagagggaggaagagtgggagagtgggttagggattgcattaggagcagacgcggcagccctcggggacttgtgggctagcggcgggggtgggtg

SEQ ID NO: 48136 - DNA, 2573 bp, Zea Mays
atggacccgaagctgctgcggcatggaaatctgagaagtattgtcctccccccagtccccagacttgcgcgcgcctccgctgctgcgactgcgagcccaagaaaaattttcctctacgagcgcatggaggtgtccgctgggctccggctgccgcccgtcgctgcggcagcgtcgctccttggctgtcggtccgcgtcggtgccgccgcgcgcggcggcttcccattctgtgcggtccgtgtcccgcgcggttaaggtgggcctcctttcgctctcccctcttgtcgcaccccctcgcgagatcagagcagctgcaattaacggcctccaaagaaacagaagtaatctcgaatcattattctgctacgacaaatctgtccccgagcaggacattggagaaccatctggtctaaatctggaaaagaagaatgtcggggacaagcctccctgctcaagctgtgaagctaaaggtgccttgctgtgtgcaacgtgcgctggttcaggcttgtacgtcgactcgatactagagagccagggaatcatcgtgaaagtcagatgcctaggttgcggtggaactgggaacatcatgtgctccaaatgtggaggccgtgggcatacataacatgaacgctaaagcttgcaccttgcagatcaaaggagttgactctatggagaattttctctgtgttacatgttacggtgtgctgagctagctgctgtagctacatcgagacatgctttagaaggctaagttaatgaactatcctcttttactttttttttgttccccacttcccctcattccgtgcttaaaagcatgatgcgtcatgggatttcatgtgatgttgtaatcgtaaaggtgtaatggtatgtgaaagacacacttcgtacatggaggagaatgagagattaaattcagttgtgctagtactcctgtgcattaaatttttactcaaacgctctgcttcacagtgcttgtggatatgggctttcgctctcctccacaaatcacaatgctcgtgcatacggaatttcctgacggaccacgcagccgcaggagcagtccgccgccacacatagcgctcgacaaaatactcgtggctgataagctcattgttgactcgactcgttttcaattttatcgcgagctaaactaccatcttagctcggtttgttaaggagccagctcgttagctcgaactagcaactatttgttagaaaagcaaagcctacacttgtattggatgaactaataaatgatgagctttgttaatttgatgttggattcatgcgatatgtgaaactataagtattattacactttttttagttttaaattatctaggattaactagaaattgattatattgttttaataatatgtatattgttttttaccgtggctcgcgacctaaagaagctagctcaagattgaactgagccgagctggctcgatatgcagccctagccacataattcattagcttgcacaaacctcatgggcatgtgttacagttttttttcctgaagattttttctgagaatctgactgtaaagagaatcttagtatcataaaaaaagattacatgtggaggaacatgaataaatttatagagtttaggatctttaatgtgactgattcctactattacgatgactcgatcgatcatgcgttcacgttaatttttgacggttttcaataaaagcgattctcacaaaagtgcttgaaaatctaggtgtttgatagttcgcaatatcttctagtagttaaaagctgaaaaagttaaaagaaacggcccgctcgtgcgccgccgctgcccgtgcaaccgtccaccaccgcgacgcaagctgctcccacttatagatgtccaaacgggcggcacggcccgacccaactcggcccggcccgtttgagcccgacacggttaagcccgaccacttaaccgtaccgtgtcgtgccgcccgacgggctcatacctcttcctgagcacggcacggtggaggcccgaccgtgccgggcggcccgaatagcacgacccatttagtagcccgtgccggctcgagcccgcaaaacacaaaactatatttagcaaaaaaaaccctaaaaccgacaacacaaaaaacctaaaacttacagcacaaaaaccctaaaacaaagaactgtccacataatcaaatttgctccactcggtaagaaaatttagcaaagaagaaccgatgcaactcacctacaggcgcggtgctcgcccggcgccgtcggaaccgctccagcacgccgcgcagcaccacatcgagggtgtcctccatgccgtcgccgaacccatcggacgatgacgcgtacaccagccgcgggatcatcttcaccacgcgctcctgcatccgttgcacccgccgctcactgagccccttaagaacataggaggagggaggaggtgccgagtgtgcaccgtgccgtcgtagggaggagggagccaggagcgagagggaggaagagtgggagagtgggttagggattgcattaggagcagacgcggcagccctcggggacttgtgggctagcggcgggggtgggtg

SEQ ID NO: 48137 - DNA, 4219 bp, Zea Mays
atggacccgaagctgctgcggcatggaaatctgagaagtattgtcctccccccagtccccagacttgcgcgcgcctccgctgctgcgactgcgagcccaagaaaaattttcctctacgagcgcatggaggtgtccgctgggctccggctgccgcccgtcgctgcggcagcgtcgctccttggctgtcggtccgcgtcggtgccgccgcgcgcggcggcttcccattctgtgcggtccgtgtcccgcgcggttaaggtgggcctcctttcgctctcccctcttgtcgcaccccctcgcgaggtgtgaatttctagtctagggtctgcggggccgtcgggaccaatgggtacgccgatctcgtcctcctgttcgacattgctgcttgcagggctccagggtctctggattctgttgtaacttgttcgccatttttagttacgttttgctccccgcagatagtgctttctcgccttatactgaataaagtgttgaaggcaaacattatttaacggaaatttcgcaccaagaagataccttgtgactgacagcatggaaggctcttaaatttttctggcctctaaaaatattgctgttccgcttgttacctgttctctaaatgtgccaacaacatgcttaaagccttaaaccaatgaattgtgtggaacagtaggctccatgaacgaattggatggctacaatttttgttgactattgcactagaaaaaaaactgtcacctgatctgtcgccggagggataagctcttatatctgtggtcatactacctgttcattttagtttttttcggtgcttgatgagtgatggtactgttgctgaagttcacaaggaaataactgattgataaattaaggagctttcagttgagtatacatttactaacaatgtgtatattagaatttacaaaaagctacaatgaggagtctaccagtgcaagaaacaaaccctaaaaagatattttgagaaaccgggtgatgatgtctgtaacacgatgatggctgccatgaagtccgatttaattgttggctaacacggcttgtagaaacgcccgatgaattcatctggacccgacaccctatcagcaggcaattcttttattgttgcccaaacctcttcttctgttactgttatgtccttgtccatctccaaaagatcaactctttgcctatgaaaaccatgtgaatatagctgtagtatgcgtgcttcggtgtaaccatgtcaataagctgcagtatgtgcactttttatttaaccatatgaatgtacatgtagtacttgtgtgtgatcgattttcatctaattgccctcctgttactgggatctccctgttgtcaaatttggtacctgcatcttgcttaggcatgtttatcttgttttcatgcacacaagtgtgtgtctttacatatgacaaaggcagcatctgaatacccctcagtggtaattggcattaatttttattgtgcaagcctgaacctgtagtcttgcagtatgtgttttctttgaaatttagagagttgccatggtaatttaactaactgccatcaccaatgtctgtcaatgatataaagtactgatcaatatccagtgttcagcatacagaaacctatctcttctctactatataaagcaccattttctacggattcgaaccatggttgttggttctaaactcacattcacattcacctaaccaacataacatacatgtctttatattttatactttatactcaaacataaataaaaaccgtagcaacatacacactttgctaatatgcctatatatgaatcacaggcacgcttgccatgcttatcgattgtcgtgtgttttcttttgttgtgatcgattgcatcatgagcgttggattttgcttatcaggctgaaaggaaatttgtttcaagagactgataactttctcttgccgcacagatcagagcagctgcaattaacggcctccaaagaaacagaagtaatctcgaatcattattctgctacgacaaatctgtccccgagcaggacattggagaaccatctggtctaaatctggaaaagaagaatgtcggggacaagcctccctgctcaagctgtgaagctaaaggtgccttgctgtgtgcaacgtgcgctggttcaggcttgtacgtcgactcgatactagagagccagggaatcatcgtgaaagtcagatgcctaggttgcggtggaactgggaacatcatgtgctccaaatgtggaggccgtgggcatacataacatgaacgctaaagcttgcaccttgcagatcaaaggagttgactctatggagaattttctctgtgttacatgttacggtgtgctgagctagctgctgtagctacatcgagacatgctttagaaggctaagttaatgaactatcctcttttactttttttttgttccccacttcccctcattccgtgcttaaaagcatgatgcgtcatgggatttcatgtgatgttgtaatcgtaaaggtgtaatggtatgtgaaagacacacttcgtacatggaggagaatgagagattaaattcagttgtgctagtactcctgtgcattaaatttttactcaaacgctctgcttcacagtgcttgtggatatgggctttcgctctcctccacaaatcacaatgctcgtgcatacggaatttcctgacggaccacgcagccgcaggagcagtccgccgccacacatagcgctcgacaaaatactcgtggctgataagctcattgttgactcgactcgttttcaattttatcgcgagctaaactaccatcttagctcggtttgttaaggagccagctcgttagctcgaactagcaactatttgttagaaaagcaaagcctacacttgtattggatgaactaataaatgatgagctttgttaatttgatgttggattcatgcgatatgtgaaactataagtattattacactttttttagttttaaattatctaggattaactagaaattgattatattgttttaataatatgtatattgttttttaccgtggctcgcgacctaaagaagctagctcaagattgaactgagccgagctggctcgatatgcagccctagccacataattcattagcttgcacaaacctcatgggcatgtgttacagttttttttcctgaagattttttctgagaatctgactgtaaagagaatcttagtatcataaaaaaagattacatgtggaggaacatgaataaatttatagagtttaggatctttaatgtgactgattcctactattacgatgactcgatcgatcatgcgttcacgttaatttttgacggttttcaataaaagcgattctcacaaaagtgcttgaaaatctaggtgtttgatagttcgcaatatcttctagtagttaaaagctgaaaaagttaaaagaaacggcccgctcgtgcgccgccgctgcccgtgcaaccgtccaccaccgcgacgcaagctgctcccacttatagatgtccaaacgggcggcacggcccgacccaactcggcccggcccgtttgagcccgacacggttaagcccgaccacttaaccgtaccgtgtcgtgccgcccgacgggctcatacctcttcctgagcacggcacggtggaggcccgaccgtgccgggcggcccgaatagcacgacccatttagtagcccgtgccggctcgagcccgcaaaacacaaaactatatttagcaaaaaaaaccctaaaaccgacaacacaaaaaacctaaaacttacagcacaaaaaccctaaaacaaagaactgtccacataatcaaatttgctccactcggtaagaaaatttagcaaagaagaaccgatgcaactcacctacaggcgcggtgctcgcccggcgccgtcggaaccgctccagcacgccgcgcagcaccacatcgagggtgtcctccatgccgtcgccgaacccatcggacgatgacgcgtacaccagccgcgggatcatcttcaccacgcgctcctgcatccgttgcacccgccgctcactgagccccttaagaacataggaggagggaggaggtgccgagtgtgcaccgtgccgtcgtagggaggagggagccaggagcgagagggaggaagagtgggagagtgggttagggattgcattaggagcagacgcggcagccctcggggacttgtgggctagcggcgggggtgggtg

SEQ ID NO: 48138 - DNA, 1739 bp, Zea Mays
cttccatcttagaactgggcaggaccatgagcttccacgacggcccggacccaggaggcccagatcctggtatgcgcttacctgcccctcctctctctgtctctctcgtggttctactgaacgagcactcgcctgcgctcttctctctctcgtggcgacgactgggtgactgccggcgccccaggcctgaggctccatcttcgggcccttcactggctacgagcaccacctgaggattatggattggctggggcagaagcgcgcggagatgctgatgcaggtgctgctggtggcgtctgctgtggcggcgttcctggtgggctacgtgcgcgcggacttccagctcatgctgctcgtctacgccggcggcgtcgtgctcacagcgctcgtcaccgtccccaactggcccttcttcaaccgtaacccgcttaagtggctcgacgctgccgaggccgagcgccacccgcgcccccaggtcagcgccggtgcggcagcagggggaaagaagaagtccgggaagaacaagtaatcgatctttcggagcgatatgtgttctttgtcgatttgactcaaacctatttaaagttttatttcgcagaactaatcaatgataaaagagctagaggtgttcgacagttttggttggtacttaaaaatatgcagttgtagctgaaatttagcttgcaatcttgcacgctacttatcagttatatctgcaatgatgatctaactaaaaggatggcgatatgcctggttacactcttagattgacttcgtctgtagctttattagcattttgtggatgggtttttgctgtcttcttatgcatatctgaagatgtagtgagttttttttagcagagattgcatagtttcagtttggtcccttgattacgttgcctccttgaccatttttaggtggagtgttcatatcagtgtcagccctttgttggaatttaactattaaattcattcgtaattctcttgtagtgttataatcaaatgtgtaggttgcatgtaaccataggtatcctaccaaattttgtgtttgtggacggatgttctgcggggtttttttttgtgtgtcgatgctatttggcattgcttatatcggtttcttgtgttgatgaacgccgatgattgtttccacttagttgtctgatttacaatagttaacacgacacgacatccattctacacattattaccttaaacgtaggaatctgatgtaaacaaaaaaaaaaattgcagtagcctgttggatggtatcagcaccgggcttaaatacacagtgaaatagtcacccagttgccagaaaacaaacttacaagcaatcaggcaatatgtatatgcgcatactaaaataaggagccgcttttaatcaattactgaattttgtttttacttctagagttgctttgaaattgagtattttgattgttttttcacactctgtttgggatcgagtgagtgtcctgcggcggtaatttgtatcttctagtgtgactgtgtcttatagtatatgcatcatcagtttgcatagaaatagaatggtattttttatgaggtactctgtatgtaagaaatcgagtgtccagcaataaaaatggtctggtacattagcacacttcaaaggttgagtaaggagattgcacttttaggttaaccgtgcaaatgatatggaccgagctctagaatgtaactcagattccagaaagaacagcaaagcacacattattg

SEQ ID NO: 48139 - DNA, 840 bp, Zea Mays
aattaaataaacgaaacaaatatataaacaatctcctcaacccccgcaagtcccaggagcatgtcaggatcaaagaatcaatcttttttttcacaaatgaaccaaccactcttccaagccaagtcaatggacaaagggtctgtgagctcagttccaacaaatccctttccagcaagagaaaaacagggtacaaaactttggactgttgaaagcagttcaccagcatacaactcatgctgtacacaacatagctaaccagctacacacgtgaactgaccatcagatcgaccaacctcaccaggagacaacaaaaaagggaagaagattaagtaagttcgatgtttgtcattaggttaaataagtggggcttctaagcatgctaagtgagagagagagagatcaaagaagaattcttggctcatggaggcgacagctgggacctgggaccttaaatacaggctataaacacgtatacaactatgctctaagagattccattggtgaagaggttgttaaagatcagcatctcacaagccattgggagaggttagtgcagggagagaagatcactcatgttctgcatcgtcgccagtcagctcttcgtcgtcatccgtgtcttcgtcatcgtcagtgtcttcctcatcgtcgtcagtgccatcccaggaaccgaagattgcgtccttggcggctgcagaatcaccaaagctgagctgtcctgggggtgcatgtgccgggttgagtgggttcgccggtggtagtgcagaaagtggttttggtgctagtggtttcaggtaatttgggaggttttccccaggcatgatgtggatggcgccttttgac

SEQ ID NO: 48140 - DNA, 244 bp, Zea Mays
gagatatgacagcttatcttgtgcttcgttcatgatgtgccacttacagaactggagcctagttagaggaaatactttcaaagcagctgactttaaagcattatcatgctccatggtaagagaggtagggtgctgtccagacattgctaagaggaatgtctcaaacaaccaaacaaatgatgtctcattgttatgtgccatgatggcacaaccaaataggactggctggcaatggtgattaact

SEQ ID NO: 48141 - DNA, 3667 bp, Zea Mays
tgataaagcttgaagccatggtaagtagcataggccaataatatacgaattgactcaagcctagctacgggtgcataggtttcaccgaaatccaaaccttcgacttgggagtatcctttggccacaagtcgagctttgttccttgtcaccacaccatgctcgtcttgcttgttgcggaagacccatttggttcctacaacattttgattaggacgtgaaactaaatgccatacctcattcctagtgaagttgttgagctcctcttgcatcaccaccacccaatccgaatcttgcagtgcttcctctatcctgtgtggctcaatagaggaaataaacgagtaatgttcacaaaaatgtgcaacacgagatctagtggttaccccctatgaatgtcgccgaggatggtgtcgacaggggtgatctcgttggattgcttggtggactcttgggtgtggcggcctttgttcttcatcctccttgtcttgatcatttgcatctcccccttgatcattgtcgtcatcttgaggtggctcatttgattgatcttctccttcatcaacttgagcctcatcctcattttgagttggtggggatgcttgcgtggaggagaatggttgatcttgtgcatttggaggctattcggattctttaggacacacatccccaatggacatgttccttagcgcgatgcatggagcctcttcaatacctatctcatcaagatcaacttgctctacttgagagccgttagtctcatcaaacacaacgtcacaagaaacttcaacttgtccagaggacttgttaaagactctatatgcccatgtgtttgaatcataccctagtaaaaagccttctacagtcttaggagcaaacttagattttctacctcttttaacaagtataaagcatttgctaccaaagactctaaaatatgaaatattgggctttttaccggttaggagttcatacgatgtcttcttgaggattcggtgaagatataatcggttgatggcgtagcaggcggtgttgaccgcctcggcccaaaaccgatccgaagtcttgtactcatcaagcatggttcttgccatgtccaatagagttctattcttcctctccactataccattttgttgtggggtgtagggagaagagaactcatgcttgatgccctcctcctcaaggaagccttcgatttgtgagttcttgaactccgtctcgttgtcgcttctaattttcttgatcctcaagccgaactcattttgagcccgtctcaagaatccctttaaggtctcttgggtatgagatttttcctgcaaaaagaacacccaagtgaagcgagaataatcatccacaataactagacagtacttactaccgccgatacttatgtaagcgatcgggccgaataggtccatgtgtaggagatccagtggcatgtcggtcgtcatgatgttcttgtgtggatgatgggcgccaacttgctttcctgcttggcatgcgctacatatcctgtctttctcaaaatgaacatttgttaatcctaaaatgtgttctccctttagaagcttatgaagattcttcatcccaacatgtgctagtcggtggtgccagagccagcccatgttagtcttagcaattaagcaagtgtcgagttcagctctatcaaaatttactaagtatagctgaccctctaacacttccttaaatgctattgaatcatcacttcttctaaagacagtgacacctacatcagtgaatagacagttgtagcccatttcgcataattgagatacagaaagcaaattgtaatctaatgaatctacaagaaaaacattggaaatagaatggtcatgagatatagcaattttacccaaccccttgaccaaaccttggtttccatccccgaatgtgatagctcgttggggatcctgttttttctcgtaggaggagaacatcttctcccctgtcatgtggtttgtgcacccgctgtcgattacccagcttgagcccccggatgcataaacctacaaaacatgtttagttcttgactttaggtacccaaatggttttgggtcctttggcattagaaacaagaactttgggtacccaaacacaagtctttgaccccttgtgcttgcccccaacatatttggcaactactttgccggatttgttagttaaaacataggatacatcaaaagttttaaatgagatgtcatggtcatttgatgcactaggagttttcttcttaggcaacttaacatgggattgttgcctgaaactagatgtctcactcttatacataaaagcatgactaggttagtgcccgtgcgttgcaacggtaacatataatatcatgataacttatatataaatatgttatattgttatgagaaaagttttttgtaatccattggtgatcctgtctatacatataaattttgttatgagaaaagtataattgctatccttgacaaatatatgtattatgcagacatgcggagagatgttcaggagatcttcaaaatgactcctcatgataagcaagtcatgatgttttcagcaacgctcagcaaggagatccgtcctgtatgcaagaaatttatgcaagatgtaatgccctgcagccttctccagctctcctttccaaagtcgtcgtattttattcccattgctcctgtggtggtcctcctgtagctgttagtcatctaccagctttggagttgtagttgtgtcttctgctctttctaggtgggaggattctattcctcagtgtctccatttgtagtacataagtaagttctctttgcttttttcgttatcccacaccttctgtcctgaagatgcggtctccgagctcctggtcgacatctccagtttgctgcacactcaatgttcacttggtttcacttaattggacttcactggtgttggttctccaactatctcgtgcgggtggagaaagaattcttctgctggagttgtatttggaagcactgttgcaaaacttaagcatatttggagagaatctagtgttgaacagtgcataactgaacttctgtatggaggctgcatgtaatccgatggaaatatatgttgatgatgaggcaaagttgaccctccatggtcttgtacagcactatataaaacttagcgaggtagagaagaactggaaactgaatgatctcttggacgctcttgatttcaaccaagttgtgatattcgtgaagagtgttagcagagctgccgaactgaataagttactttgtgaatgcaacttcccatcaatctgcattcattctggaatgacccaggaagaaaggtaaatttgctcagaaatatcagcctatgcccttgaatatatcagcttataaataaggcatgactctaaattaccatgctctgaatacatattggacggcatatctaaaactacctacattattctatcattcctttttaggtgtatttgctggttaatattaattgagtttgtagaaatagtataaatataactaaatgtgtttgatattagagaaatagtagcctgtaacatgataacattttaggtttacctgggagaggtgtgcgatcttctcattcttgttctgcaggctcctacagaccttggagtcctgaaggcagctcctaatcctgtcccagttcc

SEQ ID NO: 48142 - DNA, 1734 bp, Zea Mays
ttccttatctatacaaaccaaactcgcgctccagaccacagctcaccctcacctgcgacctgcgcgcattcacagccgccggcgccacacgtgcccgcgcgccgggcgccacctctctcccatccaccagccttcctctcccgggccaggcggcgcccctcaatggccgccaccttcaccgtcgccgcccgcctcccgctgcggggccccgcgcgcgctccgtcccggccggccgtcgctgctgtaacccggcttcgaagccggcaggagcggcgcggcctagcagcgacaggcgggaggggacctgcccgggttcgggccgagactttctccggtggtggaggcgtggggcggagggaccccatggcgccgccttacaatgtcctcatcaccggctctacgaaaggtataggatatgcattggcaaggaaatttctggaggctggtgataacgttataatctgctcgagatcagctcaaaaggtagaatctgtggtcggtgacttgaaggaggagtacggagagcaacatgtggaactgtctgtgatgttagaaatggaaaggatgtaaaggcacttgtggagtttgcacgtgacaaacttaagcatattgatatatggatcaacaatgctggatcaaatgcatatacatacaaaccactagtggagacctctgatgaggctctcatgtaagttttgtcctatttgagaaaccctggcaaatacacttctattcttttgtgctgttaatatcagtgattacttggacctattctctgatttactagggaaatcatcaccactaacacccttggattgatgatatgttgtcgtgaggcaataaatatgatgaggaaccaacctcgaggtggtcacatattcaaccttgatggtgctggttctgatggaaggccaactccaagatttgctgcatatggtgcaacaaagagaagtgttgtgcatcttacgaagtcacttcaggctgaattgcagatgaatgaagtgaataatgtgatggtgcacaatctatcgcctggcatggtcacaacagatcttcttatgtctggtgcaactacaaaacaagcaaaaattttcatcaatatattagctgaacctcctgatgtgactaccttgttccaaacgtcagagaaatccctaccaagcaatccatgaagccaacctacattcgtttcctcacaggcttgaaggcctactcaagaattttttctagacttgcttttggtgctaggagaaacaagtatgttactgaagattagttatgctgccagcttccaactgaagagattaggaacaattcttttcattaagcgtcacttacttttctcataagatgggatgtattacagatgtcatctcatgagaacagtgatatactcttctgtacagtagtagcaatttttttagtaaatgcataggaaaactgtgcatcaatatatcaagaagaatatagaaataaggtctaaaatagaccacaacatgataaccacctcacctcacgaatatacaaaagagtccatctaaaaatgatcaaacaccagctttactcatatggttactcaaaacactgttttacactgtttgtagagtggagtttgaatattagcatgaggatgggtaaactgttggagatagcctaaggctaaagggcacacaacccctcggcacctataggcgtagggcaccattgatgagcgtcgtctttaatgttttaaat

SEQ ID NO: 48143 - DNA, 1660 bp, Zea Mays
ttccttatctatacaaaccaaactcgcgctccagaccacagctcaccctcacctgcgacctgcgcgcattcacagccgccggcgccacacgtgcccgcgcgccgggcgccacctctctcccatccaccagccttcctctcccgggccaggcggcgcccctcaatggccgccaccttcaccgtcgccgcccgcctcccgctgcggggccccgcgcgcgctccgtcccggccggccgtcgctgctgtaacccggcttcgaagccggcaggagcggcgcggcctagcagcgacaggcgggaggggacctgcccgggttcgggccgagactttctccggtggtggaggcgtggggcggagggaccccatggcgccgccttacaatgtcctcatcaccggctctacgaaaggtataggatatgcattggcaaggaaatttctggaggctggtgataacgttataatctgctcgagatcagtgtatcctctacagctcaaaaggtagaatctgtggtcggtgacttgaaggaggagtacggagagcaacatgtgtggggaactgtctgtgatgttagaaatggaaaggatgtaaaggcacttgtggagtttgcacgtgacaaacttaagcatattgatatatggatcaacaatgctggatcaaatgcatatacatacaaaccactagtggagacctctgatgaggctctcatggaaatcatcaccactaacacccttggattgatgatatgttgtcgtgaggcaataaatatgatgaggaaccaacctcgaggtggtcacatattcaaccttgatggtgctggttctgatggaaggccaactccaagatttgctgcatatggtgcaacaaagagaagtgttgtgcatcttacgaagtcacttcaggctgaattgcagatgaatgaagtgaataatgtgatggtgcacaatctatcgcctggcatggtcacaacagatcttcttatgtctggtgcaactacaaaacaagcaaaaattttcatcaatatattagctgaacctcctgatgtggttgcagactaccttgttccaaacgtcagagaaatccctaccaagcaatccatgaagccaacctacattcgtttcctcacaggcttgaaggcctactcaagaattttttctagacttgcttttggtgctaggagaaacaagtatgttactgaagattagttatgctgccagcttccaactgaagagattaggaacaattcttttcattaagcgtcacttacttttctcataagatgggatgtattacagatgtcatctcatgagaacagtgatatactcttctgtacagtagtagcaatttttttagtaaatgcataggaaaactgtgcatcaatatatcaagaagaatatagaaataaggtctaaaatagaccacaacatgataaccacctcacctcacgaatatacaaaagagtccatctaaaaatgatcaaacaccagctttactcatatggttactcaaaacactgttttacactgtttgtagagtggagtttgaatattagcatgaggatgggtaaactgttggagatagcctaaggctaaagggcacacaacccctcggcacctataggcgtagggcaccattgatgagcgtcgtctttaatgttttaaat

SEQ ID NO: 48144 - DNA, 1588 bp, Zea Mays
ttccttatctatacaaaccaaactcgcgctccagaccacagctcaccctcacctgcgacctgcgcgcattcacagccgccggcgccacacgtgcccgcgcgccgggcgccacctctctcccatccaccagccttcctctcccgggccaggcggcgcccctcaatggccgccaccttcaccgtcgccgcccgcctcccgctgcggggccccgcgcgcgctccgtcccggccggccgtcgctgctgtaacccggcttcgaagccggcaggagcggcgcggcctagcagcgacaggcgggaggggacctgcccgggttcgggccgagactttctccggtggtggaggcgtggggcggagggaccccatggcgccgccttacaatgtcctcatcaccggctctacgaaaggtataggatatgcattggcaaggaaatttctggaggctggtgataacgttataatctgctcgagatcagctcaaaaggtagaatctgtggtcggtgacttgaaggaggagtacggagagcaacatgtgtggggaactgtctgtgatgttagaaatggaaaggatgtaaaggcacttgtggagtttgcacgtgacaaacttaagcatattgatatatggatcaacaatgctggatcaaatgcatatacatacaaaccactagtggagacctctgatgaggctctcatggaaatcatcaccactaacacccttggattgatgatatgttgtcgtgaggcaataaatatgatgaggaaccaacctcgaggtggtcacatattcaaccttgatggtgctggttctgatggaaggccaactccaaggctgaattgcagatgaatgaagtgaataatgtgatggtgcacaatctatcgcctggcatggtcacaacagatcttcttatgtctggtgcaactacaaaacaagcaaaaattttcatcaatatattagctgaacctcctgatgtggttgcagactaccttgttccaaacgtcagagaaatccctaccaagcaatccatgaagccaacctacattcgtttcctcacaggcttgaaggcctactcaagaattttttctagacttgcttttggtgctaggagaaacaagtatgttactgaagattagttatgctgccagcttccaactgaagagattaggaacaattcttttcattaagcgtcacttacttttctcataagatgggatgtattacagatgtcatctcatgagaacagtgatatactcttctgtacagtagtagcaatttttttagtaaatgcataggaaaactgtgcatcaatatatcaagaagaatatagaaataaggtctaaaatagaccacaacatgataaccacctcacctcacgaatatacaaaagagtccatctaaaaatgatcaaacaccagctttactcatatggttactcaaaacactgttttacactgtttgtagagtggagtttgaatattagcatgaggatgggtaaactgttggagatagcctaaggctaaagggcacacaacccctcggcacctataggcgtagggcaccattgatgagcgtcgtctttaatgttttaaat

SEQ ID NO: 48145 - DNA, 1801 bp, Zea Mays
ttccttatctatacaaaccaaactcgcgctccagaccacagctcaccctcacctgcgacctgcgcgcattcacagccgccggcgccacacgtgcccgcgcgccgggcgccacctctctcccatccaccagccttcctctcccgggccaggcggcgcccctcaatggccgccaccttcaccgtcgccgcccgcctcccgctgcggggccccgcgcgcgctccgtcccggccggccgtcgctgctgtaacccggcttcgaagccggcaggagcggcgcggcctagcagcgacaggcgggaggggacctgcccgggttcgggccgagactttctccggtggtggaggcgtggggcggagggaccccatggcgccgccttacaatgtcctcatcaccggctctacgaaaggtataggatatgcattggcaaggaaatttctggaggctggtgataacgttataatctgctcgagatcagctcaaaaggtagaatctgtggtcggtgacttgaaggaggagtacggagagcaacatgtggaactgtctgtgatgttagaaatggaaaggatgtaaaggcacttgtggagtttgcacgtgacaaacttaagcatattgatatatggatcaacaatgctggatcaaatgcatatacatacaaaccactagtggagacctctgatgaggctctcatgtaagttttgtcctatttgagaaaccctggcaaatacacttctattcttttgtgctgttaatatcagtgattacttggacctattctctgatttactagggaaatcatcaccactaacacccttggattgatgatatgttgtcgtgaggcaataaatatgatgaggaaccaacctcgaggtggtcacatattcaaccttgatggtgctggttctgatggaaggccaactccaagatttgctgcatatggtgcaacaaagagaagtgttgtgcatcttacgaagtcacttcaggctgaattgcagatgaatgaagtgaataatgtgatggtgcacaatctatcgtaacctataaataacgctgaaggaggaaccatgcaaattatatgtatatatcatgtgcagcctggcatggtcacaacagatcttcttatgtctggtgcaactacaaaacaagcaaaaattttcatcaatatattagctgaacctcctgatgtggttgcagactaccttgttccaaacgtcagagaaatccctaccaagcaatccatgaagccaacctacattcgtttcctcacaggcttgaaggcctactcaagaattttttctagacttgcttttggtgctaggagaaacaagtatgttactgaagattagttatgctgccagcttccaactgaagagattaggaacaattcttttcattaagcgtcacttacttttctcataagatgggatgtattacagatgtcatctcatgagaacagtgatatactcttctgtacagtagtagcaatttttttagtaaatgcataggaaaactgtgcatcaatatatcaagaagaatatagaaataaggtctaaaatagaccacaacatgataaccacctcacctcacgaatatacaaaagagtccatctaaaaatgatcaaacaccagctttactcatatggttactcaaaacactgttttacactgtttgtagagtggagtttgaatattagcatgaggatgggtaaactgttggagatagcctaaggctaaagggcacacaacccctcggcacctataggcgtagggcaccattgatgagcgtcgtctttaatgttttaaat

SEQ ID NO: 48146 - DNA, 1851 bp, Zea Mays
ttccttatctatacaaaccaaactcgcgctccagaccacagctcaccctcacctgcgacctgcgcgcattcacagccgccggcgccacacgtgcccgcgcgccgggcgccacctctctcccatccaccagccttcctctcccgggccaggcggcgcccctcaatggccgccaccttcaccgtcgccgcccgcctcccgctgcggggccccgcgcgcgctccgtcccggccggccgtcgctgctgtaacccggcttcgaagccggcaggagcggcgcggcctagcagcgacaggcgggaggggacctgcccgggttcgggccgagactttctccggtggtggaggcgtggggcggagggaccccatggcgccgccttacaatgtcctcatcaccggctctacgaaaggtataggatatgcattggcaaggaaatttctggaggctggtgataacgttataatctgctcgagatcagctcaaaaggtagaatctgtggtcggtgacttgaaggaggagtacggagagcaacatgtggaactgtctgtgatgttagaaatggaaaggatgtaaaggcacttgtggagtttgcacgtgacaaacttaagcatattgatatatggatcaacaatgctggatcaaatgcatatacatacaaaccactagtggagacctctgatgaggctctcatgtaagttttgtcctatttgagaaaccctggcaaatacacttctattcttttgtgctgttaatatcagtgattacttggacctattctctgatttactagggaaatcatcaccactaacacccttggattgatgatatgttgtcgtgaggcaataaatatgatgaggaaccaacctcgaggtggtcacatattcaaccttgatggtgctggttctgatggaaggccaactccaagatttgctgcatatggtgcaacaaagagaagtgttgtgcatcttacgaagtcacttcaggctgaattgcagatgaatgaagtgaataatgtgatggtgcacaatctatcggctttgggtcttgcataaatgcatgactatcggattgcattctgcctcagtaacctataaataacgctgaaggaggaaccatgcaaattatatgtatatatcatgtgcagcctggcatggtcacaacagatcttcttatgtctggtgcaactacaaaacaagcaaaaattttcatcaatatattagctgaacctcctgatgtggttgcagactaccttgttccaaacgtcagagaaatccctaccaagcaatccatgaagccaacctacattcgtttcctcacaggcttgaaggcctactcaagaattttttctagacttgcttttggtgctaggagaaacaagtatgttactgaagattagttatgctgccagcttccaactgaagagattaggaacaattcttttcattaagcgtcacttacttttctcataagatgggatgtattacagatgtcatctcatgagaacagtgatatactcttctgtacagtagtagcaatttttttagtaaatgcataggaaaactgtgcatcaatatatcaagaagaatatagaaataaggtctaaaatagaccacaacatgataaccacctcacctcacgaatatacaaaagagtccatctaaaaatgatcaaacaccagctttactcatatggttactcaaaacactgttttacactgtttgtagagtggagtttgaatattagcatgaggatgggtaaactgttggagatagcctaaggctaaagggcacacaacccctcggcacctataggcgtagggcaccattgatgagcgtcgtctttaatgttttaaat

SEQ ID NO: 48147 - DNA, 1805 bp, Zea Mays
ttccttatctatacaaaccaaactcgcgctccagaccacagctcaccctcacctgcgacctgcgcgcattcacagccgccggcgccacacgtgcccgcgcgccgggcgccacctctctcccatccaccagccttcctctcccgggccaggcggcgcccctcaatggccgccaccttcaccgtcgccgcccgcctcccgctgcggggccccgcgcgcgctccgtcccggccggccgtcgctgctgtaacccggcttcgaagccggcaggagcggcgcggcctagcagcgacaggcgggaggggacctgcccgggttcgggccgagactttctccggtggtggaggcgtggggcggagggaccccatggcgccgccttacaatgtcctcatcaccggctctacgaaaggtataggatatgcattggcaaggaaatttctggaggctggtgataacgttataatctgctcgagatcagctcaaaaggtagaatctgtggtcggtgacttgaaggaggagtacggagagcaacatgtgtggggaactgtctgtgatgttagaaatggaaaggatgtaaaggcacttgtggagtttgcacgtgacaaacttaagcatattgatatatggatcaacaatgctggatcaaatgcatatacatacaaaccactagtggagacctctgatgaggctctcatgtaagttttgtcctatttgagaaaccctggcaaatacacttctattcttttgtgctgttaatatcagtgattacttggacctattctctgatttactagggaaatcatcaccactaacacccttggattgatgatatgttgtcgtgaggcaataaatatgatgaggaaccaacctcgaggtggtcacatattcaaccttgatggtgctggttctgatggaaggccaactccaagatttgctgcatatggtgcaacaaagagaagtgttgtgcatcttacgaagtcacttcaggctgaattgcagatgaatgaagtgaataatgtgatggtgcacaatctatcgtaacctataaataacgctgaaggaggaaccatgcaaattatatgtatatatcatgtgcagcctggcatggtcacaacagatcttcttatgtctggtgcaactacaaaacaagcaaaaattttcatcaatatattagctgaacctcctgatgtggttgcagactaccttgttccaaacgtcagagaaatccctaccaagcaatccatgaagccaacctacattcgtttcctcacaggcttgaaggcctactcaagaattttttctagacttgcttttggtgctaggagaaacaagtatgttactgaagattagttatgctgccagcttccaactgaagagattaggaacaattcttttcattaagcgtcacttacttttctcataagatgggatgtattacagatgtcatctcatgagaacagtgatatactcttctgtacagtagtagcaatttttttagtaaatgcataggaaaactgtgcatcaatatatcaagaagaatatagaaataaggtctaaaatagaccacaacatgataaccacctcacctcacgaatatacaaaagagtccatctaaaaatgatcaaacaccagctttactcatatggttactcaaaacactgttttacactgtttgtagagtggagtttgaatattagcatgaggatgggtaaactgttggagatagcctaaggctaaagggcacacaacccctcggcacctataggcgtagggcaccattgatgagcgtcgtctttaatgttttaaat

SEQ ID NO: 48148 - DNA, 1318 bp, Zea Mays
cacaaaccccccaaaaggaactacatgcatgccaaatttgcttcctcttgtagacgctggcttcaaacaaagaaaacggtataggatatgcattggcaaggaaatttctggaggctggtgataacgttataatctgctcgagatcagctcaaaaggtagaatctgtggtcggtgacttgaaggaggagtacggagagcaacatgtgtggggaactgtctgtgatgttagaaatggaaaggatgtaaaggcacttgtggagtttgcacgtgacaaacttaagcatattgatatatggatcaacaatgctggatcaaatgcatatacatacaaaccactagtggagacctctgatgaggctctcatggaaatcatcaccactaacacccttggattgatgatatgttgtcgtgaggcaataaatatgatgaggaaccaacctcgaggtggtcacatattcaaccttgatggtgctggttctgatggaaggccaactccaagatttgctgcatatggtgcaacaaagagaagtgttgtgcatcttacgaagtcacttcaggctgaattgcagatgaatgaagtgaataatgtgatggtgcacaatctatcgcctggcatggtcacaacagatcttcttatgtctggtgcaactacaaaacaagcaaaaattttcatcaatatattagctgaacctcctgatgtggttgcagactaccttgttccaaacgtcagagaaatccctaccaagcaatccatgaagccaacctacattcgtttcctcacaggcttgaaggcctactcaagaattttttctagacttgcttttggtgctaggagaaacaagtatgttactgaagattagttatgctgccagcttccaactgaagagattaggaacaattcttttcattaagcgtcacttacttttctcataagatgggatgtattacagatgtcatctcatgagaacagtgatatactcttctgtacagtagtagcaatttttttagtaaatgcataggaaaactgtgcatcaatatatcaagaagaatatagaaataaggtctaaaatagaccacaacatgataaccacctcacctcacgaatatacaaaagagtccatctaaaaatgatcaaacaccagctttactcatatggttactcaaaacactgttttacactgtttgtagagtggagtttgaatattagcatgaggatgggtaaactgttggagatagcctaaggctaaagggcacacaacccctcggcacctataggcgtagggcaccattgatgagcgtcgtctttaatgttttaaat

SEQ ID NO: 48149 - DNA, 1300 bp, Zea Mays
aaggaactacatgcatgccaaatttgcttcctcttgtagacgctggcttcaaacaaagaaaacggtataggatatgcattggcaaggaaatttctggaggctggtgataacgttataatctgctcgagatcagctcaaaaggtagaatctgtggtcggtgacttgaaggaggagtacggagagcaacatgtggaactgtctgtgatgttagaaatggaaaggatgtaaaggcacttgtggagtttgcacgtgacaaacttaagcatattgatatatggatcaacaatgctggatcaaatgcatatacatacaaaccactagtggagacctctgatgaggctctcatggaaatcatcaccactaacacccttggattgatgatatgttgtcgtgaggcaataaatatgatgaggaaccaacctcgaggtggtcacatattcaaccttgatggtgctggttctgatggaaggccaactccaagatttgctgcatatggtgcaacaaagagaagtgttgtgcatcttacgaagtcacttcaggctgaattgcagatgaatgaagtgaataatgtgatggtgcacaatctatcgcctggcatggtcacaacagatcttcttatgtctggtgcaactacaaaacaagcaaaaattttcatcaatatattagctgaacctcctgatgtggttgcagactaccttgttccaaacgtcagagaaatccctaccaagcaatccatgaagccaacctacattcgtttcctcacaggcttgaaggcctactcaagaattttttctagacttgcttttggtgctaggagaaacaagtatgttactgaagattagttatgctgccagcttccaactgaagagattaggaacaattcttttcattaagcgtcacttacttttctcataagatgggatgtattacagatgtcatctcatgagaacagtgatatactcttctgtacagtagtagcaatttttttagtaaatgcataggaaaactgtgcatcaatatatcaagaagaatatagaaataaggtctaaaatagaccacaacatgataaccacctcacctcacgaatatacaaaagagtccatctaaaaatgatcaaacaccagctttactcatatggttactcaaaacactgttttacactgtttgtagagtggagtttgaatattagcatgaggatgggtaaactgttggagatagcctaaggctaaagggcacacaacccctcggcacctataggcgtagggcaccattgatgagcgtcgtctttaatgttttaaat

SEQ ID NO: 48150 - DNA, 1313 bp, Zea Mays
atttgcttcctcttgtagacgctggcttcaaacaaagaaaacggtataggatatgcattggcaaggaaatttctggaggctggtgataacgttataatctgctcgagatcagctcaaaaggtagaatctgtggtcggtgacttgaaggaggagtacggagagcaacatgtggaactgtctgtgatgttagaaatggaaaggatgtaaaggcacttgtggagtttgcacgtgacaaacttaagcatattgatatatggatcaacaatgctggatcaaatgcatatacatacaaaccactagtggagacctctgatgaggctctcatgtaagttttgtcctatttgagaaaccctggcaaatacacttctattcttttgtgctgttaatatcagtgattacttggacctattctctgatttactagggaaatcatcaccactaacacccttggattgatgatatgttgtcgtgaggcaataaatatgatgaggaaccaacctcgaggtggtcacatattcaaccttgatggtgctggttctgatggaaggccaactccaaggctgaattgcagatgaatgaagtgaataatgtgatggtgcacaatctatcgcctggcatggtcacaacagatcttcttatgtctggtgcaactacaaaacaagcaaaaattttcatcaatatattagctgaacctcctgatgtgactaccttgttccaaacgtcagagaaatccctaccaagcaatccatgaagccaacctacattcgtttcctcacaggcttgaaggcctactcaagaattttttctagacttgcttttggtgctaggagaaacaagtatgttactgaagattagttatgctgccagcttccaactgaagagattaggaacaattcttttcattaagcgtcacttacttttctcataagatgggatgtattacagatgtcatctcatgagaacagtgatatactcttctgtacagtagtagcaatttttttagtaaatgcataggaaaactgtgcatcaatatatcaagaagaatatagaaataaggtctaaaatagaccacaacatgataaccacctcacctcacgaatatacaaaagagtccatctaaaaatgatcaaacaccagctttactcatatggttactcaaaacactgttttacactgtttgtagagtggagtttgaatattagcatgaggatgggtaaactgttggagatagcctaaggctaaagggcacacaacccctcggcacctataggcgtagggcaccattgatgagcgtcgtctttaatgttttaaat

SEQ ID NO: 48151 - DNA, 1239 bp, Zea Mays
aaagaaaacggtataggatatgcattggcaaggaaatttctggaggctggtgataacgttataatctgctcgagatcagctcaaaaggtagaatctgtggtcggtgacttgaaggaggagtacggagagcaacatgtggaactgtctgtgatgttagaaatggaaaggatgtaaaggcacttgtggagtttgcacgtgacaaacttaagcatattgatatatggatcaacaatgctggatcaaatgcatatacatacaaaccactagtggagacctctgatgaggctctcatggaaatcatcaccactaacacccttggattgatgatatgttgtcgtgaggcaataaatatgatgaggaaccaacctcgaggtggtcacatattcaaccttgatggtgctggttctgatggaaggccaactccaagatttgctgcatatggtgcaacaaagagaagtgttgtgcatcttacgaagtcacttcaggctgaattgcagatgaatgaagtgaataatgtgatggtgcacaatctatcgcctggcatggtcacaacagatcttcttatgtctggtgcaactacaaaacaagcaaaaattttcatcaatatattagctgaacctcctgatgtgactaccttgttccaaacgtcagagaaatccctaccaagcaatccatgaagccaacctacattcgtttcctcacaggcttgaaggcctactcaagaattttttctagacttgcttttggtgctaggagaaacaagtatgttactgaagattagttatgctgccagcttccaactgaagagattaggaacaattcttttcattaagcgtcacttacttttctcataagatgggatgtattacagatgtcatctcatgagaacagtgatatactcttctgtacagtagtagcaatttttttagtaaatgcataggaaaactgtgcatcaatatatcaagaagaatatagaaataaggtctaaaatagaccacaacatgataaccacctcacctcacgaatatacaaaagagtccatctaaaaatgatcaaacaccagctttactcatatggttactcaaaacactgttttacactgtttgtagagtggagtttgaatattagcatgaggatgggtaaactgttggagatagcctaaggctaaagggcacacaacccctcggcacctataggcgtagggcaccattgatgagcgtcgtctttaatgttttaaat

SEQ ID NO: 48152 - DNA, 2586 bp, Zea Mays
agataccataagaacgcacgcgagtggccagtgggaaccaggaaacaagtgagagggggaagctgcggccgacggccgagctcttgccgtccctatccacccctctcggctctcgccctcctctctgtctttcgctccgtccagccgccgcgtaaaatccgcggaaccagatgcccttatccgccctctgatcgaatccggccagaaaggccggttctttgtcgtcgtcctcggcatcgccggcgaccttgatggcactggaggcgggtagcagcggcggcggcgggaggggatggggtggcaggttccgaagcctgatgcggcggaagcaggtggactccgatcgggtccgcgccgagggccagccgcagctcgccaaggagctcaacgtgccggagctggtcgcgatcgttggagcaggagtatatgttcttgttggaacagttgctagggagcacgctggtccagcattgacaatttcatttctgatagctggaatagcagccgcgctttcagctttctgttatgctgagcttgctagtcgttgcccctcagctggaagtgcttaccattattcatacatctgtgttggagaaggtgttgcctggttgattggctgggctctagtgctggaatatactattggtgggtctgctgttgcccgtggtatatctccaaatttagccttgttttttggaggacaggatagtgtgccatggattttagcacgccatcagcttccatggtttgatatcattgttgatccctgtgcagccgctcttgtttttgttgtcactgttttactatgcgtgggaattaaagagagttcatttgcacaaggagtcgtaacagttctcaatgcctgtgtaatgatatttgttattgtagctgggagttatattggcttccaaataggatgggtgggctacaaggtttctgacgggtatttcccacatggagtaaatggaatgcttgctggatcagcaactgtcttctttgcatacataggctttgatacagtcgctagtacagctgaagaggtaaagaatccacagagagatttgccattgggaattggagttgcattggctatttgttgtgcgttgtatatggctgtttctgttgttattgttgggctggtgccatattttgccatggatccagatactcctatttcatctgcctttgcaaggcatggaatgcaatgggctatgtacgttgtgacaagtggtgctgttcttgcactctgctcgaccttgatgggctcacttcttccacagcctagaatacttatggccatggcacgagatggtctgttgccatccttcttctctgatgttaacaagcaaactcaagtacctgttaagagcacaattgtgactggcatctgtgcagctgctctggcttttgcaatggatgtttcacagttagcaggaatggtcagtgtaggcacactccttgcattcaccatagttgctgtctcgatcttgatactcagatatgtccctccagatgaggtccctttgccgccttctatgcaagaatcattttgtttgaaccaggaatgtgatgaggaaagggataggggtcttcttggagttgggaactgtaacttatctcagacaaaggatgtgattgtggtagtagaatcagtgaaggatcctctcattgataaaagactgcataaaggcaagatggatgagacgaagcgccgaaagatagcctctttaagcatagggtctgtgtgtgtaggggttctgatccttgcttcttcagcctctgccacatggttgccttttctcccgatatgtattggctgcaccattggagttgtgctccttctggctggcctcagcttgctctcctggatcgaccaagatgctggcaggcactcttttggtcattccggaggattcacatgcccttttgttccagtgctaccagttttgtgtatcctgataaatacgtatctgttaataaacctgagtggtgacacatggatgagagttggcatatggctgctgctgggtgttcttgtgtacgctttctacggccgaacccacagctccctaatagatgttgtctacgttccggcagcgcaagctgatgagatatacaggagttcatcaggatatgtatcatagaaaagaacagctgcagtcatgtgacacgatagagccacagaaagaccgagcggatgacagttactcaaaaggtggttgtccatcagctgtagaaaattggttatcagccggggaagacggaactgactgttatttctttcatgctcggctagcatgatctcgtggatgcaactttgcaagatatgtatgctgctcacgagccaggtcaatttatacattgttggagtgtgtagatatggtgtatataaaaccaactgggtggagtatgtgatgtcatacataataatttgtctaattcatgtaaaagccctttgtgcagttgtgctgaaatgtgagggcatttaaaggacctattgaaacagtacacggacggcaaaagaagccacctttttttatatcatgtatatgtcgtcaacaaacattctcttcaagatctttgcat

SEQ ID NO: 48153 - DNA, 2584 bp, Zea Mays
agataccataagaacgcacgcgagtggccagtgggaaccaggaaacaagtgagagggggaagctgcggccgacggccgagctcttgccgtccctatccacccctctcggctctcgccctcctctctgtctttcgctccgtccagccgccgcgtaaaatccgcggaaccagatgcccttatccgccctctgatcgaatccggccagaaaggccggttctttgtcgtcgtcctcggcatcgccggcgaccttgatggcactggaggcgggtagcagcggcggcggcgggaggggatggggtggcaggttccgaagcctgatgcggcggaagcaggtggactccgatcgggtccgcgccgagggccagccgcagctcgccaaggagctcaacgtgccggagctggtcgcgatcggggttggttccacagttggagcaggagtatatgttcttgttggaacagttgctagggagcacgctggtccagcattgacaatttcatttctgatagctggaatagcagccgcgctttcagctttctgttatgctgagcttgctagtcgttgcccctcagctggaagtgcttaccattattcatacatctgtgttggagaaggtgttgcctggttgattggctgggctctagtgctggaatatactattggtgggtctgctgttgcccgtggccttgttttttggaggacaggatagtgtgccatggattttagcacgccatcagcttccatggtttgatatcattgttgatccctgtgcagccgctcttgtttttgttgtcactgttttactatgcgtgggaattaaagagagttcatttgcacaaggagtcgtaacagttctcaatgcctgtgtaatgatatttgttattgtagctgggagttatattggcttccaaataggatgggtgggctacaaggtttctgacgggtatttcccacatggagtaaatggaatgcttgctggatcagcaactgtcttctttgcatacataggctttgatacagtcgctagtacagctgaagaggtaaagaatccacagagagatttgccattgggaattggagttgcattggctatttgttgtgcgttgtatatggctgtttctgttgttattgttgggctggtgccatattttgccatggatccagatactcctatttcatctgcctttgcaaggcatggaatgcaatgggctatgtacgttgtgacaagtggtgctgttcttgcactctgctcgaccttgatgggctcacttcttccacagcctagaatacttatggccatggcacgagatggtctgttgccatccttcttctctgatgttaacaagcaaactcaagtacctgttaagagcacaattgtgactggcatctgtgcagctgctctggcttttgcaatggatgtttcacagttagcaggaatggtcagtgtaggcacactccttgcattcaccatagttgctgtctcgatcttgatactcagatatgtccctccagatgaggtccctttgccgccttctatgcaagaatcattttgtttgaaccaggaatgtgatgaggaaagggataggggtcttcttggagttgggaactgtaacttatctcagacaaaggatgtgattgtggtagtagaatcagtgaaggatcctctcattgataaaagactgcataaaggcaagatggatgagacgaagcgccgaaagatagcctctttaagcatagggtctgtgtgtgtaggggttctgatccttgcttcttcagcctctgccacatggttgccttttctcccgatatgtattggctgcaccattggagttgtgctccttctggctggcctcagcttgctctcctggatcgaccaagatgctggcaggcactcttttggtcattccggaggattcacatgcccttttgttccagtgctaccagttttgtgtatcctgataaatacgtatctgttaataaacctgagtggtgacacatggatgagagttggcatatggctgctgctgggtgttcttgtgtacgctttctacggccgaacccacagctccctaatagatgttgtctacgttccggcagcgcaagctgatgagatatacaggagttcatcaggatatgtatcatagaaaagaacagctgcagtcatgtgacacgatagagccacagaaagaccgagcggatgacagttactcaaaaggtggttgtccatcagctgtagaaaattggttatcagccggggaagacggaactgactgttatttctttcatgctcggctagcatgatctcgtggatgcaactttgcaagatatgtatgctgctcacgagccaggtcaatttatacattgttggagtgtgtagatatggtgtatataaaaccaactgggtggagtatgtgatgtcatacataataatttgtctaattcatgtaaaagccctttgtgcagttgtgctgaaatgtgagggcatttaaaggacctattgaaacagtacacggacggcaaaagaagccacctttttttatatcatgtatatgtcgtcaacaaacattctcttcaagatctttgcat

SEQ ID NO: 48154 - DNA, 2410 bp, Zea Mays
agataccataagaacgcacgcgagtggccagtgggaaccaggaaacaagtgagagggggaagctgcggccgacggccgagctcttgccgtccctatccacccctctcggctctcgccctcctctctgtctttcgctccgtccagccgccgcgtaaaatccgcggaaccagatgcccttatccgccctctgatcgaatccggccagaaaggccggttctttgtcgtcgtcctcggcatcgccggcgaccttgatggcactggaggcgggtagcagcggcggcggcgggaggggatggggtggcaggttccgaagcctgatgcggcggaagcaggtggactccgatcgggtccgcgccgagggccagccgcagctcgccaaggagctcaacgtgccggagctggtcgcgatcgtgttgcctggttgattggctgggctctagtgctggaatatactattggtgggtctgctgttgcccgtggtatatctccaaatttagccttgttttttggaggacaggatagtgtgccatggattttagcacgccatcagcttccatggtttgatatcattgttgatccctgtgcagccgctcttgtttttgttgtcactgttttactatgcgtgggaattaaagagagttcatttgcacaaggagtcgtaacagttctcaatgcctgtgtaatgatatttgttattgtagctgggagttatattggcttccaaataggatgggtgggctacaaggtttctgacgggtatttcccacatggagtaaatggaatgcttgctggatcagcaactgtcttctttgcatacataggctttgatacagtcgctagtacagctgaagaggtaaagaatccacagagagatttgccattgggaattggagttgcattggctatttgttgtgcgttgtatatggctgtttctgttgttattgttgggctggtgccatattttgccatggatccagatactcctatttcatctgcctttgcaaggcatggaatgcaatgggctatgtacgttgtgacaagtggtgctgttcttgcactctgctcgaccttgatgggctcacttcttccacagcctagaatacttatggccatggcacgagatggtctgttgccatccttcttctctgatgttaacaagcaaactcaagtacctgttaagagcacaattgtgactggcatctgtgcagctgctctggcttttgcaatggatgtttcacagttagcaggaatggtcagtgtaggcacactccttgcattcaccatagttgctgtctcgatcttgatactcagatatgtccctccagatgaggtccctttgccgccttctatgcaagaatcattttgtttgaaccaggaatgtgatgaggaaagggataggggtcttcttggagttgggaactgtaacttatctcagacaaaggatgtgattgtggtagtagaatcagtgaaggatcctctcattgataaaagactgcataaaggcaagatggatgagacgaagcgccgaaagatagcctctttaagcatagggtctgtgtgtgtaggggttctgatccttgcttcttcagcctctgccacatggttgccttttctcccgatatgtattggctgcaccattggagttgtgctccttctggctggcctcagcttgctctcctggatcgaccaagatgctggcaggcactcttttggtcattccggaggattcacatgcccttttgttccagtgctaccagttttgtgtatcctgataaatacgtatctgttaataaacctgagtggtgacacatggatgagagttggcatatggctgctgctgggtgttcttgtgtacgctttctacggccgaacccacagctccctaatagatgttgtctacgttccggcagcgcaagctgatgagatatacaggagttcatcaggatatgtatcatagaaaagaacagctgcagtcatgtgacacgatagagccacagaaagaccgagcggatgacagttactcaaaaggtggttgtccatcagctgtagaaaattggttatcagccggggaagacggaactgactgttatttctttcatgctcggctagcatgatctcgtggatgcaactttgcaagatatgtatgctgctcacgagccaggtcaatttacacattgttggaatgtgtgtagatgtggtgtatataaaaccaactgggtggagtatgtgatgtgatacataataatttgtctaattcatgtaaaagccctttgtgcggaaatgtgagggcatttaaaggacctattgaaaacagtacatggacggcaaaagaagccaccttttttatatcatgtatatgtcgtccacaaacattctcttcatgtatcatgtatatttgaccttggtcagg

SEQ ID NO: 48155 - DNA, 3067 bp, Zea Mays
gccaacgtcaccccacgcaggcacggccgaggaaaaccgaaacccgtcccaaatccgttgctctttcccccttgcccccttcccagtctccactctgagcactctcctccgctctgctcctttgctccccacggcaaaccgtaaaccctagcctgaggggcacccctgtcgcagccatgggcgccagccggaagctgcagggcgagatcgaccgcgtcctgaagaaggtctacgacactgagaatgccaaccagaaggagaagttcgaggcggacctcaagaaggagatcaagaagctgcagcggtacagggaccagatcaagacgtggattcagtccagcgagatcaaggacaagaaggctctgatggatgctcgaaagcagattgaacgagagatggaacgatttaaagtatgtgagaaggaaacaaaaactaaggccttctcaaaagaagggttaggtcagcaaccaaaaacagatcccaaagaaaaggccaaagctgaaacaagagactggcttaataatgtggttagcgatttggaaagccagattgataacttcgaagcagagattgaagggctttcaattaaaaagggaaagcaaagaccgcctcgattggtacatttagagacgtctattacgagacataaagctcatataaagaaattggagtcaatcttgcggcttttggataatgatgagttgagtcctgagcaagtcaatgatgttaaagattttcttgatgactatgttgaacgtaatcaggaagactttgatgaattcagtgatgttgaggacctctatagcacattgcccatggagaaggttgaagcacttgaagacatggtttcacttgctccttctagtcttgtgaagggtgttgctcctgtttcgactactgcagttttgagcacaaagagttctgttgcaacttcacctactcagcctacagtatcaacagcttcttcacaaagtacatcacaggatcaaacagaggagacagcttcccaagaaagcaatcctgaacctacgccacaaacaccacctccaaaaggtggaaaccctggaccttcagtaccagctgtgcccattgttgtcagtactggtagtgcggctgtttctgtacctgcagaaacaattagttcccctgtgcgactaactgtacccgccacagcagccacagtgctttcttctgctattccacgaagtgctcctgagaatacacttgctgttacctcaattcctgcaaacttatctaccactttgaaggatgatgaaagcatgagtgttcctccacgacgaccatctcctgctactgaaattggaattggcaggggcataactcgaggaacaactagtcaggcattaggtacagctcccataactattggtccagtttcaggaaatggatcgttggttatgcctcttggtagtaaagttcaaccccagcaggttcccaggactaatgatgcaatcggctctgattctgctaacacaaatgaaaaccctattcttggtggaagagtattttctcctccagttgtttctggggttcaatggagacctcaagctgctgctgcatttcaaaatcaaattgaaactaatcagtaccgtggaaggcctgagatttctgctgatcacagggagaagtacatacagagactgcagcaagtacagcagcaaggtggcagccttctgaatgtttcccatataactggcataaatcagaagcaatttccaacaccacagccaaatccccttctacaacagtttaattcacagagttcctctatatcttcccaagtgaatcttgggcttggagttcaaggatcagacgcggggcatataaaaagtgaagatcaacaaattttggctgaagatgttggtgtggaatcttccgcaacaacaggagcaaataaacaaacaagtgaagatgacacaaagattccatattcgaatccttcagcacctgcagcagaaaacactcagctgcctagggatactgatctatcacctggacagcctttgcaacctggaatgccatcatctggtgttggtgttatcggccgaagaagtgtatctgatcttggtacaatcggagataaccttactggaacttctggtagttctggtcatgatcagaattattatctgcaaatgcttgaagctgcattccacaagcttccacagcccaaggactctgagcgtgctaaaacttacattccgcggcaccctgcagttacccctgctagctacccccaagttcaggcatcaattgtatcgaatcccaccttttgggaaagaattggtagcgacacattagctaccgacatgctgttctttgcgttctactaccaacagaacacatatcaacaatacttggctgctagagaactgaagaagcaatcatggagatttcaccggaggtacaatacctggttccagcggcatgtggagccacaggtcacgactgatgagtatgagcggggatcatatgtatactttgatttccatgtcactgaggatggctcaggatggtgccaaagaatcaagaatgacttcacatttgagtacaactacctggaggatgagctatcagtacaaacaaactaaagtgccatggcagtaggtctggtcaaacctttatgtccaatttgaattttgtagttctcataagagcttgttcggttgcttctggatcaaagaaggttggaggggattaaattccttctagtcaaaattgaatagaaattgatttaacccccctcaatctcctttatccagacgcaaccgaacaatgcctaaggtgactgactgactgttataatctggacccttgacaaaatctccagctgtaaactaatgtgtgaagttggatgcaccgaacatgctgaaattataatcgtgttatgccagccgaatctgtttgacgcagctgtacattgtcgttattatctggatgcgcctgaaaaatattttggatctttcttggcgcctacctgtttatttttagctaactcctggctggcgctttcgatctttctggttcgtttttttatcaaaaaaaa

SEQ ID NO: 48156 - DNA, 3050 bp, Zea Mays
cgtcaccccacgcaggcacggccgaggaaaaccgaaacccgtcccaaatccgttgctctttcccccttgcccccttcccagtctccactctgagcactctcctccgctctgctcctttgctccccacggcaaaccgtaaaccctagcctgaggggcacccctgtcgcagccatgggcgccagccggaagctgcagggcgagatcgaccgcgtcctgaagaaggtctacgacactgagaatgccaaccagaaggagaagttcgaggcggacctcaagaaggagatcaagaagctgcagcggtacagggaccagatcaagacgtggattcagtccagcgagatcaaggacaagaaggctctgatggatgctcgaaagcagattgaacgagagatggaacgatttaaagtatgtgagaaggaaacaaaaactaaggccttctcaaaagaagggttaggtcagcaaccaaaaacagatcccaaagaaaaggccaaagctgaaacaagagactggcttaataatgtggttagcgatttggaaagccagattgataacttcgaagcagagattgaagggctttcaattaaaaagggaaagcaaagaccgcctcgattggtacatttagagacgtctattacgagacataaagctcatataaagaaattggagtcaatcttgcggcttttggataatgatgagttgagtcctgagcaagtcaatgatgttaaagattttcttgatgactatgttgaacgtaatcaggaagactttgatgaattcagtgatgttgaggacctctatagcacattgcccatggagaaggttgaagcacttgaagacatggtttcacttgctccttctagtcttgtgaagggtgttgctcctgtttcgactactgcagttttgagcacaaagagttctgttgcaacttcacctactcagcctacagtatcaacagcttcttcacaaagtacatcacaggatcaaacagaggagacagcttcccaagaaagcaatcctgaacctacgccacaaacaccacctccaaaaggtggaaaccctggaccttcagtaccagctgtgcccattgttgtcagtactggtagtgcggctgtttctgtacctgcagaaacaattagttcccctgtgcgactaactgtacccgccacagcagccacagtgctttcttctgctattccacgaagtgctcctgagaatacacttgctgttacctcaattcctgcaaacttatctaccactttgaaggatgatgaaagcatgagtgttcctccacgacgaccatctcctgctactgaaattggaattggcaggggcataactcgaggaacaactagtcaggcattaggtacagctcccataactattggtccagtttcaggaaatggatcgttggttatgcctcttggtagtaaagttcaaccccagcaggttcccaggactaatgatgcaatcggctctgattctgctaacacaaatgaaaaccctattcttggtggaagagtattttctcctccagttgtttctggggttcaatggagacctcaagctgctgctgcatttcaaaatcaaattgaaactaatcagtaccgtggaaggcctgagatttctgctgatcacagggagaagtacatacagagactgcagcaagtacagcagcaaggtggcagccttctgaatgtttcccatataactggcataaatcagaagcaatttccaacaccacagccaaatccccttctacaacagagttcctctatatcttcccaagtgaatcttgggcttggagttcaaggatcagacgcggggcatataaaaagtgaagatcaacaaattttggctgaagatgttggtgtggaatcttccgcaacaacaggagcaaataaacaaacaagtgaagatgacacaaagattccatattcgaatccttcagcacctgcagcagaaaacactcagctgcctagggatactgatctatcacctggacagcctttgcaacctggaatgccatcatctggtgttggtgttatcggccgaagaagtgtatctgatcttggtacaatcggagataaccttactggaacttctggtagttctggtcatgatcagaattattatctgcaaatgcttgaagctgcattccacaagcttccacagcccaaggactctgagcgtgctaaaacttacattccgcggcaccctgcagttacccctgctagctacccccaagttcaggcatcaattgtatcgaatcccaccttttgggaaagaattggtagcgacacattagctaccgacatgctgttctttgcgttctactaccaacagaacacatatcaacaatacttggctgctagagaactgaagaagcaatcatggagatttcaccggaggtacaatacctggttccagcggcatgtggagccacaggtcacgactgatgagtatgagcggggatcatatgtatactttgatttccatgtcactgaggatggctcaggatggtgccaaagaatcaagaatgacttcacatttgagtacaactacctggaggatgagctatcagtacaaacaaactaaagtgccatggcagtaggtctggtcaaacctttatgtccaatttgaattttgtagttctcataagagcttgttcggttgcttctggatcaaagaaggttggaggggattaaattccttctagtcaaaattgaatagaaattgatttaacccccctcaatctcctttatccagacgcaaccgaacaatgcctaaggtgactgactgactgttataatctggacccttgacaaaatctccagctgtaaactaatgtgtgaagttggatgcaccgaacatgctgaaattataatcgtgttatgccagccgaatctgtttgacgcagctgtacattgtcgttattatctggatgcgcctgaaaaatattttggatctttcttggcgcctacctgtttatttttagctaactcctggctggcgctttcgatctttctggttcgtttttttatcaaaaaaaa

SEQ ID NO: 48157 - DNA, 1827 bp, Zea Mays
ccgaaacccgtcccaaatccgttgctctttcccccttgcccccttcccagtctccactctgagcactctcctccgctctgctcctttgctccccacggcaaaccgtaaaccctagcctgaggggcacccctgtcgcagccatgggcgccagccggaagctgcagggcgagatcgaccgcgtcctgaagaaggtctacgacactgagaatgccaaccagaaggagaagttcgaggcggacctcaagaaggagatcaagaagctgcagcggtacagggaccagatcaagacgtggattcagtccagcgagatcaaggacaagaaggctctgatggatgctcgaaagcagattgaacgagagatggaacgatttaaagtatgtgagaaggaaacaaaaactaaggccttctcaaaagaagggttaggtcagcaaccaaaaacagatcccaaagaaaaggccaaagctgaaacaagagactggcttaataatgtggttagcgatttggaaagccagattgataacttcgaagcagagattgaagggctttcaattaaaaagggaaagcaaagaccgcctcgattggtacatttagagacgtctattacgagacataaagctcatataaagaaattggagtcaatcttgcggcttttggataatgatgagttgagtcctgagcaagtcaatgatgttaaagattttcttgatgactatgttgaacgtaatcaggaagactttgatgaattcagtgatgttgaggacctctatagcacattgcccatggagaaggttgaagcacttgaagacatggtttcacttgctccttctagtcttgtgaagggtgttgctcctgtttcgactactgcagttttgagcacaaagagttctgttgcaacttcacctactcagcctacagtatcaacagcttcttcacaaagtacatcacaggatcaaacagaggagacagcttcccaagaaagcaatcctgaacctacgccacaaacaccacctccaaaaggtggaaaccctggaccttcagtaccagctgtgcccattgttgtcagtactggtagtgcggctgtttctgtacctgcagaaacaattagttcccctgtgcgactaactgtacccgccacagcagccacagtgctttcttctgctattccacgaagtgctcctgagaatacacttgctgttacctcaattcctgcaaacttatctaccactttgaaggatgatgaaagcatgagtgttcctccacgacgaccatctcctgctactgaaattggaattggcaggggcataactcgaggaacaactagtcaggcattaggtacagctcccataactattggtccagtttcaggaaatggatcgttggttatgcctcttggtagtaaagttcaaccccagcaggttcccaggactaatgatgcaatcggctctgattctgctaacacaaatgaaaaccctattcttggtggaagagtattttctcctccagttgtttctggggttcaatggagacctcaagctgctgctgcatttcaaaatcaaattgaaactaatcagtaccgtggaaggcctgagatttctgctgatcacagggagaagtacatacagagactgcagcaagtacagcagcaaggtggcagccttctgaatgtttcccatataactggcataaatcagaagcaatttccaacaccacagccaaatccccttctacaacagtttaagtcttctatatcttaatgttatgggcagccaactgggctccttcagctagtttggcactgtagacccctcctttaaggttagggttcgt

SEQ ID NO: 48158 - DNA, 1828 bp, Zea Mays
ccgaaacccgtcccaaatccgttgctctttcccccttgcccccttcccagtctccactctgagcactctcctccgctctgctcctttgctccccacggcaaaccgtaaaccctagcctgaggggcacccctgtcgcagccatgggcgccagccggaagctgcagggcgagatcgaccgcgtcctgaagaaggtctacgacactgagaatgccaaccagaaggagaagttcgaggcggacctcaagaaggagatcaagaagctgcagcggtacagggaccagatcaagacgtggattcagtccagcgagatcaaggacaagaaggctctgatggatgctcgaaagcagattgaacgagagatggaacgatttaaagtatgtgagaaggaaacaaaaactaaggccttctcaaaagaagggttaggtcagcaaccaaaaacagatcccaaagaaaaggccaaagctgaaacaagagactggcttaataatgtggttagcgatttggaaagccagattgataacttcgaagcagagattgaagggctttcaattaaaaagggaaagcaaagaccgcctcgattggtacatttagagacgtctattacgagacataaagctcatataaagaaattggagtcaatcttgcggcttttggataatgatgagttgagtcctgagcaagtcaatgatgttaaagattttcttgatgactatgttgaacgtaatcaggaagactttgatgaattcagtgatgttgaggacctctatagcacattgcccatggagaaggttgaagcacttgaagacatggtttcacttgctccttctagtcttgtgaagggtgttgctcctgtttcgactactgcagttttgagcacaaagagttctgttgcaacttcacctactcagcctacagtatcaacagcttcttcacaaagtacatcacaggatcaaacagaggagacagcttcccaagaaagcaatcctgaacctacgccacaaacaccacctccaaaaggtggaaaccctggaccttcagtaccagctgtgcccattgttgtcagtactggtagtgcggctgtttctgtacctgcagaaacaattagttcccctgtgcgactaactgtacccgccacagcagccacagtgctttcttctgctattccacgaagtgctcctgagaatacacttgctgttacctcaattcctgcaaacttatctaccactttgaaggatgatgaaagcatgagtgttcctccacgacgaccatctcctgctactgaaattggaattggcaggggcataactcgaggaacaactagtcaggcattaggtacagctcccataactattggtccagtttcaggaaatggatcgttggttatgcctcttggtagtaaagttcaaccccagcaggttcccaggactaatgatgcaatcggctctgattctgctaacacaaatgaaaaccctattcttggtggaagagtattttctcctccagttgtttctggggttcaatggagacctcaagctgctgctgcatttcaaaatcaaattgaaactaatcagtaccgtggaaggcctgagatttctgctgatcacagggagaagtacatacagagactgcagcaagtacagcagcaaggtggcagccttctgaatgtttcccatataactggcataaatcagaagcaatttccaacaccacagccaaatccccttctacaacagctttaagtcttctatatcttaatgttatgggcagccaactgggctccttcagctagtttggcactgtagacccctcctttaaggttagggttcgt

SEQ ID NO: 48159 - DNA, 3073 bp, Zea Mays
ccgaaacccgtcccaaatccgttgctctttcccccttgcccccttcccagtctccactctgagcactctcctccgctctgctcctttgctccccacggcaaaccgtaaaccctagcctgaggggcacccctgtcgcagccatgggcgccagccggaagctgcagggcgagatcgaccgcgtcctgaagaaggtccaggagggcgtcgatgtctttgacagcatctggaataaggtctacgacactgagaatgccaaccagaaggagaagttcgaggcggacctcaagaaggagatcaagaagctgcagcggtacagggaccagatcaagacgtggattcagtccagcgagatcaaggacaagaaggctctgatggatgctcgaaagcagattgaacgagagatggaacgatttaaagtatgtgagaaggaaacaaaaactaaggccttctcaaaagaagggttaggtcagcaaccaaaaacagatcccaaagaaaaggccaaagctgaaacaagagactggcttaataatgtggttagcgatttggaaagccagattgataacttcgaagcagagattgaagggctttcaattaaaaagggaaagcaaagaccgcctcgattggtacatttagagacgtctattacgagacataaagctcatataaagaaattggagtcaatcttgcggcttttggataatgatgagttgagtcctgagcaagtcaatgatgttaaagattttcttgatgactatgttgaacgtaatcaggaagactttgatgaattcagtgatgttgaggacctctatagcacattgcccatggagaaggttgaagcacttgaagacatggtttcacttgctccttctagtcttgtgaagggtgttgctcctgtttcgactactgcagttttgagcacaaagagttctgttgcaacttcacctactcagcctacagtatcaacagcttcttcacaaagtacatcacaggatcaaacagaggagacagcttcccaagaaagcaatcctgaacctacgccacaaacaccacctccaaaaggtggaaaccctggaccttcagtaccagctgtgcccattgttgtcagtactggtagtgcggctgtttctgtacctgcagaaacaattagttcccctgtgcgactaactgtacccgccacagcagccacagtgctttcttctgctattccacgaagtgctcctgagaatacacttgctgttacctcaattcctgcaaacttatctaccactttgaaggatgatgaaagcatgagtgttcctccacgacgaccatctcctgctactgaaattggaattggcaggggcataactcgaggaacaactagtcaggcattaggtacagctcccataactattggtccagtttcaggaaatggatcgttggttatgcctcttggtagtaaagttcaaccccagcaggttcccaggactaatgatgcaatcggctctgattctgctaacacaaatgaaaaccctattcttggtggaagagtattttctcctccagttgtttctggggttcaatggagacctcaagctgctgctgcatttcaaaatcaaattgaaactaatcagtaccgtggaaggcctgagatttctgctgatcacagggagaagtacatacagagactgcagcaagtacagcagcaaggtggcagccttctgaatgtttcccatataactggcataaatcagaagcaatttccaacaccacagccaaatccccttctacaacagtttaattcacagagttcctctatatcttcccaagtgaatcttgggcttggagttcaaggatcagacgcggggcatataaaaagtgaagatcaacaaattttggctgaagatgttggtgtggaatcttccgcaacaacaggagcaaataaacaaacaagtgaagatgacacaaagattccatattcgaatccttcagcacctgcagcagaaaacactcagctgcctagggatactgatctatcacctggacagcctttgcaacctggaatgccatcatctggtgttggtgttatcggccgaagaagtgtatctgatcttggtacaatcggagataaccttactggaacttctggtagttctggtcatgatcagaattattatctgcaaatgcttgaagctgcattccacaagcttccacagcccaaggactctgagcgtgctaaaacttacattccgcggcaccctgcagttacccctgctagctacccccaagttcaggcatcaattgtatcgaatcccaccttttgggaaagaattggtagcgacacattagctaccgacatgctgttctttgcgttctactaccaacagaacacatatcaacaatacttggctgctagagaactgaagaagcaatcatggagatttcaccggaggtacaatacctggttccagcggcatgtggagccacaggtcacgactgatgagtatgagcggggatcatatgtatactttgatttccatgtcactgaggatggctcaggatggtgccaaagaatcaagaatgacttcacatttgagtacaactacctggaggatgagctatcagtacaaacaaactaaagtgccatggcagtaggtctggtcaaacctttatgtccaatttgaattttgtagttctcataagagcttgttcggttgcttctggatcaaagaaggttggaggggattaaattccttctagtcaaaattgaatagaaattgatttaacccccctcaatctcctttatccagacgcaaccgaacaatgcctaaggtgactgactgactgttataatctggacccttgacaaaatctccagctgtaaactaatgtgtgaagttggatgcaccgaacatgctgaaattataatcgtgttatgccagccgaatctgtttgacgcagctgtacattgtcgttattatctggatgcgcctgaaaaatattttggatctttcttggcgcctacctgtttatttttagctaactcctggctggcgctttcgatctttctggttcgtttttttatcaaaaaaaa

SEQ ID NO: 48160 - DNA, 3083 bp, Zea Mays
cccaaatccgttgctctttcccccttgcccccttcccagtctccactctgagcactctcctccgctctgctcctttgctccccacggcaaaccgtaaaccctagcctgaggggcacccctgtcgcagccatgggcgccagccggaagctgcagggcgagatcgaccgcgtcctgaagaaggtccaggagggcgtcgatgtctttgacagcatctggaataaggtctacgacactgagaatgccaaccagaaggagaagttcgaggcggacctcaagaaggagatcaagaagctgcagcggtacagggaccagatcaagacgtggattcagtccagcgagatcaaggacaagaaggttagtgcctcttatgagcaggctctgatggatgctcgaaagcagattgaacgagagatggaacgatttaaagtatgtgagaaggaaacaaaaactaaggccttctcaaaagaagggttaggtcagcaaccaaaaacagatcccaaagaaaaggccaaagctgaaacaagagactggcttaataatgtggttagcgatttggaaagccagattgataacttcgaagcagagattgaagggctttcaattaaaaagggaaagcaaagaccgcctcgattggtacatttagagacgtctattacgagacataaagctcatataaagaaattggagtcaatcttgcggcttttggataatgatgagttgagtcctgagcaagtcaatgatgttaaagattttcttgatgactatgttgaacgtaatcaggaagactttgatgaattcagtgatgttgaggacctctatagcacattgcccatggagaaggttgaagcacttgaagacatggtttcacttgctccttctagtcttgtgaagggtgttgctcctgtttcgactactgcagttttgagcacaaagagttctgttgcaacttcacctactcagcctacagtatcaacagcttcttcacaaagtacatcacaggatcaaacagaggagacagcttcccaagaaagcaatcctgaacctacgccacaaacaccacctccaaaaggtggaaaccctggaccttcagtaccagctgtgcccattgttgtcagtactggtagtgcggctgtttctgtacctgcagaaacaattagttcccctgtgcgactaactgtacccgccacagcagccacagtgctttcttctgctattccacgaagtgctcctgagaatacacttgctgttacctcaattcctgcaaacttatctaccactttgaaggatgatgaaagcatgagtgttcctccacgacgaccatctcctgctactgaaattggaattggcaggggcataactcgaggaacaactagtcaggcattaggtacagctcccataactattggtccagtttcaggaaatggatcgttggttatgcctcttggtagtaaagttcaaccccagcaggttcccaggactaatgatgcaatcggctctgattctgctaacacaaatgaaaaccctattcttggtggaagagtattttctcctccagttgtttctggggttcaatggagacctcaagctgctgctgcatttcaaaatcaaattgaaactaatcagtaccgtggaaggcctgagatttctgctgatcacagggagaagtacatacagagactgcagcaagtacagcagcaaggtggcagccttctgaatgtttcccatataactggcataaatcagaagcaatttccaacaccacagccaaatccccttctacaacagtttaattcacagagttcctctatatcttcccaagtgaatcttgggcttggagttcaaggatcagacgcggggcatataaaaagtgaagatcaacaaattttggctgaagatgttggtgtggaatcttccgcaacaacaggagcaaataaacaaacaagtgaagatgacacaaagattccatattcgaatccttcagcacctgcagcagaaaacactcagctgcctagggatactgatctatcacctggacagcctttgcaacctggaatgccatcatctggtgttggtgttatcggccgaagaagtgtatctgatcttggtacaatcggagataaccttactggaacttctggtagttctggtcatgatcagaattattatctgcaaatgcttgaagctgcattccacaagcttccacagcccaaggactctgagcgtgctaaaacttacattccgcggcaccctgcagttacccctgctagctacccccaagttcaggcatcaattgtatcgaatcccaccttttgggaaagaattggtagcgacacattagctaccgacatgctgttctttgcgttctactaccaacagaacacatatcaacaatacttggctgctagagaactgaagaagcaatcatggagatttcaccggaggtacaatacctggttccagcggcatgtggagccacaggtcacgactgatgagtatgagcggggatcatatgtatactttgatttccatgtcactgaggatggctcaggatggtgccaaagaatcaagaatgacttcacatttgagtacaactacctggaggatgagctatcagtacaaacaaactaaagtgccatggcagtaggtctggtcaaacctttatgtccaatttgaattttgtagttctcataagagcttgttcggttgcttctggatcaaagaaggttggaggggattaaattccttctagtcaaaattgaatagaaattgatttaacccccctcaatctcctttatccagacgcaaccgaacaatgcctaaggtgactgactgactgttataatctggacccttgacaaaatctccagctgtaaactaatgtgtgaagttggatgcaccgaacatgctgaaattataatcgtgttatgccagccgaatctgtttgacgcagctgtacattgtcgttattatctggatgcgcctgaaaaatattttggatctttcttggcgcctacctgtttatttttagctaactcctggctggcgctttcgatctttctggttcgtttttttatcaaaaaaaa

SEQ ID NO: 48161 - DNA, 3086 bp, Zea Mays
cccaaatccgttgctctttcccccttgcccccttcccagtctccactctgagcactctcctccgctctgctcctttgctccccacggcaaaccgtaaaccctagcctgaggggcacccctgtcgcagccatgggcgccagccggaagctgcagggcgagatcgaccgcgtcctgaagaaggtccaggagggcgtcgatgtctttgacagcatctggaataaggtctacgacactgagaatgccaaccagaaggagaagttcgaggcggacctcaagaaggagatcaagaagctgcagcggtacagggaccagatcaagacgtggattcagtccagcgagatcaaggacaagaaggttagtgcctcttatgagcaggctctgatggatgctcgaaagcagattgaacgagagatggaacgatttaaagtatgtgagaaggaaacaaaaactaaggccttctcaaaagaagggttaggtcagcaaccaaaaacagatcccaaagaaaaggccaaagctgaaacaagagactggcttaataatgtggttagcgatttggaaagccagattgataacttcgaagcagagattgaagggctttcaattaaaaagggaaagcaaagaccgcctcgattggtacatttagagacgtctattacgagacataaagctcatataaagaaattggagtcaatcttgcggcttttggataatgatgagttgagtcctgagcaagtcaatgatgttaaagattttcttgatgactatgttgaacgtaatcaggaagactttgatgaattcagtgatgttgaggacctctatagcacattgcccatggagaaggttgaagcacttgaagacatggtttcacttgctccttctagtcttgtgaagggtgttgctcctgtttcgactactgcagttttgagcacaaagagttctgttgcaacttcacctactcagcctacagtatcaacagcttcttcacaaagtacatcacaggatcaaacagaggagacagcttcccaagaaagcaatcctgaacctacgccacaaacaccacctccaaaaggtggaaaccctggaccttcagtaccagctgtgcccattgttgtcagtactggtagtgcggctgtttctgtacctgcagaaacaattagttcccctgtgcgactaactgtacccgccacagcagccacagtgctttcttctgctattccacgaagtgctcctgagaatacacttgctgttacctcaattcctgcaaacttatctaccactttgaaggatgatgaaagcatgagtgttcctccacgacgaccatctcctgctactgaaattggaattggcaggggcataactcgaggaacaactagtcaggcattaggtacagctcccataactattggtccagtttcaggaaatggatcgcagttggttatgcctcttggtagtaaagttcaaccccagcaggttcccaggactaatgatgcaatcggctctgattctgctaacacaaatgaaaaccctattcttggtggaagagtattttctcctccagttgtttctggggttcaatggagacctcaagctgctgctgcatttcaaaatcaaattgaaactaatcagtaccgtggaaggcctgagatttctgctgatcacagggagaagtacatacagagactgcagcaagtacagcagcaaggtggcagccttctgaatgtttcccatataactggcataaatcagaagcaatttccaacaccacagccaaatccccttctacaacagtttaattcacagagttcctctatatcttcccaagtgaatcttgggcttggagttcaaggatcagacgcggggcatataaaaagtgaagatcaacaaattttggctgaagatgttggtgtggaatcttccgcaacaacaggagcaaataaacaaacaagtgaagatgacacaaagattccatattcgaatccttcagcacctgcagcagaaaacactcagctgcctagggatactgatctatcacctggacagcctttgcaacctggaatgccatcatctggtgttggtgttatcggccgaagaagtgtatctgatcttggtacaatcggagataaccttactggaacttctggtagttctggtcatgatcagaattattatctgcaaatgcttgaagctgcattccacaagcttccacagcccaaggactctgagcgtgctaaaacttacattccgcggcaccctgcagttacccctgctagctacccccaagttcaggcatcaattgtatcgaatcccaccttttgggaaagaattggtagcgacacattagctaccgacatgctgttctttgcgttctactaccaacagaacacatatcaacaatacttggctgctagagaactgaagaagcaatcatggagatttcaccggaggtacaatacctggttccagcggcatgtggagccacaggtcacgactgatgagtatgagcggggatcatatgtatactttgatttccatgtcactgaggatggctcaggatggtgccaaagaatcaagaatgacttcacatttgagtacaactacctggaggatgagctatcagtacaaacaaactaaagtgccatggcagtaggtctggtcaaacctttatgtccaatttgaattttgtagttctcataagagcttgttcggttgcttctggatcaaagaaggttggaggggattaaattccttctagtcaaaattgaatagaaattgatttaacccccctcaatctcctttatccagacgcaaccgaacaatgcctaaggtgactgactgactgttataatctggacccttgacaaaatctccagctgtaaactaatgtgtgaagttggatgcaccgaacatgctgaaattataatcgtgttatgccagccgaatctgtttgacgcagctgtacattgtcgttattatctggatgcgcctgaaaaatattttggatctttcttggcgcctacctgtttatttttagctaactcctggctggcgctttcgatctttctggttcgtttttttatcaaaaaaaa

SEQ ID NO: 48162 - DNA, 3050 bp, Zea Mays
cccaaatccgttgctctttcccccttgcccccttcccagtctccactctgagcactctcctccgctctgctcctttgctccccacggcaaaccgtaaaccctagcctgaggggcacccctgtcgcagccatgggcgccagccggaagctgcagggcgagatcgaccgcgtcctgaagaaggtccaggagggcgtcgatgtctttgacagcatctggaataaggtctacgacactgagaatgccaaccagaaggagaagttcgaggcggacctcaagaaggagatcaagaagctgcagcggtacagggaccagatcaagacgtggattcagtccagcgagatcaaggacaagaaggctctgatggatgctcgaaagcagattgaacgagagatggaacgatttaaagtatgtgagaaggaaacaaaaactaaggccttctcaaaagaagggttaggtcagcaaccaaaaacagatcccaaagaaaaggccaaagctgaaacaagagactggcttaataatgtggttagcgatttggaaagccagattgataacttcgaagcagagattgaagggctttcaattaaaaagggaaagcaaagaccgcctcgattggtacatttagagacgtctattacgagacataaagctcatataaagaaattggagtcaatcttgcggcttttggataatgatgagttgagtcctgagcaagtcaatgatgttaaagattttcttgatgactatgttgaacgtaatcaggaagactttgatgaattcagtgatgttgaggacctctatagcacattgcccatggagaaggttgaagcacttgaagacatggtttcacttgctccttctagtcttgtgaagggtgttgctcctgtttcgactactgcagttttgagcacaaagagttctgttgcaacttcacctactcagcctacagtatcaacagcttcttcacaaagtacatcacaggatcaaacagaggagacagcttcccaagaaagcaatcctgaacctacgccacaaacaccacctccaaaaggtggaaaccctggaccttcagtaccagctgtgcccattgttgtcagtactggtagtgcggctgtttctgtacctgcagaaacaattagttcccctgtgcgactaactgtacccgccacagcagccacagtgctttcttctgctattccacgaagtgctcctgagaatacacttgctgttacctcaattcctgcaaacttatctaccactttgaaggatgatgaaagcatgagtgttcctccacgacgaccatctcctgctactgaaattggaattggcaggggcataactcgaggaacaactagtcaggcattaggtacagctcccataactattggtccagtttcaggaaatggatcgttggttatgcctcttggtagtaaagttcaaccccagcaggttcccaggactaatgatgcaatcggctctgattctgctaacacaaatgaaaaccctattcttggtggaagagtattttctcctccagttgtttctggggttcaatggagacctcaagctgctgctgcatttcaaaatcaaattgaaactaatcagtaccgtggaaggcctgagatttctgctgatcacagggagaagtacatacagagactgcagcaagtacagcagcaaggtggcagccttctgaatgtttcccatataactggcataaatcagaagcaatttccaacaccacagccaaatccccttctacaacagagttcctctatatcttcccaagtgaatcttgggcttggagttcaaggatcagacgcggggcatataaaaagtgaagatcaacaaattttggctgaagatgttggtgtggaatcttccgcaacaacaggagcaaataaacaaacaagtgaagatgacacaaagattccatattcgaatccttcagcacctgcagcagaaaacactcagctgcctagggatactgatctatcacctggacagcctttgcaacctggaatgccatcatctggtgttggtgttatcggccgaagaagtgtatctgatcttggtacaatcggagataaccttactggaacttctggtagttctggtcatgatcagaattattatctgcaaatgcttgaagctgcattccacaagcttccacagcccaaggactctgagcgtgctaaaacttacattccgcggcaccctgcagttacccctgctagctacccccaagttcaggcatcaattgtatcgaatcccaccttttgggaaagaattggtagcgacacattagctaccgacatgctgttctttgcgttctactaccaacagaacacatatcaacaatacttggctgctagagaactgaagaagcaatcatggagatttcaccggaggtacaatacctggttccagcggcatgtggagccacaggtcacgactgatgagtatgagcggggatcatatgtatactttgatttccatgtcactgaggatggctcaggatggtgccaaagaatcaagaatgacttcacatttgagtacaactacctggaggatgagctatcagtacaaacaaactaaagtgccatggcagtaggtctggtcaaacctttatgtccaatttgaattttgtagttctcataagagcttgttcggttgcttctggatcaaagaaggttggaggggattaaattccttctagtcaaaattgaatagaaattgatttaacccccctcaatctcctttatccagacgcaaccgaacaatgcctaaggtgactgactgactgttataatctggacccttgacaaaatctccagctgtaaactaatgtgtgaagttggatgcaccgaacatgctgaaattataatcgtgttatgccagccgaatctgtttgacgcagctgtacattgtcgttattatctggatgcgcctgaaaaatattttggatctttcttggcgcctacctgtttatttttagctaactcctggctggcgctttcgatctttctggttcgtttttttatcaaaaaaaa

SEQ ID NO: 48163 - DNA, 3065 bp, Zea Mays
cccaaatccgttgctctttcccccttgcccccttcccagtctccactctgagcactctcctccgctctgctcctttgctccccacggcaaaccgtaaaccctagcctgaggggcacccctgtcgcagccatgggcgccagccggaagctgcagggcgagatcgaccgcgtcctgaagaaggtccaggagggcgtcgatgtctttgacagcatctggaataaggtctacgacactgagaatgccaaccagaaggagaagttcgaggcggacctcaagaaggagatcaagaagctgcagcggtacagggaccagatcaagacgtggattcagtccagcgagatcaaggacaagaaggctctgatggatgctcgaaagcagattgaacgagagatggaacgatttaaagtatgtgagaaggaaacaaaaactaaggccttctcaaaagaagggttaggtcagcaaccaaaaacagatcccaaagaaaaggccaaagctgaaacaagagactggcttaataatgtggttagcgatttggaaagccagattgataacttcgaagcagagattgaagggctttcaattaaaaagggaaagcaaagaccgcctcgattggtacatttagagacgtctattacgagacataaagctcatataaagaaattggagtcaatcttgcggcttttggataatgatgagttgagtcctgagcaagtcaatgatgttaaagattttcttgatgactatgttgaacgtaatcaggaagactttgatgaattcagtgatgttgaggacctctatagcacattgcccatggagaaggttgaagcacttgaagacatggtttcacttgctccttctagtcttgtgaagggtgttgctcctgtttcgactactgcagttttgagcacaaagagttctgttgcaacttcacctactcagcctacagtatcaacagcttcttcacaaagtacatcacaggatcaaacagaggagacagcttcccaagaaagcaatcctgaacctacgccacaaacaccacctccaaaaggtggaaaccctggaccttcagtaccagctgtgcccattgttgtcagtactggtagtgcggctgtttctgtacctgcagaaacaattagttcccctgtgcgactaactgtacccgccacagcagccacagtgctttcttctgctattccacgaagtgctcctgagaatacacttgctgttacctcaattcctgcaaacttatctaccactttgaaggatgatgaaagcatgagtgttcctccacgacgaccatctcctgctactgaaattggaattggcaggggcataactcgaggaacaactagtcaggcattaggtacagctcccataactattggtccagtttcaggaaatggatcgcagttggttatgcctcttggtagtaaagttcaaccccagcaggttcccaggactaatgatgcaatcggctctgattctgctaacacaaatgaaaaccctattcttggtggaagagtattttctcctccagttgtttctggggttcaatggagacctcaagctgctgctgcatttcaaaatcaaattgaaactaatcagtaccgtggaaggcctgagatttctgctgatcacagggagaagtacatacagagactgcagcaagtacagcagcaaggtggcagccttctgaatgtttcccatataactggcataaatcagaagcaatttccaacaccacagccaaatccccttctacaacagtttaattcacagagttcctctatatcttcccaagtgaatcttgggcttggagttcaaggatcagacgcggggcatataaaaagtgaagatcaacaaattttggctgaagatgttggtgtggaatcttccgcaacaacaggagcaaataaacaaacaagtgaagatgacacaaagattccatattcgaatccttcagcacctgcagcagaaaacactcagctgcctagggatactgatctatcacctggacagcctttgcaacctggaatgccatcatctggtgttggtgttatcggccgaagaagtgtatctgatcttggtacaatcggagataaccttactggaacttctggtagttctggtcatgatcagaattattatctgcaaatgcttgaagctgcattccacaagcttccacagcccaaggactctgagcgtgctaaaacttacattccgcggcaccctgcagttacccctgctagctacccccaagttcaggcatcaattgtatcgaatcccaccttttgggaaagaattggtagcgacacattagctaccgacatgctgttctttgcgttctactaccaacagaacacatatcaacaatacttggctgctagagaactgaagaagcaatcatggagatttcaccggaggtacaatacctggttccagcggcatgtggagccacaggtcacgactgatgagtatgagcggggatcatatgtatactttgatttccatgtcactgaggatggctcaggatggtgccaaagaatcaagaatgacttcacatttgagtacaactacctggaggatgagctatcagtacaaacaaactaaagtgccatggcagtaggtctggtcaaacctttatgtccaatttgaattttgtagttctcataagagcttgttcggttgcttctggatcaaagaaggttggaggggattaaattccttctagtcaaaattgaatagaaattgatttaacccccctcaatctcctttatccagacgcaaccgaacaatgcctaaggtgactgactgactgttataatctggacccttgacaaaatctccagctgtaaactaatgtgtgaagttggatgcaccgaacatgctgaaattataatcgtgttatgccagccgaatctgtttgacgcagctgtacattgtcgttattatctggatgcgcctgaaaaatattttggatctttcttggcgcctacctgtttatttttagctaactcctggctggcgctttcgatctttctggttcgtttttttatcaaaaaaaa

SEQ ID NO: 48164 - DNA, 3027 bp, Zea Mays
caaatccgttgctctttcccccttgcccccttcccagtctccactctgagcactctcctccgctctgctcctttgctccccacggcaaaccgtaaaccctagcctgaggggcacccctgtcgcagccatgggcgccagccggaagctgcagggcgagatcgaccgcgtcctgaagaaggtctacgacactgagaatgccaaccagaaggagaagttcgaggcggacctcaagaaggagatcaagaagctgcagcggtacagggaccagatcaagacgtggattcagtccagcgagatcaaggacaagaaggctctgatggatgctcgaaagcagattgaacgagagatggaacgatttaaagtatgtgagaaggaaacaaaaactaaggccttctcaaaagaagggttaggtcagcaaccaaaaacagatcccaaagaaaaggccaaagctgaaacaagagactggcttaataatgtggttagcgatttggaaagccagattgataacttcgaagcagagattgaagggctttcaattaaaaagggaaagcaaagaccgcctcgattggtacatttagagacgtctattacgagacataaagctcatataaagaaattggagtcaatcttgcggcttttggataatgatgagttgagtcctgagcaagtcaatgatgttaaagattttcttgatgactatgttgaacgtaatcaggaagactttgatgaattcagtgatgttgaggacctctatagcacattgcccatggagaaggttgaagcacttgaagacatggtttcacttgctccttctagtcttgtgaagcctacagtatcaacagcttcttcacaaagtacatcacaggatcaaacagaggagacagcttcccaagaaagcaatcctgaacctacgccacaaacaccacctccaaaaggtggaaaccctggaccttcagtaccagctgtgcccattgttgtcagtactggtagtgcggctgtttctgtacctgcagaaacaattagttcccctgtgcgactaactgtacccgccacagcagccacagtgctttcttctgctattccacgaagtgctcctgagaatacacttgctgttacctcaattcctgcaaacttatctaccactttgaaggatgatgaaagcatgagtgttcctccacgacgaccatctcctgctactgaaattggaattggcaggggcataactcgaggaacaactagtcaggcattaggtacagctcccataactattggtccagtttcaggaaatggatcggttagtgcacttcctgcaataaatgacttgtccaaaataaatatattgaacactgacgagaagattaacagtgatggtctttctcagcagttggttatgcctcttggtagtaaagttcaaccccagcaggttcccaggactaatgatgcaatcggctctgattctgctaacacaaatgaaaaccctattcttggtggaagagtattttctcctccagttgtttctggggttcaatggagacctcaagctgctgctgcatttcaaaatcaaattgaaactaatcagtaccgtggaaggcctgagatttctgctgatcacagggagaagtacatacagagactgcagcaagtacagcagcaaggtggcagccttctgaatgtttcccatataactggcataaatcagaagcaatttccaacaccacagccaaatccccttctacaacagagttcctctatatcttcccaagtgaatcttgggcttggagttcaaggatcagacgcggggcatataaaaagtgaagatcaacaaattttggctgaagatgttggtgtggaatcttccgcaacaacaggagcaaataaacaaacaagtgaagatgacacaaagattccatattcgaatccttcagcacctgcagcagaaaacactcagctgcctagggatactgatctatcacctggacagcctttgcaacctggaatgccatcatctggtgttggtgttatcggccgaagaagtgtatctgatcttggtacaatcggagataaccttactggaacttctggtagttctggtcatgatcagaattattatctgcaaatgcttgaagctgcattccacaagcttccacagcccaaggactctgagcgtgctaaaacttacattccgcggcaccctgcagttacccctgctagctacccccaagttcaggcatcaattgtatcgaatcccaccttttgggaaagaattggtagcgacacattagctaccgacatgctgttctttgcgttctactaccaacagaacacatatcaacaatacttggctgctagagaactgaagaagcaatcatggagatttcaccggaggtacaatacctggttccagcggcatgtggagccacaggtcacgactgatgagtatgagcggggatcatatgtatactttgatttccatgtcactgaggatggctcaggatggtgccaaagaatcaagaatgacttcacatttgagtacaactacctggaggatgagctatcagtacaaacaaactaaagtgccatggcagtaggtctggtcaaacctttatgtccaatttgaattttgtagttctcataagagcttgttcggttgcttctggatcaaagaaggttggaggggattaaattccttctagtcaaaattgaatagaaattgatttaacccccctcaatctcctttatccagacgcaaccgaacaatgcctaaggtgactgactgactgttataatctggacccttgacaaaatctccagctgtaaactaatgtgtgaagttggatgcaccgaacatgctgaaattataatcgtgttatgccagccgaatctgtttgacgcagctgtacattgtcgttattatctggatgcgcctgaaaaatattttggatctttcttggcgcctacctgtttatttttagctaactcctggctggcgctttcgatctttctggttcgtttttttatcaaaaaaaa

SEQ ID NO: 48165 - DNA, 1856 bp, Zea Mays
atccgttgctctttcccccttgcccccttcccagtctccactctgagcactctcctccgctctgctcctttgctccccacggcaaaccgtaaaccctagcctgaggggcacccctgtcgcagccatgggcgccagccggaagctgcagggcgagatcgaccgcgtcctgaagaaggtccaggagggcgtcgatgtctttgacagcatctggaataaggtctacgacactgagaatgccaaccagaaggagaagttcgaggcggacctcaagaaggagatcaagaagctgcagcggtacagggaccagatcaagacgtggattcagtccagcgagatcaaggacaagaaggctctgatggatgctcgaaagcagattgaacgagagatggaacgatttaaagtatgtgagaaggaaacaaaaactaaggccttctcaaaagaagggttaggtcagcaaccaaaaacagatcccaaagaaaaggccaaagctgaaacaagagactggcttaataatgtggttagcgatttggaaagccagattgataacttcgaagcagagattgaagggctttcaattaaaaagggaaagcaaagaccgcctcgattggtacatttagagacgtctattacgagacataaagctcatataaagaaattggagtcaatcttgcggcttttggataatgatgagttgagtcctgagcaagtcaatgatgttaaagattttcttgatgactatgttgaacgtaatcaggaagactttgatgaattcagtgatgttgaggacctctatagcacattgcccatggagaaggttgaagcacttgaagacatggtttcacttgctccttctagtcttgtgaagggtgttgctcctgtttcgactactgcagttttgagcacaaagagttctgttgcaacttcacctactcagcctacagtatcaacagcttcttcacaaagtacatcacaggatcaaacagaggagacagcttcccaagaaagcaatcctgaacctacgccacaaacaccacctccaaaaggtggaaaccctggaccttcagtaccagctgtgcccattgttgtcagtactggtagtgcggctgtttctgtacctgcagaaacaattagttcccctgtgcgactaactgtacccgccacagcagccacagtgctttcttctgctattccacgaagtgctcctgagaatacacttgctgttacctcaattcctgcaaacttatctaccactttgaaggatgatgaaagcatgagtgttcctccacgacgaccatctcctgctactgaaattggaattggcaggggcataactcgaggaacaactagtcaggcattaggtacagctcccataactattggtccagtttcaggaaatggatcgcagttggttatgcctcttggtagtaaagttcaaccccagcaggttcccaggactaatgatgcaatcggctctgattctgctaacacaaatgaaaaccctattcttggtggaagagtattttctcctccagttgtttctggggttcaatggagacctcaagctgctgctgcatttcaaaatcaaattgaaactaatcagtaccgtggaaggcctgagatttctgctgatcacagggagaagtacatacagagactgcagcaagtacagcagcaaggtggcagccttctgaatgtttcccatataactggcataaatcagaagcaatttccaacaccacagccaaatccccttctacaacagtttaagtcttctatatcttaatgttatgggcagccaactgggctccttcagctagtttggcactgtagacccctcctttaaggttagggttcgt

SEQ ID NO: 48166 - DNA, 1857 bp, Zea Mays
atccgttgctctttcccccttgcccccttcccagtctccactctgagcactctcctccgctctgctcctttgctccccacggcaaaccgtaaaccctagcctgaggggcacccctgtcgcagccatgggcgccagccggaagctgcagggcgagatcgaccgcgtcctgaagaaggtccaggagggcgtcgatgtctttgacagcatctggaataaggtctacgacactgagaatgccaaccagaaggagaagttcgaggcggacctcaagaaggagatcaagaagctgcagcggtacagggaccagatcaagacgtggattcagtccagcgagatcaaggacaagaaggctctgatggatgctcgaaagcagattgaacgagagatggaacgatttaaagtatgtgagaaggaaacaaaaactaaggccttctcaaaagaagggttaggtcagcaaccaaaaacagatcccaaagaaaaggccaaagctgaaacaagagactggcttaataatgtggttagcgatttggaaagccagattgataacttcgaagcagagattgaagggctttcaattaaaaagggaaagcaaagaccgcctcgattggtacatttagagacgtctattacgagacataaagctcatataaagaaattggagtcaatcttgcggcttttggataatgatgagttgagtcctgagcaagtcaatgatgttaaagattttcttgatgactatgttgaacgtaatcaggaagactttgatgaattcagtgatgttgaggacctctatagcacattgcccatggagaaggttgaagcacttgaagacatggtttcacttgctccttctagtcttgtgaagggtgttgctcctgtttcgactactgcagttttgagcacaaagagttctgttgcaacttcacctactcagcctacagtatcaacagcttcttcacaaagtacatcacaggatcaaacagaggagacagcttcccaagaaagcaatcctgaacctacgccacaaacaccacctccaaaaggtggaaaccctggaccttcagtaccagctgtgcccattgttgtcagtactggtagtgcggctgtttctgtacctgcagaaacaattagttcccctgtgcgactaactgtacccgccacagcagccacagtgctttcttctgctattccacgaagtgctcctgagaatacacttgctgttacctcaattcctgcaaacttatctaccactttgaaggatgatgaaagcatgagtgttcctccacgacgaccatctcctgctactgaaattggaattggcaggggcataactcgaggaacaactagtcaggcattaggtacagctcccataactattggtccagtttcaggaaatggatcgcagttggttatgcctcttggtagtaaagttcaaccccagcaggttcccaggactaatgatgcaatcggctctgattctgctaacacaaatgaaaaccctattcttggtggaagagtattttctcctccagttgtttctggggttcaatggagacctcaagctgctgctgcatttcaaaatcaaattgaaactaatcagtaccgtggaaggcctgagatttctgctgatcacagggagaagtacatacagagactgcagcaagtacagcagcaaggtggcagccttctgaatgtttcccatataactggcataaatcagaagcaatttccaacaccacagccaaatccccttctacaacagctttaagtcttctatatcttaatgttatgggcagccaactgggctccttcagctagtttggcactgtagacccctcctttaaggttagggttcgt

SEQ ID NO: 48167 - DNA, 3049 bp, Zea Mays
atccgttgctctttcccccttgcccccttcccagtctccactctgagcactctcctccgctctgctcctttgctccccacggcaaaccgtaaaccctagcctgaggggcacccctgtcgcagccatgggcgccagccggaagctgcagggcgagatcgaccgcgtcctgaagaaggtccaggagggcgtcgatgtctttgacagcatctggaataaggtctacgacactgagaatgccaaccagaaggagaagttcgaggcggacctcaagaaggagatcaagaagctgcagcggtacagggaccagatcaagacgtggattcagtccagcgagatcaaggacaagaaggctctgatggatgctcgaaagcagattgaacgagagatggaacgatttaaagtatgtgagaaggaaacaaaaactaaggccttctcaaaagaagggttaggtcagcaaccaaaaacagatcccaaagaaaaggccaaagctgaaacaagagactggcttaataatgtggttagcgatttggaaagccagattgataacttcgaagcagagattgaagggctttcaattaaaaagggaaagcaaagaccgcctcgattggtacatttagagacgtctattacgagacataaagctcatataaagaaattggagtcaatcttgcggcttttggataatgatgagttgagtcctgagcaagtcaatgatgttaaagattttcttgatgactatgttgaacgtaatcaggaagactttgatgaattcagtgatgttgaggacctctatagcacattgcccatggagaaggttgaagcacttgaagacatggtttcacttgctccttctagtcttgtgaagggtgttgctcctgtttcgactactgcagttttgagcacaaagagttctgttgcaacttcacctactcagcctacagtatcaacagcttcttcacaaagtacatcacaggatcaaacagaggagacagcttcccaagaaagcaatcctgaacctacgccacaaacaccacctccaaaaggtggaaaccctggaccttcagtaccagctgtgcccattgttgtcagtactggtagtgcggctgtttctgtacctgcagaaacaattagttcccctgtgcgactaactgtacccgccacagcagccacagtgctttcttctgctattccacgaagtgctcctgagaatacacttgctgttacctcaattcctgcaaacttatctaccactttgaaggatgatgaaagcatgagtgttcctccacgacgaccatctcctgctactgaaattggaattggcaggggcataactcgaggaacaactagtcaggcattaggtacagctcccataactattggtccagtttcaggaaatggatcgttggttatgcctcttggtagtaaagttcaaccccagcaggttcccaggactaatgatgcaatcggctctgattctgctaacacaaatgaaaaccctattcttggtggaagagtattttctcctccagttgtttctggggttcaatggagacctcaagctgctgctgcatttcaaaatcaaattgaaactaatcagtaccgtggaaggcctgagatttctgctgatcacagggagaagtacatacagagactgcagcaagtacagcagcaaggtggcagccttctgaatgtttcccatataactggcataaatcagaagcaatttccaacaccacagccaaatccccttctacaacagacagagttcctctatatcttcccaagtgaatcttgggcttggagttcaaggatcagacgcggggcatataaaaagtgaagatcaacaaattttggctgaagatgttggtgtggaatcttccgcaacaacaggagcaaataaacaaacaagtgaagatgacacaaagattccatattcgaatccttcagcacctgcagcagaaaacactcagctgcctagggatactgatctatcacctggacagcctttgcaacctggaatgccatcatctggtgttggtgttatcggccgaagaagtgtatctgatcttggtacaatcggagataaccttactggaacttctggtagttctggtcatgatcagaattattatctgcaaatgcttgaagctgcattccacaagcttccacagcccaaggactctgagcgtgctaaaacttacattccgcggcaccctgcagttacccctgctagctacccccaagttcaggcatcaattgtatcgaatcccaccttttgggaaagaattggtagcgacacattagctaccgacatgctgttctttgcgttctactaccaacagaacacatatcaacaatacttggctgctagagaactgaagaagcaatcatggagatttcaccggaggtacaatacctggttccagcggcatgtggagccacaggtcacgactgatgagtatgagcggggatcatatgtatactttgatttccatgtcactgaggatggctcaggatggtgccaaagaatcaagaatgacttcacatttgagtacaactacctggaggatgagctatcagtacaaacaaactaaagtgccatggcagtaggtctggtcaaacctttatgtccaatttgaattttgtagttctcataagagcttgttcggttgcttctggatcaaagaaggttggaggggattaaattccttctagtcaaaattgaatagaaattgatttaacccccctcaatctcctttatccagacgcaaccgaacaatgcctaaggtgactgactgactgttataatctggacccttgacaaaatctccagctgtaaactaatgtgtgaagttggatgcaccgaacatgctgaaattataatcgtgttatgccagccgaatctgtttgacgcagctgtacattgtcgttattatctggatgcgcctgaaaaatattttggatctttcttggcgcctacctgtttatttttagctaactcctggctggcgctttcgatctttctggttcgtttttttatcaaaaaaaa

SEQ ID NO: 48168 - DNA, 3013 bp, Zea Mays
atccgttgctctttcccccttgcccccttcccagtctccactctgagcactctcctccgctctgctcctttgctccccacggcaaaccgtaaaccctagcctgaggggcacccctgtcgcagccatgggcgccagccggaagctgcagggcgagatcgaccgcgtcctgaagaaggtccaggagggcgtcgatgtctttgacagcatctggaataaggtctacgacactgagaatgccaaccagaaggagaagttcgaggcggacctcaagaaggagatcaagaagctgcagcggtacagggaccagatcaagacgtggattcagtccagcgagatcaaggacaagaaggctctgatggatgctcgaaagcagattgaacgagagatggaacgatttaaagtatgtgagaaggaaacaaaaactaaggccttctcaaaagaagggttaggtcagcaaccaaaaacagatcccaaagaaaaggccaaagctgaaacaagagactggcttaataatgtggttagcgatttggaaagccagattgataacttcgaagcagagattgaagggctttcaattaaaaagggaaagcaaagaccgcctcgattggtacatttagagacgtctattacgagacataaagctcatataaagaaattggagtcaatcttgcggcttttggataatgatgagttgagtcctgagcaagtcaatgatgttaaagattttcttgatgactatgttgaacgtaatcaggaagactttgatgaattcagtgatgttgaggacctctatagcacattgcccatggagaaggttgaagcacttgaagacatggtttcacttgctccttctagtcttgtgaagggtgttgctcctgtttcgactactgcagttttgagcacaaagagttctgttgcaacttcacctactcagcctacagtatcaacagcttcttcacaaagtacatcacaggatcaaacagaggagacagcttcccaagaaagcaatcctgaacctacgccacaaacaccacctccaaaaggtggaaaccctggaccttcagtaccagctgtgcccattgttgtcagtactggtagtgcggctgtttctgtacctgcagaaacaattagttcccctgtgcgactaactgtacccgccacagcagccacagtgctttcttctgctattccacgaagtgctcctgagaatacacttgctgttacctcaattcctgcaaacttatctaccactttgaaggatgatgaaagcatgagtgttcctccacgacgaccatctcctgctactgaaattggaattggcaggggcataactcgaggaacaactagtcaggcattagttggttatgcctcttggtagtaaagttcaaccccagcaggttcccaggactaatgatgcaatcggctctgattctgctaacacaaatgaaaaccctattcttggtggaagagtattttctcctccagttgtttctggggttcaatggagacctcaagctgctgctgcatttcaaaatcaaattgaaactaatcagtaccgtggaaggcctgagatttctgctgatcacagggagaagtacatacagagactgcagcaagtacagcagcaaggtggcagccttctgaatgtttcccatataactggcataaatcagaagcaatttccaacaccacagccaaatccccttctacaacagtttaattcacagagttcctctatatcttcccaagtgaatcttgggcttggagttcaaggatcagacgcggggcatataaaaagtgaagatcaacaaattttggctgaagatgttggtgtggaatcttccgcaacaacaggagcaaataaacaaacaagtgaagatgacacaaagattccatattcgaatccttcagcacctgcagcagaaaacactcagctgcctagggatactgatctatcacctggacagcctttgcaacctggaatgccatcatctggtgttggtgttatcggccgaagaagtgtatctgatcttggtacaatcggagataaccttactggaacttctggtagttctggtcatgatcagaattattatctgcaaatgcttgaagctgcattccacaagcttccacagcccaaggactctgagcgtgctaaaacttacattccgcggcaccctgcagttacccctgctagctacccccaagttcaggcatcaattgtatcgaatcccaccttttgggaaagaattggtagcgacacattagctaccgacatgctgttctttgcgttctactaccaacagaacacatatcaacaatacttggctgctagagaactgaagaagcaatcatggagatttcaccggaggtacaatacctggttccagcggcatgtggagccacaggtcacgactgatgagtatgagcggggatcatatgtatactttgatttccatgtcactgaggatggctcaggatggtgccaaagaatcaagaatgacttcacatttgagtacaactacctggaggatgagctatcagtacaaacaaactaaagtgccatggcagtaggtctggtcaaacctttatgtccaatttgaattttgtagttctcataagagcttgttcggttgcttctggatcaaagaaggttggaggggattaaattccttctagtcaaaattgaatagaaattgatttaacccccctcaatctcctttatccagacgcaaccgaacaatgcctaaggtgactgactgactgttataatctggacccttgacaaaatctccagctgtaaactaatgtgtgaagttggatgcaccgaacatgctgaaattataatcgtgttatgccagccgaatctgtttgacgcagctgtacattgtcgttattatctggatgcgcctgaaaaatattttggatctttcttggcgcctacctgtttatttttagctaactcctggctggcgctttcgatctttctggttcgtttttttatcaaaaaaaa

SEQ ID NO: 48169 - DNA, 3142 bp, Zea Mays
ctctttcccccttgcccccttcccagtctccactctgagcactctcctccgctctgctcctttgctccccacggcaaaccgtaaaccctagcctgaggggcacccctgtcgcagccatgggcgccagccggaagctgcagggcgagatcgaccgcgtcctgaagaaggtccaggagggcgtcgatgtctttgacagcatctggaataaggtctacgacactgagaatgccaaccagaaggagaagttcgaggcggacctcaagaaggagatcaagaagctgcagcggtacagggaccagatcaagacgtggattcagtccagcgagatcaaggacaagaagcaggctctgatggatgctcgaaagcagattgaacgagagatggaacgatttaaagtatgtgagaaggaaacaaaaactaaggccttctcaaaagaagggttaggtcagcaaccaaaaacagatcccaaagaaaaggccaaagctgaaacaagagactggcttaataatgtggttagcgatttggaaagccagattgataacttcgaagcagagattgaagggctttcaattaaaaagggaaagcaaagaccgcctcgattggtacatttagagacgtctattacgagacataaagctcatataaagaaattggagtcaatcttgcggcttttggataatgatgagttgagtcctgagcaagtcaatgatgttaaagattttcttgatgactatgttgaacgtaatcaggaagactttgatgaattcagtgatgttgaggacctctatagcacattgcccatggagaaggttgaagcacttgaagacatggtttcacttgctccttctagtcttgtgaagggtgttgctcctgtttcgactactgcagttttgagcacaaagagttctgttgcaacttcacctactcagcctacagtatcaacagcttcttcacaaagtacatcacaggatcaaacagaggagacagcttcccaagaaagcaatcctgaacctacgccacaaacaccacctccaaaaggtggaaaccctggaccttcagtaccagctgtgcccattgttgtcagtactggtagtgcggctgtttctgtacctgcagaaacaattagttcccctgtgcgactaactgtacccgccacagcagccacagtgctttcttctgctattccacgaagtgctcctgagaatacacttgctgttacctcaattcctgcaaacttatctaccactttgaaggatgatgaaagcatgagtgttcctccacgacgaccatctcctgctactgaaattggaattggcaggggcataactcgaggaacaactagtcaggcattaggtacagctcccataactattggtccagtttcaggaaatggatcggttagtgcacttcctgcaataaatgacttgtccaaaataaatatattgaacactgacgagaagattaacagtgatggtctttctcagcagttggttatgcctcttggtagtaaagttcaaccccagcaggttcccaggactaatgatgcaatcggctctgattctgctaacacaaatgaaaaccctattcttggtggaagagtattttctcctccagttgtttctggggttcaatggagacctcaagctgctgctgcatttcaaaatcaaattgaaactaatcagtaccgtggaaggcctgagatttctgctgatcacagggagaagtacatacagagactgcagcaagtacagcagcaaggtggcagccttctgaatgtttcccatataactggcataaatcagaagcaatttccaacaccacagccaaatccccttctacaacagtttaattcacagagttcctctatatcttcccaagtgaatcttgggcttggagttcaaggatcagacgcggggcatataaaaagtgaagatcaacaaattttggctgaagatgttggtgtggaatcttccgcaacaacaggagcaaataaacaaacaagtgaagatgacacaaagattccatattcgaatccttcagcacctgcagcagaaaacactcagctgcctagggatactgatctatcacctggacagcctttgcaacctggaatgccatcatctggtgttggtgttatcggccgaagaagtgtatctgatcttggtacaatcggagataaccttactggaacttctggtagttctggtcatgatcagaattattatctgcaaatgcttgaagctgcattccacaagcttccacagcccaaggactctgagcgtgctaaaacttacattccgcggcaccctgcagttacccctgctagctacccccaagttcaggcatcaattgtatcgaatcccaccttttgggaaagaattggtagcgacacattagctaccgacatgctgttctttgcgttctactaccaacagaacacatatcaacaatacttggctgctagagaactgaagaagcaatcatggagatttcaccggaggtacaatacctggttccagcggcatgtggagccacaggtcacgactgatgagtatgagcggggatcatatgtatactttgatttccatgtcactgaggatggctcaggatggtgccaaagaatcaagaatgacttcacatttgagtacaactacctggaggatgagctatcagtacaaacaaactaaagtgccatggcagtaggtctggtcaaacctttatgtccaatttgaattttgtagttctcataagagcttgttcggttgcttctggatcaaagaaggttggaggggattaaattccttctagtcaaaattgaatagaaattgatttaacccccctcaatctcctttatccagacgcaaccgaacaatgcctaaggtgactgactgactgttataatctggacccttgacaaaatctccagctgtaaactaatgtgtgaagttggatgcaccgaacatgctgaaattataatcgtgttatgccagccgaatctgtttgacgcagctgtacattgtcgttattatctggatgcgcctgaaaaatattttggatctttcttggcgcctacctgtttatttttagctaactcctggctggcgctttcgatctttctggttcgtttttttatcaaaaaaaa

SEQ ID NO: 48170 - DNA, 3144 bp, Zea Mays
ctctttcccccttgcccccttcccagtctccactctgagcactctcctccgctctgctcctttgctccccacggcaaaccgtaaaccctagcctgaggggcacccctgtcgcagccatgggcgccagccggaagctgcagggcgagatcgaccgcgtcctgaagaaggtccaggagggcgtcgatgtctttgacagcatctggaataaggtctacgacactgagaatgccaaccagaaggagaagttcgaggcggacctcaagaaggagatcaagaagctgcagcggtacagggaccagatcaagacgtggattcagtccagcgagatcaaggacaagaaggttagtgcctcttatgagcaggctctgatggatgctcgaaagcagattgaacgagagatggaacgatttaaagtatgtgagaaggaaacaaaaactaaggccttctcaaaagaagggttaggtcagcaaccaaaaacagatcccaaagaaaaggccaaagctgaaacaagagactggcttaataatgtggttagcgatttggaaagccagattgataacttcgaagcagagattgaagggctttcaattaaaaagggaaagcaaagaccgcctcgattggtacatttagagacgtctattacgagacataaagctcatataaagaaattggagtcaatcttgcggcttttggataatgatgagttgagtcctgagcaagtcaatgatgttaaagattttcttgatgactatgttgaacgtaatcagactttgatgaattcagtgatgttgaggacctctatagcacattgcccatggagaaggttgaagcacttgaagacatggtttcacttgctccttctagtcttgtgaagggtgttgctcctgtttcgactactgcagttttgagcacaaagagttctgttgcaacttcacctactcagcctacagtatcaacagcttcttcacaaagtacatcacaggatcaaacagaggagacagcttcccaagaaagcaatcctgaacctacgccacaaacaccacctccaaaaggtggaaaccctggaccttcagtaccagctgtgcccattgttgtcagtactggtagtgcggctgtttctgtacctgcagaaacaattagttcccctgtgcgactaactgtacccgccacagcagccacagtgctttcttctgctattccacgaagtgctcctgagaatacacttgctgttacctcaattcctgcaaacttatctaccactttgaaggatgatgaaagcatgagtgttcctccacgacgaccatctcctgctactgaaattggaattggcaggggcataactcgaggaacaactagtcaggcattaggtacagctcccataactattggtccagtttcaggaaatggatcggttagtgcacttcctgcaataaatgacttgtccaaaataaatatattgaacactgacgagaagattaacagtgatggtctttctcagcagttggttatgcctcttggtagtaaagttcaaccccagcaggttcccaggactaatgatgcaatcggctctgattctgctaacacaaatgaaaaccctattcttggtggaagagtattttctcctccagttgtttctggggttcaatggagacctcaagctgctgctgcatttcaaaatcaaattgaaactaatcagtaccgtggaaggcctgagatttctgctgatcacagggagaagtacatacagagactgcagcaagtacagcagcaaggtggcagccttctgaatgtttcccatataactggcataaatcagaagcaatttccaacaccacagccaaatccccttctacaacagagttcctctatatcttcccaagtgaatcttgggcttggagttcaaggatcagacgcggggcatataaaaagtgaagatcaacaaattttggctgaagatgttggtgtggaatcttccgcaacaacaggagcaaataaacaaacaagtgaagatgacacaaagattccatattcgaatccttcagcacctgcagcagaaaacactcagctgcctagggatactgatctatcacctggacagcctttgcaacctggaatgccatcatctggtgttggtgttatcggccgaagaagtgtatctgatcttggtacaatcggagataaccttactggaacttctggtagttctggtcatgatcagaattattatctgcaaatgcttgaagctgcattccacaagcttccacagcccaaggactctgagcgtgctaaaacttacattccgcggcaccctgcagttacccctgctagctacccccaagttcaggcatcaattgtatcgaatcccaccttttgggaaagaattggtagcgacacattagctaccgacatgctgttctttgcgttctactaccaacagaacacatatcaacaatacttggctgctagagaactgaagaagcaatcatggagatttcaccggaggtacaatacctggttccagcggcatgtggagccacaggtcacgactgatgagtatgagcggggatcatatgtatactttgatttccatgtcactgaggatggctcaggatggtgccaaagaatcaagaatgacttcacatttgagtacaactacctggaggatgagctatcagtacaaacaaactaaagtgccatggcagtaggtctggtcaaacctttatgtccaatttgaattttgtagttctcataagagcttgttcggttgcttctggatcaaagaaggttggaggggattaaattccttctagtcaaaattgaatagaaattgatttaacccccctcaatctcctttatccagacgcaaccgaacaatgcctaaggtgactgactgactgttataatctggacccttgacaaaatctccagctgtaaactaatgtgtgaagttggatgcaccgaacatgctgaaattataatcgtgttatgccagccgaatctgtttgacgcagctgtacattgtcgttattatctggatgcgcctgaaaaatattttggatctttcttggcgcctacctgtttatttttagctaactcctggctggcgctttcgatctttctggttcgtttttttatcaaaaaaaa

SEQ ID NO: 48171 - DNA, 1833 bp, Zea Mays
cccttgcccccttcccagtctccactctgagcactctcctccgctctgctcctttgctccccacggcaaaccgtaaaccctagcctgaggggcacccctgtcgcagccatgggcgccagccggaagctgcagggcgagatcgaccgcgtcctgaagaaggtccaggagggcgtcgatgtctttgacagcatctggaataaggtctacgacactgagaatgccaaccagaaggagaagttcgaggcggacctcaagaaggagatcaagaagctgcagcggtacagggaccagatcaagacgtggattcagtccagcgagatcaaggacaagaaggctctgatggatgctcgaaagcagattgaacgagagatggaacgatttaaagtatgtgagaaggaaacaaaaactaaggccttctcaaaagaagggttaggtcagcaaccaaaaacagatcccaaagaaaaggccaaagctgaaacaagagactggcttaataatgtggttagcgatttggaaagccagattgataacttcgaagcagagattgaagggctttcaattaaaaagggaaagcaaagaccgcctcgattggtacatttagagacgtctattacgagacataaagctcatataaagaaattggagtcaatcttgcggcttttggataatgatgagttgagtcctgagcaagtcaatgatgttaaagattttcttgatgactatgttgaacgtaatcagactttgatgaattcagtgatgttgaggacctctatagcacattgcccatggagaaggttgaagcacttgaagacatggtttcacttgctccttctagtcttgtgaagggtgttgctcctgtttcgactactgcagttttgagcacaaagagttctgttgcaacttcacctactcagcctacagtatcaacagcttcttcacaaagtacatcacaggatcaaacagaggagacagcttcccaagaaagcaatcctgaacctacgccacaaacaccacctccaaaaggtggaaaccctggaccttcagtaccagctgtgcccattgttgtcagtactggtagtgcggctgtttctgtacctgcagaaacaattagttcccctgtgcgactaactgtacccgccacagcagccacagtgctttcttctgctattccacgaagtgctcctgagaatacacttgctgttacctcaattcctgcaaacttatctaccactttgaaggatgatgaaagcatgagtgttcctccacgacgaccatctcctgctactgaaattggaattggcaggggcataactcgaggaacaactagtcaggcattaggtacagctcccataactattggtccagtttcaggaaatggatcgttggttatgcctcttggtagtaaagttcaaccccagcaggttcccaggactaatgatgcaatcggctctgattctgctaacacaaatgaaaaccctattcttggtggaagagtattttctcctccagttgtttctggggttcaatggagacctcaagctgctgctgcatttcaaaatcaaattgaaactaatcagtaccgtggaaggcctgagatttctgctgatcacagggagaagtacatacagagactgcagcaagtacagcagcaaggtggcagccttctgaatgtttcccatataactggcataaatcagaagcaatttccaacaccacagccaaatccccttctacaacagtttaagtcttctatatcttaatgttatgggcagccaactgggctccttcagctagtttggcactgtagacccctcctttaaggttagggttcgt

SEQ ID NO: 48172 - DNA, 3217 bp, Zea Mays
ccttgcccccttcccagtctccactctgagcactctcctccgctctgctcctttgctccccacggcaaaccgtaaaccctagcctgaggggcacccctgtcgcagccatgggcgccagccggaagctgcagggcgagatcgaccgcgtcctgaagaaggtccaggagggcgtcgatgtctttgacagcatctggaataaggtctacgacactgagaatgccaaccagaaggagaagttcgaggcggacctcaagaaggagatcaagaagctgcagcggtacagggaccagatcaagacgtggattcagtccagcgagatcaaggacaagaagattatgatagtaggcttctcatttacatatctctttgtgattgtcaaagattatggccagattgaggttagtgcctcttatgagcaggctctgatggatgctcgaaagcagattgaacgagagatggaacgatttaaagtatgtgagaaggaaacaaaaactaaggccttctcaaaagaagggttaggtcagcaaccaaaaacagatcccaaagaaaaggccaaagctgaaacaagagactggcttaataatgtggttagcgatttggaaagccagattgataacttcgaagcagagattgaagggctttcaattaaaaagggaaagcaaagaccgcctcgattggtacatttagagacgtctattacgagacataaagctcatataaagaaattggagtcaatcttgcggcttttggataatgatgagttgagtcctgagcaagtcaatgatgttaaagattttcttgatgactatgttgaacgtaatcaggaagactttgatgaattcagtgatgttgaggacctctatagcacattgcccatggagaaggttgaagcacttgaagacatggtttcacttgctccttctagtcttgtgaagggtgttgctcctgtttcgactactgcagttttgagcacaaagagttctgttgcaacttcacctactcagcctacagtatcaacagcttcttcacaaagtacatcacaggatcaaacagaggagacagcttcccaagaaagcaatcctgaacctacgccacaaacaccacctccaaaaggtggaaaccctggaccttcagtaccagctgtgcccattgttgtcagtactggtagtgcggctgtttctgtacctgcagaaacaattagttcccctgtgcgactaactgtacccgccacagcagccacagtgctttcttctgctattccacgaagtgctcctgagaatacacttgctgttacctcaattcctgcaaacttatctaccactttgaaggatgatgaaagcatgagtgttcctccacgacgaccatctcctgctactgaaattggaattggcaggggcataactcgaggaacaactagtcaggcattaggtacagctcccataactattggtccagtttcaggaaatggatcggttagtgcacttcctgcaataaatgacttgtccaaaataaatatattgaacactgacgagaagattaacagtgatggtctttctcagcagttggttatgcctcttggtagtaaagttcaaccccagcaggttcccaggactaatgatgcaatcggctctgattctgctaacacaaatgaaaaccctattcttggtggaagagtattttctcctccagttgtttctggggttcaatggagacctcaagctgctgctgcatttcaaaatcaaattgaaactaatcagtaccgtggaaggcctgagatttctgctgatcacagggagaagtacatacagagactgcagcaagtacagcagcaaggtggcagccttctgaatgtttcccatataactggcataaatcagaagcaatttccaacaccacagccaaatccccttctacaacagtttaattcacagagttcctctatatcttcccaagtgaatcttgggcttggagttcaaggatcagacgcggggcatataaaaagtgaagatcaacaaattttggctgaagatgttggtgtggaatcttccgcaacaacaggagcaaataaacaaacaagtgaagatgacacaaagattccatattcgaatccttcagcacctgcagcagaaaacactcagctgcctagggatactgatctatcacctggacagcctttgcaacctggaatgccatcatctggtgttggtgttatcggccgaagaagtgtatctgatcttggtacaatcggagataaccttactggaacttctggtagttctggtcatgatcagaattattatctgcaaatgcttgaagctgcattccacaagcttccacagcccaaggactctgagcgtgctaaaacttacattccgcggcaccctgcagttacccctgctagctacccccaagttcaggcatcaattgtatcgaatcccaccttttgggaaagaattggtagcgacacattagctaccgacatgctgttctttgcgttctactaccaacagaacacatatcaacaatacttggctgctagagaactgaagaagcaatcatggagatttcaccggaggtacaatacctggttccagcggcatgtggagccacaggtcacgactgatgagtatgagcggggatcatatgtatactttgatttccatgtcactgaggatggctcaggatggtgccaaagaatcaagaatgacttcacatttgagtacaactacctggaggatgagctatcagtacaaacaaactaaagtgccatggcagtaggtctggtcaaacctttatgtccaatttgaattttgtagttctcataagagcttgttcggttgcttctggatcaaagaaggttggaggggattaaattccttctagtcaaaattgaatagaaattgatttaacccccctcaatctcctttatccagacgcaaccgaacaatgcctaaggtgactgactgactgttataatctggacccttgacaaaatctccagctgtaaactaatgtgtgaagttggatgcaccgaacatgctgaaattataatcgtgttatgccagccgaatctgtttgacgcagctgtacattgtcgttattatctggatgcgcctgaaaaatattttggatctttcttggcgcctacctgtttatttttagctaactcctggctggcgctttcgatctttctggttcgtttttttatcaaaaaaaa

SEQ ID NO: 48173 - DNA, 1900 bp, Zea Mays
ccccttcccagtctccactctgagcactctcctccgctctgctcctttgctccccacggcaaaccgtaaaccctagcctgaggggcacccctgtcgcagccatgggcgccagccggaagctgcagggcgagatcgaccgcgtcctgaagaaggtctacgacactgagaatgccaaccagaaggagaagttcgaggcggacctcaagaaggagatcaagaagctgcagcggtacagggaccagatcaagacgtggattcagtccagcgagatcaaggacaagaaggttagtgcctcttatgagcaggctctgatggatgctcgaaagcagattgaacgagagatggaacgatttaaagtatgtgagaaggaaacaaaaactaaggccttctcaaaagaagggttaggtcagcaaccaaaaacagatcccaaagaaaaggccaaagctgaaacaagagactggcttaataatgtggttagcgatttggaaagccagattgataacttcgaagcagagattgaagggctttcaattaaaaagggaaagcaaagaccgcctcgattggtacatttagagacgtctattacgagacataaagctcatataaagaaattggagtcaatcttgcggcttttggataatgatgagttgagtcctgagcaagtcaatgatgttaaagattttcttgatgactatgttgaacgtaatcaggaagactttgatgaattcagtgatgttgaggacctctatagcacattgcccatggagaaggttgaagcacttgaagacatggtttcacttgctccttctagtcttgtgaagggtgttgctcctgtttcgactactgcagttttgagcacaaagagttctgttgcaacttcacctactcagcctacagtatcaacagcttcttcacaaagtacatcacaggatcaaacagaggagacagcttcccaagaaagcaatcctgaacctacgccacaaacaccacctccaaaaggtggaaaccctggaccttcagtaccagctgtgcccattgttgtcagtactggtagtgcggctgtttctgtacctgcagaaacaattagttcccctgtgcgactaactgtacccgccacagcagccacagtgctttcttctgctattccacgaagtgctcctgagaatacacttgctgttacctcaattcctgcaaacttatctaccactttgaaggatgatgaaagcatgagtgttcctccacgacgaccatctcctgctactgaaattggaattggcaggggcataactcgaggaacaactagtcaggcattaggtacagctcccataactattggtccagtttcaggaaatggatcggttagtgcacttcctgcaataaatgacttgtccaaaataaatatattgaacactgacgagaagattaacagtgatggtctttctcagcagttggttatgcctcttggtagtaaagttcaaccccagcaggttcccaggactaatgatgcaatcggctctgattctgctaacacaaatgaaaaccctattcttggtggaagagtattttctcctccagttgtttctggggttcaatggagacctcaagctgctgctgcatttcaaaatcaaattgaaactaatcagtaccgtggaaggcctgagatttctgctgatcacagggagaagtacatacagagactgcagcaagtacagcagcaaggtggcagccttctgaatgtttcccatataactggcataaatcagaagcaatttccaacaccacagccaaatccccttctacaacagctttaagtcttctatatcttaatgttatgggcagccaactgggctccttcagctagtttggcactgtagacccctcctttaaggttagggttcgt

SEQ ID NO: 48174 - DNA, 3013 bp, Zea Mays
ccccttcccagtctccactctgagcactctcctccgctctgctcctttgctccccacggcaaaccgtaaaccctagcctgaggggcacccctgtcgcagccatgggcgccagccggaagctgcagggcgagatcgaccgcgtcctgaagaaggtctacgacactgagaatgccaaccagaaggagaagttcgaggcggacctcaagaaggagatcaagaagctgcagcggtacagggaccagatcaagacgtggattcagtccagcgagatcaaggacaagaaggttagtgcctcttatgagcaggctctgatggatgctcgaaagcagattgaacgagagatggaacgatttaaagtatgtgagaaggaaacaaaaactaaggccttctcaaaagaagggttaggtcagcaaccaaaaacagatcccaaagaaaaggccaaagctgaaacaagagactggcttaataatgtggttagcgatttggaaagccagattgataacttcgaagcagagattgaagggctttcaattaaaaagggaaagcaaagaccgcctcgattggtacatttagagacgtctattacgagacataaagctcatataaagaaattggagtcaatcttgcggcttttggataatgatgagttgagtcctgagcaagtcaatgatgttaaagattttcttgatgactatgttgaacgtaatcaggaagactttgatgaattcagtgatgttgaggacctctatagcacattgcccatggagaaggttgaagcacttgaagacatggtttcacttgctccttctagtcttgtgaagggtgttgctcctgtttcgactactgcagttttgagcacaaagagttctgttgcaacttcacctactcagcctacagtatcaacagcttcttcacaaagtacatcacaggatcaaacagaggagacagcttcccaagaaagcaatcctgaacctacgccacaaacaccacctccaaaaggtggaaaccctggaccttcagtaccagctgtgcccattgttgtcagtactggtagtgcggctgtttctgtacctgcagaaacaattagttcccctgtgcgactaactgtacccgccacagcagccacagtgctttcttctgctattccacgaagtgctcctgagaatacacttgctgttacctcaattcctgcaaacttatctaccactttgaaggatgatgaaagcatgagtgttcctccacgacgaccatctcctgctactgaaattggaattggcaggggcataactcgaggaacaactagtcaggcattaggtacagctcccataactattggtccagtttcaggaaatggatcgttggttatgcctcttggtagtaaagttcaaccccagcaggttcccaggactaatgatgcaatcggctctgattctgctaacacaaatgaaaaccctattcttggtggaagagtattttctcctccagttgtttctggggttcaatggagacctcaagctgctgctgcatttcaaaatcaaattgaaactaatcagtaccgtggaaggcctgagatttctgctgatcacagggagaagtacatacagagactgcagcaagtacagcagcaaggtggcagccttctgaatgtttcccatataactggcataaatcagaagcaatttccaacaccacagccaaatccccttctacaacagtttaattcacagagttcctctatatcttcccaagtgaatcttgggcttggagttcaaggatcagacgcggggcatataaaaagtgaagatcaacaaattttggctgaagatgttggtgtggaatcttccgcaacaacaggagcaaataaacaaacaagtgaagatgacacaaagattccatattcgaatccttcagcacctgcagcagaaaacactcagctgcctagggatactgatctatcacctggacagcctttgcaacctggaatgccatcatctggtgttggtgttatcggccgaagaagtgtatctgatcttggtacaatcggagataaccttactggaacttctggtagttctggtcatgatcagaattattatctgcaaatgcttgaagctgcattccacaagcttccacagcccaaggactctgagcgtgctaaaacttacattccgcggcaccctgcagttacccctgctagctacccccaagttcaggcatcaattgtatcgaatcccaccttttgggaaagaattggtagcgacacattagctaccgacatgctgttctttgcgttctactaccaacagaacacatatcaacaatacttggctgctagagaactgaagaagcaatcatggagatttcaccggaggtacaatacctggttccagcggcatgtggagccacaggtcacgactgatgagtatgagcggggatcatatgtatactttgatttccatgtcactgaggatggctcaggatggtgccaaagaatcaagaatgacttcacatttgagtacaactacctggaggatgagctatcagtacaaacaaactaaagtgccatggcagtaggtctggtcaaacctttatgtccaatttgaattttgtagttctcataagagcttgttcggttgcttctggatcaaagaaggttggaggggattaaattccttctagtcaaaattgaatagaaattgatttaacccccctcaatctcctttatccagacgcaaccgaacaatgcctaaggtgactgactgactgttataatctggacccttgacaaaatctccagctgtaaactaatgtgtgaagttggatgcaccgaacatgctgaaattataatcgtgttatgccagccgaatctgtttgacgcagctgtacattgtcgttattatctggatgcgcctgaaaaatattttggatctttcttggcgcctacctgtttatttttagctaactcctggctggcgctttcgatctttctggttcgtttttttatcaaaaaaaa

SEQ ID NO: 48175 - DNA, 3091 bp, Zea Mays
ccccttcccagtctccactctgagcactctcctccgctctgctcctttgctccccacggcaaaccgtaaaccctagcctgaggggcacccctgtcgcagccatgggcgccagccggaagctgcagggcgagatcgaccgcgtcctgaagaaggtctacgacactgagaatgccaaccagaaggagaagttcgaggcggacctcaagaaggagatcaagaagctgcagcggtacagggaccagatcaagacgtggattcagtccagcgagatcaaggacaagaaggttagtgcctcttatgagcaggctctgatggatgctcgaaagcagattgaacgagagatggaacgatttaaagtatgtgagaaggaaacaaaaactaaggccttctcaaaagaagggttaggtcagcaaccaaaaacagatcccaaagaaaaggccaaagctgaaacaagagactggcttaataatgtggttagcgatttggaaagccagattgataacttcgaagcagagattgaagggctttcaattaaaaagggaaagcaaagaccgcctcgattggtacatttagagacgtctattacgagacataaagctcatataaagaaattggagtcaatcttgcggcttttggataatgatgagttgagtcctgagcaagtcaatgatgttaaagattttcttgatgactatgttgaacgtaatcaggaagactttgatgaattcagtgatgttgaggacctctatagcacattgcccatggagaaggttgaagcacttgaagacatggtttcacttgctccttctagtcttgtgaagggtgttgctcctgtttcgactactgcagttttgagcacaaagagttctgttgcaacttcacctactcagcctacagtatcaacagcttcttcacaaagtacatcacaggatcaaacagaggagacagcttcccaagaaagcaatcctgaacctacgccacaaacaccacctccaaaaggtggaaaccctggaccttcagtaccagctgtgcccattgttgtcagtactggtagtgcggctgtttctgtacctgcagaaacaattagttcccctgtgcgactaactgtacccgccacagcagccacagtgctttcttctgctattccacgaagtgctcctgagaatacacttgctgttacctcaattcctgcaaacttatctaccactttgaaggatgatgaaagcatgagtgttcctccacgacgaccatctcctgctactgaaattggaattggcaggggcataactcgaggaacaactagtcaggcattaggtacagctcccataactattggtccagtttcaggaaatggatcggttagtgcacttcctgcaataaatgacttgtccaaaataaatatattgaacactgacgagaagattaacagtgatggtctttctcagcagttggttatgcctcttggtagtaaagttcaaccccagcaggttcccaggactaatgatgcaatcggctctgattctgctaacacaaatgaaaaccctattcttggtggaagagtattttctcctccagttgtttctggggttcaatggagacctcaagctgctgctgcatttcaaaatcaaattgaaactaatcagtaccgtggaaggcctgagatttctgctgatcacagggagaagtacatacagagactgcagcaagtacagcagcaaggtggcagccttctgaatgtttcccatataactggcataaatcagaagcaatttccaacaccacagccaaatccccttctacaacagagttcctctatatcttcccaagtgaatcttgggcttggagttcaaggatcagacgcggggcatataaaaagtgaagatcaacaaattttggctgaagatgttggtgtggaatcttccgcaacaacaggagcaaataaacaaacaagtgaagatgacacaaagattccatattcgaatccttcagcacctgcagcagaaaacactcagctgcctagggatactgatctatcacctggacagcctttgcaacctggaatgccatcatctggtgttggtgttatcggccgaagaagtgtatctgatcttggtacaatcggagataaccttactggaacttctggtagttctggtcatgatcagaattattatctgcaaatgcttgaagctgcattccacaagcttccacagcccaaggactctgagcgtgctaaaacttacattccgcggcaccctgcagttacccctgctagctacccccaagttcaggcatcaattgtatcgaatcccaccttttgggaaagaattggtagcgacacattagctaccgacatgctgttctttgcgttctactaccaacagaacacatatcaacaatacttggctgctagagaactgaagaagcaatcatggagatttcaccggaggtacaatacctggttccagcggcatgtggagccacaggtcacgactgatgagtatgagcggggatcatatgtatactttgatttccatgtcactgaggatggctcaggatggtgccaaagaatcaagaatgacttcacatttgagtacaactacctggaggatgagctatcagtacaaacaaactaaagtgccatggcagtaggtctggtcaaacctttatgtccaatttgaattttgtagttctcataagagcttgttcggttgcttctggatcaaagaaggttggaggggattaaattccttctagtcaaaattgaatagaaattgatttaacccccctcaatctcctttatccagacgcaaccgaacaatgcctaaggtgactgactgactgttataatctggacccttgacaaaatctccagctgtaaactaatgtgtgaagttggatgcaccgaacatgctgaaattataatcgtgttatgccagccgaatctgtttgacgcagctgtacattgtcgttattatctggatgcgcctgaaaaatattttggatctttcttggcgcctacctgtttatttttagctaactcctggctggcgctttcgatctttctggttcgtttttttatcaaaaaaaa

SEQ ID NO: 48176 - DNA, 3007 bp, Zea Mays
ccagtctccactctgagcactctcctccgctctgctcctttgctccccacggcaaaccgtaaaccctagcctgaggggcacccctgtcgcagccatgggcgccagccggaagctgcagggcgagatcgaccgcgtcctgaagaaggtccaggagggcgtcgatgtctttgacagcatctggaataaggtctacgacactgagaatgccaaccagaaggagaagttcgaggcggacctcaagaaggagatcaagaagctgcagcggtacagggaccagatcaagacgtggattcagtccagcgagatcaaggacaagaaggttagtgcctcttatgagcaggctctgatggatgctcgaaagcagattgaacgagagatggaacgatttaaagtatgtgagaaggaaacaaaaactaaggccttctcaaaagaagggttaggtcagcaaccaaaaacagatcccaaagaaaaggccaaagctgaaacaagagactggcttaataatgtggttagcgatttggaaagccagattgataacttcgaagcagagattgaagggctttcaattaaaaagggaaagcaaagaccgcctcgattggtacatttagagacgtctattacgagacataaagctcatataaagaaattggagtcaatcttgcggcttttggataatgatgagttgagtcctgagcaagtcaatgatgttaaagattttcttgatgactatgttgaacgtaatcaggaagactttgatgaattcagtgatgttgaggacctctatagcacattgcccatggagaaggttgaagcacttgaagacatggtttcacttgctccttctagtcttgtgaagggtgttgctcctgtttcgactactgcagttttgagcacaaagagttctgttgcaacttcacctactcagcctacagtatcaacagcttcttcacaaagtacatcacaggatcaaacagaggagacagcttcccaagaaagcaatcctgaacctacgccacaaacaccacctccaaaaggtggaaaccctggaccttcagtaccagctgtgcccattgttgtcagtactggtagtgcggctgtttctgtacctgcagaaacaattagttcccctgtgcgactaactgtacccgccacagcagccacagtgctttcttctgctattccacgaagtgctcctgagaatacacttgctgttacctcaattcctgcaaacttatctaccactttgaaggatgatgaaagcatgagtgttcctccacgacgaccatctcctgctactgaaattggaattggcaggggcataactcgaggaacaactagtcaggcattaggtacagctcccataactattggtccagtttcaggaaatggatcgttggttatgcctcttggtagtaaagttcaaccccagcaggttcccaggactaatgatgcaatcggctctgattctgctaacacaaatgaaaaccctattcttggtggaagagtattttctcctccagttgtttctggggttcaatggagacctcaagctgctgctgcatttcaaaatcaaattgaaactggagaagtacatacagagactgcagcaagtacagcagcaaggtggcagccttctgaatgtttcccatataactggcataaatcagaagcaatttccaacaccacagccaaatccccttctacaacagtttaattcacagagttcctctatatcttcccaagtgaatcttgggcttggagttcaaggatcagacgcggggcatataaaaagtgaagatcaacaaattttggctgaagatgttggtgtggaatcttccgcaacaacaggagcaaataaacaaacaagtgaagatgacacaaagattccatattcgaatccttcagcacctgcagcagaaaacactcagctgcctagggatactgatctatcacctggacagcctttgcaacctggaatgccatcatctggtgttggtgttatcggccgaagaagtgtatctgatcttggtacaatcggagataaccttactggaacttctggtagttctggtcatgatcagaattattatctgcaaatgcttgaagctgcattccacaagcttccacagcccaaggactctgagcgtgctaaaacttacattccgcggcaccctgcagttacccctgctagctacccccaagttcaggcatcaattgtatcgaatcccaccttttgggaaagaattggtagcgacacattagctaccgacatgctgttctttgcgttctactaccaacagaacacatatcaacaatacttggctgctagagaactgaagaagcaatcatggagatttcaccggaggtacaatacctggttccagcggcatgtggagccacaggtcacgactgatgagtatgagcggggatcatatgtatactttgatttccatgtcactgaggatggctcaggatggtgccaaagaatcaagaatgacttcacatttgagtacaactacctggaggatgagctatcagtacaaacaaactaaagtgccatggcagtaggtctggtcaaacctttatgtccaatttgaattttgtagttctcataagagcttgttcggttgcttctggatcaaagaaggttggaggggattaaattccttctagtcaaaattgaatagaaattgatttaacccccctcaatctcctttatccagacgcaaccgaacaatgcctaaggtgactgactgactgttataatctggacccttgacaaaatctccagctgtaaactaatgtgtgaagttggatgcaccgaacatgctgaaattataatcgtgttatgccagccgaatctgtttgacgcagctgtacattgtcgttattatctggatgcgcctgaaaaatattttggatctttcttggcgcctacctgtttatttttagctaactcctggctggcgctttcgatctttctggttcgtttttttatcaaaaaaaa

SEQ ID NO: 48177 - DNA, 3023 bp, Zea Mays
ccagtctccactctgagcactctcctccgctctgctcctttgctccccacggcaaaccgtaaaccctagcctgaggggcacccctgtcgcagccatgggcgccagccggaagctgcagggcgagatcgaccgcgtcctgaagaaggtccaggagggcgtcgatgtctttgacagcatctggaataaggtctacgacactgagaatgccaaccagaaggagaagttcgaggcggacctcaagaaggagatcaagaagctgcagcggtacagggaccagatcaagacgtggattcagtccagcgagatcaaggacaagaaggctctgatggatgctcgaaagcagattgaacgagagatggaacgatttaaagtatgtgagaaggaaacaaaaactaaggccttctcaaaagaagggttaggtcagcaaccaaaaacagatcccaaagaaaaggccaaagctgaaacaagagactggcttaataatgtggttagcgatttggaaagccagattgataacttcgaagcagagattgaagggctttcaattaaaaagggaaagcaaagaccgcctcgattggtacatttagagacgtctattacgagacataaagctcatataaagaaattggagtcaatcttgcggcttttggataatgatgagttgagtcctgagcaagtcaatgatgttaaagattttcttgatgactatgttgaacgtaatcagactttgatgaattcagtgatgttgaggacctctatagcacattgcccatggagaaggttgaagcacttgaagacatggtttcacttgctccttctagtcttgtgaagggtgttgctcctgtttcgactactgcagttttgagcacaaagagttctgttgcaacttcacctactcagcctacagtatcaacagcttcttcacaaagtacatcacaggatcaaacagaggagacagcttcccaagaaagcaatcctgaacctacgccacaaacaccacctccaaaaggtggaaaccctggaccttcagtaccagctgtgcccattgttgtcagtactggtagtgcggctgtttctgtacctgcagaaacaattagttcccctgtgcgactaactgtacccgccacagcagccacagtgctttcttctgctattccacgaagtgctcctgagaatacacttgctgttacctcaattcctgcaaacttatctaccactttgaaggatgatgaaagcatgagtgttcctccacgacgaccatctcctgctactgaaattggaattggcaggggcataactcgaggaacaactagtcaggcattaggtacagctcccataactattggtccagtttcaggaaatggatcgttggttatgcctcttggtagtaaagttcaaccccagcaggttcccaggactaatgatgcaatcggctctgattctgctaacacaaatgaaaaccctattcttggtggaagagtattttctcctccagttgtttctggggttcaatggagacctcaagctgctgctgcatttcaaaatcaaattgaaactaatcagtaccgtggaaggcctgagatttctgctgatcacagggagaagtacatacagagactgcagcaagtacagcagcaaggtggcagccttctgaatgtttcccatataactggcataaatcagaagcaatttccaacaccacagccaaatccccttctacaacagtttaattcacagagttcctctatatcttcccaagtgaatcttgggcttggagttcaaggatcagacgcggggcatataaaaagtgaagatcaacaaattttggctgaagatgttggtgtggaatcttccgcaacaacaggagcaaataaacaaacaagtgaagatgacacaaagattccatattcgaatccttcagcacctgcagcagaaaacactcagctgcctagggatactgatctatcacctggacagcctttgcaacctggaatgccatcatctggtgttggtgttatcggccgaagaagtgtatctgatcttggtacaatcggagataaccttactggaacttctggtagttctggtcatgatcagaattattatctgcaaatgcttgaagctgcattccacaagcttccacagcccaaggactctgagcgtgctaaaacttacattccgcggcaccctgcagttacccctgctagctacccccaagttcaggcatcaattgtatcgaatcccaccttttgggaaagaattggtagcgacacattagctaccgacatgctgttctttgcgttctactaccaacagaacacatatcaacaatacttggctgctagagaactgaagaagcaatcatggagatttcaccggaggtacaatacctggttccagcggcatgtggagccacaggtcacgactgatgagtatgagcggggatcatatgtatactttgatttccatgtcactgaggatggctcaggatggtgccaaagaatcaagaatgacttcacatttgagtacaactacctggaggatgagctatcagtacaaacaaactaaagtgccatggcagtaggtctggtcaaacctttatgtccaatttgaattttgtagttctcataagagcttgttcggttgcttctggatcaaagaaggttggaggggattaaattccttctagtcaaaattgaatagaaattgatttaacccccctcaatctcctttatccagacgcaaccgaacaatgcctaaggtgactgactgactgttataatctggacccttgacaaaatctccagctgtaaactaatgtgtgaagttggatgcaccgaacatgctgaaattataatcgtgttatgccagccgaatctgtttgacgcagctgtacattgtcgttattatctggatgcgcctgaaaaatattttggatctttcttggcgcctacctgtttatttttagctaactcctggctggcgctttcgatctttctggttcgtttttttatcaaaaaaaa

SEQ ID NO: 48178 - DNA, 2777 bp, Zea Mays
gcactctcctccgctctgctcctttgctccccacggcaaaccgtaaaccctagcctgaggggcacccctgtcgcagccatgggcgccagccggaagctgcagggcgagatcgaccgcgtcctgaagaaggtctacgacactgagaatgccaaccagaaggagaagttcgaggcggacctcaagaaggagatcaagaagctgcagcggtacagggaccagatcaagacgtggattcagtccagcgagatcaaggacaagaaggctctgatggatgctcgaaagcagattgaacgagagatggaacgatttaaagtatgtgagaaggaaacaaaaactaaggccttctcaaaagaagggttaggtcagcaaccaaaaacagatcccaaagaaaaggccaaagctgaaacaagagactggcttaataatgtggttagcgatttggaaagccagattgataacttcgaagcagagattgaagggctttcaattaaaaagggaaagcaaagaccgcctcgattggtacatttagagacgtctattacgagacataaagctcatataaagaaattggagtcaatcttgcggcttttggataatgatgagttgagtcctgagcaagtcaatgatgttaaagattttcttgatgactatgttgaacgtaatcaggaagactttgatgaattcagtgatgttgaggacctctatagcacattgcccatggagaaggttgaagcacttgaagacatggtttcacttgctccttctagtcttgtgaagggtgttgctcctgtttcgactactgcagttttgagcacaaagagttctgttgcaacttcacctactcagcctacagtatcaacagcttcttcacaaagtacatcacaggatcaaacagaggagacagcttcccaagaaagcaatcctgaacctacgccacaaacaccacctccaaaaggtggaaaccctggaccttcagtaccagctgtgcccattgttgtcagtactggtagtgcggctgtttctgtacctgcagaaacaattagttcccctgtgcgactaactgtacccgccacagcagccacagtgctttcttctgctattccacgaagtgctcctgagaatacacttgctgttacctcaattcctgcaaacttatctaccactttgaaggatgatgaaagcatgagtgttcctccacgacgaccatctcctgctactgaaattggaattggcaggggcataactcgaggaacaactagtcaggcattaggtacagctcccataactattggtccagtttcaggaaatggatcggttagtgcacttcctgcaataaatgacttgtccaaaataaatatattgaacactgacgagaagattaacagtgatggtctttctcagcagttggttatgcctcttggtagtaaagttcaaccccagcaggttcccaggactaatgatgcaatcggctctgattctgctaacacaaatgaaaaccctattcttggtggaagagtattttctcctccagttgtttctggggttcaatggagacctcaagctgctgctgcatttcaaaatcaaattgaaactaatcagtaccgtggaaggcctgagatttctgctgatcacagggagaagtacatacagagactgcagcaagtacagcagcaaggtggcagccttctgaatgtttcccatataactggcataaatcagaagcaatttccaacaccacagccaaatccccttctacaacagagttcctctatatcttcccaagtgaatcttgggcttggagttcaaggatcagacgcggggcatataaaaagtgaagatcaacaaattttggctgaagatgttggtgtggaatcttccgcaacaacaggagcaaataaacaaacaagtgaagatgacacaaagattccatattcgcggcaccctgcagttacccctgctagctacccccaagttcaggcatcaattgtatcgaatcccaccttttgggaaagaattggtagcgacacattagctaccgacatgctgttctttgcgttctactaccaacagaacacatatcaacaatacttggctgctagagaactgaagaagcaatcatggagatttcaccggaggtacaatacctggttccagcggcatgtggagccacaggtcacgactgatgagtatgagcggggatcatatgtatactttgatttccatgtcactgaggatggctcaggatggtgccaaagaatcaagaatgacttcacatttgagtacaactacctggaggatgagctatcagtacaaacaaactaaagtgccatggcagtaggtctggtcaaacctttatgtccaatttgaattttgtagttctcataagagcttgttcggttgcttctggatcaaagaaggttggaggggattaaattccttctagtcaaaattgaatagaaattgatttaacccccctcaatctcctttatccagacgcaaccgaacaatgcctaaggtgactgactgactgttataatctggacccttgacaaaatctccagctgtaaactaatgtgtgaagttggatgcaccgaacatgctgaaattataatcgtgttatgccagccgaatctgtttgacgcagctgtacattgtcgttattatctggatgcgcctgaaaaatattttggatctttcttggcgcctacctgtttatttttagctaactcctggctggcgctttcgatctttctggttcgtttttttatcaaaaaaaa

SEQ ID NO: 48179 - DNA, 3043 bp, Zea Mays
gcactctcctccgctctgctcctttgctccccacggcaaaccgtaaaccctagcctgaggggcacccctgtcgcagccatgggcgccagccggaagctgcagggcgagatcgaccgcgtcctgaagaaggtctacgacactgagaatgccaaccagaaggagaagttcgaggcggacctcaagaaggagatcaagaagctgcagcggtacagggaccagatcaagacgtggattcagtccagcgagatcaaggacaagaaggctctgatggatgctcgaaagcagattgaacgagagatggaacgatttaaagtatgtgagaaggaaacaaaaactaaggccttctcaaaagaagggttaggtcagcaaccaaaaacagatcccaaagaaaaggccaaagctgaaacaagagactggcttaataatgtggttagcgatttggaaagccagattgataacttcgaagcagagattgaagggctttcaattaaaaagggaaagcaaagaccgcctcgattggtacatttagagacgtctattacgagacataaagctcatataaagaaattggagtcaatcttgcggcttttggataatgatgagttgagtcctgagcaagtcaatgatgttaaagattttcttgatgactatgttgaacgtaatcagactttgatgaattcagtgatgttgaggacctctatagcacattgcccatggagaaggttgaagcacttgaagacatggtttcacttgctccttctagtcttgtgaagggtgttgctcctgtttcgactactgcagttttgagcacaaagagttctgttgcaacttcacctactcagcctacagtatcaacagcttcttcacaaagtacatcacaggatcaaacagaggagacagcttcccaagaaagcaatcctgaacctacgccacaaacaccacctccaaaaggtggaaaccctggaccttcagtaccagctgtgcccattgttgtcagtactggtagtgcggctgtttctgtacctgcagaaacaattagttcccctgtgcgactaactgtacccgccacagcagccacagtgctttcttctgctattccacgaagtgctcctgagaatacacttgctgttacctcaattcctgcaaacttatctaccactttgaaggatgatgaaagcatgagtgttcctccacgacgaccatctcctgctactgaaattggaattggcaggggcataactcgaggaacaactagtcaggcattaggtacagctcccataactattggtccagtttcaggaaatggatcggttagtgcacttcctgcaataaatgacttgtccaaaataaatatattgaacactgacgagaagattaacagtgatggtctttctcagcagttggttatgcctcttggtagtaaagttcaaccccagcaggttcccaggactaatgatgcaatcggctctgattctgctaacacaaatgaaaaccctattcttggtggaagagtattttctcctccagttgtttctggggttcaatggagacctcaagctgctgctgcatttcaaaatcaaattgaaactaatcagtaccgtggaaggcctgagatttctgctgatcacagggagaagtacatacagagactgcagcaagtacagcagcaaggtggcagccttctgaatgtttcccatataactggcataaatcagaagcaatttccaacaccacagccaaatccccttctacaacagagttcctctatatcttcccaagtgaatcttgggcttggagttcaaggatcagacgcggggcatataaaaagtgaagatcaacaaattttggctgaagatgttggtgtggaatcttccgcaacaacaggagcaaataaacaaacaagtgaagatgacacaaagattccatattcgaatccttcagcacctgcagcagaaaacactcagctgcctagggatactgatctatcacctggacagcctttgcaacctggaatgccatcatctggtgttggtgttatcggccgaagaagtgtatctgatcttggtacaatcggagataaccttactggaacttctggtagttctggtcatgatcagaattattatctgcaaatgcttgaagctgcattccacaagcttccacagcccaaggactctgagcgtgctaaaacttacattccgcggcaccctgcagttacccctgctagctacccccaagttcaggcatcaattgtatcgaatcccaccttttgggaaagaattggtagcgacacattagctaccgacatgctgttctttgcgttctactaccaacagaacacatatcaacaatacttggctgctagagaactgaagaagcaatcatggagatttcaccggaggtacaatacctggttccagcggcatgtggagccacaggtcacgactgatgagtatgagcggggatcatatgtatactttgatttccatgtcactgaggatggctcaggatggtgccaaagaatcaagaatgacttcacatttgagtacaactacctggaggatgagctatcagtacaaacaaactaaagtgccatggcagtaggtctggtcaaacctttatgtccaatttgaattttgtagttctcataagagcttgttcggttgcttctggatcaaagaaggttggaggggattaaattccttctagtcaaaattgaatagaaattgatttaacccccctcaatctcctttatccagacgcaaccgaacaatgcctaaggtgactgactgactgttataatctggacccttgacaaaatctccagctgtaaactaatgtgtgaagttggatgcaccgaacatgctgaaattataatcgtgttatgccagccgaatctgtttgacgcagctgtacattgtcgttattatctggatgcgcctgaaaaatattttggatctttcttggcgcctacctgtttatttttagctaactcctggctggcgctttcgatctttctggttcgtttttttatcaaaaaaaa

SEQ ID NO: 48180 - DNA, 2774 bp, Zea Mays
gtccatgggtacattgttcccactactagatgccacttgcaatccgaagttgttgggatgcaatatgctctgatggatgctcgaaagcagattgaacgagagatggaacgatttaaagtatgtgagaaggaaacaaaaactaaggccttctcaaaagaagggttaggtcagcaaccaaaaacagatcccaaagaaaaggccaaagctgaaacaagagactggcttaataatgtggttagcgatttggaaagccagattgataacttcgaagcagagattgaagggctttcaattaaaaagggaaagcaaagaccgcctcgattggtacatttagagacgtctattacgagacataaagctcatataaagaaattggagtcaatcttgcggcttttggataatgatgagttgagtcctgagcaagtcaatgatgttaaagattttcttgatgactatgttgaacgtaatcaggaagactttgatgaattcagtgatgttgaggacctctatagcacattgcccatggagaaggttgaagcacttgaagacatggtttcacttgctccttctagtcttgtgaagggtgttgctcctgtttcgactactgcagttttgagcacaaagagttctgttgcaacttcacctactcagcctacagtatcaacagcttcttcacaaagtacatcacaggatcaaacagaggagacagcttcccaagaaagcaatcctgaacctacgccacaaacaccacctccaaaaggtggaaaccctggaccttcagtaccagctgtgcccattgttgtcagtactggtagtgcggctgtttctgtacctgcagaaacaattagttcccctgtgcgactaactgtacccgccacagcagccacagtgctttcttctgctattccacgaagtgctcctgagaatacacttgctgttacctcaattcctgcaaacttatctaccactttgaaggatgatgaaagcatgagtgttcctccacgacgaccatctcctgctactgaaattggaattggcaggggcataactcgaggaacaactagtcaggcattaggtacagctcccataactattggtccagtttcaggaaatggatcgttggttatgcctcttggtagtaaagttcaaccccagcaggttcccaggactaatgatgcaatcggctctgattctgctaacacaaatgaaaaccctattcttggtggaagagtattttctcctccagttgtttctggggttcaatggagacctcaagctgctgctgcatttcaaaatcaaattgaaactaatcagtaccgtggaaggcctgagatttctgctgatcacagggagaagtacatacagagactgcagcaagtacagcagcaaggtggcagccttctgaatgtttcccatataactggcataaatcagaagcaatttccaacaccacagccaaatccccttctacaacagtttaattcacagagttcctctatatcttcccaagtgaatcttgggcttggagttcaaggatcagacgcggggcatataaaaagtgaagatcaacaaattttggctgaagatgttggtgtggaatcttccgcaacaacaggagcaaataaacaaacaagtgaagatgacacaaagattccatattcgaatccttcagcacctgcagcagaaaacactcagctgcctagggatactgatctatcacctggacagcctttgcaacctggaatgccatcatctggtgttggtgttatcggccgaagaagtgtatctgatcttggtacaatcggagataaccttactggaacttctggtagttctggtcatgatcagaattattatctgcaaatgcttgaagctgcattccacaagcttccacagcccaaggactctgagcgtgctaaaacttacattccgcggcaccctgcagttacccctgctagctacccccaagttcaggcatcaattgtatcgaatcccaccttttgggaaagaattggtagcgacacattagctaccgacatgctgttctttgcgttctactaccaacagaacacatatcaacaatacttggctgctagagaactgaagaagcaatcatggagatttcaccggaggtacaatacctggttccagcggcatgtggagccacaggtcacgactgatgagtatgagcggggatcatatgtatactttgatttccatgtcactgaggatggctcaggatggtgccaaagaatcaagaatgacttcacatttgagtacaactacctggaggatgagctatcagtacaaacaaactaaagtgccatggcagtaggtctggtcaaacctttatgtccaatttgaattttgtagttctcataagagcttgttcggttgcttctggatcaaagaaggttggaggggattaaattccttctagtcaaaattgaatagaaattgatttaacccccctcaatctcctttatccagacgcaaccgaacaatgcctaaggtgactgactgactgttataatctggacccttgacaaaatctccagctgtaaactaatgtgtgaagttggatgcaccgaacatgctgaaattataatcgtgttatgccagccgaatctgtttgacgcagctgtacattgtcgttattatctggatgcgcctgaaaaatattttggatctttcttggcgcctacctgtttatttttagctaactcctggctggcgctttcgatctttctggttcgtttttttatcaaaaaaaa

SEQ ID NO: 48181 - DNA, 2653 bp, Zea Mays
gggcacttcactattcttcgagacttgagagctaattttgcacacaaaggccttggtccacttcattactttctcggtatagaagttcaaagggtgaatgacaacattcatctgtctcatggcaagttagcgatttggaaagccagattgataacttcgaagcagagattgaagggctttcaattaaaaagggaaagcaaagaccgcctcgattggtacatttagagacgtctattacgagacataaagctcatataaagaaattggagtcaatcttgcggcttttggataatgatgagttgagtcctgagcaagtcaatgatgttaaagattttcttgatgactatgttgaacgtaatcaggaagactttgatgaattcagtgatgttgaggacctctatagcacattgcccatggagaaggttgaagcacttgaagacatggtttcacttgctccttctagtcttgtgaagggtgttgctcctgtttcgactactgcagttttgagcacaaagagttctgttgcaacttcacctactcagcctacagtatcaacagcttcttcacaaagtacatcacaggatcaaacagaggagacagcttcccaagaaagcaatcctgaacctacgccacaaacaccacctccaaaaggtggaaaccctggaccttcagtaccagctgtgcccattgttgtcagtactggtagtgcggctgtttctgtacctgcagaaacaattagttcccctgtgcgactaactgtacccgccacagcagccacagtgctttcttctgctattccacgaagtgctcctgagaatacacttgctgttacctcaattcctgcaaacttatctaccactttgaaggatgatgaaagcatgagtgttcctccacgacgaccatctcctgctactgaaattggaattggcaggggcataactcgaggaacaactagtcaggcattaggtacagctcccataactattggtccagtttcaggaaatggatcgttggttatgcctcttggtagtaaagttcaaccccagcaggttcccaggactaatgatgcaatcggctctgattctgctaacacaaatgaaaaccctattcttggtggaagagtattttctcctccagttgtttctggggttcaatggagacctcaagctgctgctgcatttcaaaatcaaattgaaactaatcagtaccgtggaaggcctgagatttctgctgatcacagggagaagtacatacagagactgcagcaagtacagcagcaaggtggcagccttctgaatgtttcccatataactggcataaatcagaagcaatttccaacaccacagccaaatccccttctacaacagagttcctctatatcttcccaagtgaatcttgggcttggagttcaaggatcagacgcggggcatataaaaagtgaagatcaacaaattttggctgaagatgttggtgtggaatcttccgcaacaacaggagcaaataaacaaacaagtgaagatgacacaaagattccatattcgaatccttcagcacctgcagcagaaaacactcagctgcctagggatactgatctatcacctggacagcctttgcaacctggaatgccatcatctggtgttggtgttatcggccgaagaagtgtatctgatcttggtacaatcggagataaccttactggaacttctggtagttctggtcatgatcagaattattatctgcaaatgcttgaagctgcattccacaagcttccacagcccaaggactctgagcgtgctaaaacttacattccgcggcaccctgcagttacccctgctagctacccccaagttcaggcatcaattgtatcgaatcccaccttttgggaaagaattggtagcgacacattagctaccgacatgctgttctttgcgttctactaccaacagaacacatatcaacaatacttggctgctagagaactgaagaagcaatcatggagatttcaccggaggtacaatacctggttccagcggcatgtggagccacaggtcacgactgatgagtatgagcggggatcatatgtatactttgatttccatgtcactgaggatggctcaggatggtgccaaagaatcaagaatgacttcacatttgagtacaactacctggaggatgagctatcagtacaaacaaactaaagtgccatggcagtaggtctggtcaaacctttatgtccaatttgaattttgtagttctcataagagcttgttcggttgcttctggatcaaagaaggttggaggggattaaattccttctagtcaaaattgaatagaaattgatttaacccccctcaatctcctttatccagacgcaaccgaacaatgcctaaggtgactgactgactgttataatctggacccttgacaaaatctccagctgtaaactaatgtgtgaagttggatgcaccgaacatgctgaaattataatcgtgttatgccagccgaatctgtttgacgcagctgtacattgtcgttattatctggatgcgcctgaaaaatattttggatctttcttggcgcctacctgtttatttttagctaactcctggctggcgctttcgatctttctggttcgtttttttatcaaaaaaaa

SEQ ID NO: 48182 - DNA, 2698 bp, Zea Mays
atgacaacattcatctgtctcatggcaaaaaaattgagatttagcaagggtggcctgcttgatcctgaagatgcaacaaggttagcgatttggaaagccagattgataacttcgaagcagagattgaagggctttcaattaaaaagggaaagcaaagaccgcctcgattggtacatttagagacgtctattacgagacataaagctcatataaagaaattggagtcaatcttgcggcttttggataatgatgagttgagtcctgagcaagtcaatgatgttaaagattttcttgatgactatgttgaacgtaatcaggaagactttgatgaattcagtgatgttgaggacctctatagcacattgcccatggagaaggttgaagcacttgaagacatggtttcacttgctccttctagtcttgtgaagggtgttgctcctgtttcgactactgcagttttgagcacaaagagttctgttgcaacttcacctactcagcctacagtatcaacagcttcttcacaaagtacatcacaggatcaaacagaggagacagcttcccaagaaagcaatcctgaacctacgccacaaacaccacctccaaaaggtggaaaccctggaccttcagtaccagctgtgcccattgttgtcagtactggtagtgcggctgtttctgtacctgcagaaacaattagttcccctgtgcgactaactgtacccgccacagcagccacagtgctttcttctgctattccacgaagtgctcctgagaatacacttgctgttacctcaattcctgcaaacttatctaccactttgaaggatgatgaaagcatgagtgttcctccacgacgaccatctcctgctactgaaattggaattggcaggggcataactcgaggaacaactagtcaggcattaggtacagctcccataactattggtccagtttcaggaaatggatcggttagtgcacttcctgcaataaatgacttgtccaaaataaatatattgaacactgacgagaagattaacagtgatggtctttctcagcagttggttatgcctcttggtagtaaagttcaaccccagcaggttcccaggactaatgatgcaatcggctctgattctgctaacacaaatgaaaaccctattcttggtggaagagtattttctcctccagttgtttctggggttcaatggagacctcaagctgctgctgcatttcaaaatcaaattgaaactaatcagtaccgtggaaggcctgagatttctgctgatcacagggagaagtacatacagagactgcagcaagtacagcagcaaggtggcagccttctgaatgtttcccatataactggcataaatcagaagcaatttccaacaccacagccaaatccccttctacaacagagttcctctatatcttcccaagtgaatcttgggcttggagttcaaggatcagacgcggggcatataaaaagtgaagatcaacaaattttggctgaagatgttggtgtggaatcttccgcaacaacaggagcaaataaacaaacaagtgaagatgacacaaagattccatattcgaatccttcagcacctgcagcagaaaacactcagctgcctagggatactgatctatcacctggacagcctttgcaacctggaatgccatcatctggtgttggtgttatcggccgaagaagtgtatctgatcttggtacaatcggagataaccttactggaacttctggtagttctggtcatgatcagaattattatctgcaaatgcttgaagctgcattccacaagcttccacagcccaaggactctgagcgtgctaaaacttacattccgcggcaccctgcagttacccctgctagctacccccaagttcaggcatcaattgtatcgaatcccaccttttgggaaagaattggtagcgacacattagctaccgacatgctgttctttgcgttctactaccaacagaacacatatcaacaatacttggctgctagagaactgaagaagcaatcatggagatttcaccggaggtacaatacctggttccagcggcatgtggagccacaggtcacgactgatgagtatgagcggggatcatatgtatactttgatttccatgtcactgaggatggctcaggatggtgccaaagaatcaagaatgacttcacatttgagtacaactacctggaggatgagctatcagtacaaacaaactaaagtgccatggcagtaggtctggtcaaacctttatgtccaatttgaattttgtagttctcataagagcttgttcggttgcttctggatcaaagaaggttggaggggattaaattccttctagtcaaaattgaatagaaattgatttaacccccctcaatctcctttatccagacgcaaccgaacaatgcctaaggtgactgactgactgttataatctggacccttgacaaaatctccagctgtaaactaatgtgtgaagttggatgcaccgaacatgctgaaattataatcgtgttatgccagccgaatctgtttgacgcagctgtacattgtcgttattatctggatgcgcctgaaaaatattttggatctttcttggcgcctacctgtttatttttagctaactcctggctggcgctttcgatctttctggttcgtttttttatcaaaaaaaa

SEQ ID NO: 48183 - DNA, 2575 bp, Zea Mays
gagatttagcaagggtggcctgcttgatcctgaagatgcaacaaggttagcgatttggaaagccagattgataacttcgaagcagagattgaagggctttcaattaaaaagggaaagcaaagaccgcctcgattggtacatttagagacgtctattacgagacataaagctcatataaagaaattggagtcaatcttgcggcttttggataatgatgagttgagtcctgagcaagtcaatgatgttaaagattttcttgatgactatgttgaacgtaatcaggaagactttgatgaattcagtgatgttgaggacctctatagcacattgcccatggagaaggttgaagcacttgaagacatggtttcacttgctccttctagtcttgtgaagggtgttgctcctgtttcgactactgcagttttgagcacaaagagttctgttgcaacttcacctactcagcctacagtatcaacagcttcttcacaaagtacatcacaggatcaaacagaggagacagcttcccaagaaagcaatcctgaacctacgccacaaacaccacctccaaaaggtggaaaccctggaccttcagtaccagctgtgcccattgttgtcagtactggtagtgcggctgtttctgtacctgcagaaacaattagttcccctgtgcgactaactgtacccgccacagcagccacagtgctttcttctgctattccacgaagtgctcctgagaatacacttgctgttacctcaattcctgcaaacttatctaccactttgaaggatgatgaaagcatgagtgttcctccacgacgaccatctcctgctactgaaattggaattggcaggggcataactcgaggaacaactagtcaggcattaggtacagctcccataactattggtccagtttcaggaaatggatcgttggttatgcctcttggtagtaaagttcaaccccagcaggttcccaggactaatgatgcaatcggctctgattctgctaacacaaatgaaaaccctattcttggtggaagagtattttctcctccagttgtttctggggttcaatggagacctcaagctgctgctgcatttcaaaatcaaattgaaactaatcagtaccgtggaaggcctgagatttctgctgatcacagggagaagtacatacagagactgcagcaagtacagcagcaaggtggcagccttctgaatgtttcccatataactggcataaatcagaagcaatttccaacaccacagccaaatccccttctacaacagagagttcctctatatcttcccaagtgaatcttgggcttggagttcaaggatcagacgcggggcatataaaaagtgaagatcaacaaattttggctgaagatgttggtgtggaatcttccgcaacaacaggagcaaataaacaaacaagtgaagatgacacaaagattccatattcgaatccttcagcacctgcagcagaaaacactcagctgcctagggatactgatctatcacctggacagcctttgcaacctggaatgccatcatctggtgttggtgttatcggccgaagaagtgtatctgatcttggtacaatcggagataaccttactggaacttctggtagttctggtcatgatcagaattattatctgcaaatgcttgaagctgcattccacaagcttccacagcccaaggactctgagcgtgctaaaacttacattccgcggcaccctgcagttacccctgctagctacccccaagttcaggcatcaattgtatcgaatcccaccttttgggaaagaattggtagcgacacattagctaccgacatgctgttctttgcgttctactaccaacagaacacatatcaacaatacttggctgctagagaactgaagaagcaatcatggagatttcaccggaggtacaatacctggttccagcggcatgtggagccacaggtcacgactgatgagtatgagcggggatcatatgtatactttgatttccatgtcactgaggatggctcaggatggtgccaaagaatcaagaatgacttcacatttgagtacaactacctggaggatgagctatcagtacaaacaaactaaagtgccatggcagtaggtctggtcaaacctttatgtccaatttgaattttgtagttctcataagagcttgttcggttgcttctggatcaaagaaggttggaggggattaaattccttctagtcaaaattgaatagaaattgatttaacccccctcaatctcctttatccagacgcaaccgaacaatgcctaaggtgactgactgactgttataatctggacccttgacaaaatctccagctgtaaactaatgtgtgaagttggatgcaccgaacatgctgaaattataatcgtgttatgccagccgaatctgtttgacgcagctgtacattgtcgttattatctggatgcgcctgaaaaatattttggatctttcttggcgcctacctgtttatttttagctaactcctggctggcgctttcgatctttctggttcgtttttttatcaaaaaaaa

SEQ ID NO: 48184 - DNA, 1921 bp, Zea Mays
ctattaagttccatgcaccaacaaatccaacccaaacgcttaagctaataggaggggtggacaactcacttatattatattccaacactccccctcacgtcgagcctctctaaggtctcagacgtggaataggagcgagcaacgattattttatttaattgcgctaaccaggattcgaactcgagacctctagctttgataccatattaagttgcatgcatcaaccaatccaacccaaaagtttaagctgataggaggggtggacaattcacttatattatattccaacattttcatcagtctatattgcaaactccactttgaaaagtgtaggtttgtgaaatgggatgaaatgtaagtataggtttggatataaattctttaaaaggtccaattttatgatataaaatgacaatggaagtagtttagataatttgaaatatagttgtgatacagaagagcaaaaaaaatgtgtagtcctgtgagataagtttccaaatgtgtatgtttgtcatagttttcactattgtagaatagttctgtaaaaaaatactcgtttgttttagccaaatgcctatttttttcttgcttctacttgtagccttcttttgcacactgatcggtttatttatgcagtttaattcacagagttcctctatatcttcccaagtgaatcttgggcttggagttcaaggatcagacgcggggcatataaaaagtgaagatcaacaaattttggctgaagatgttggtgtggaatcttccgcaacaacaggagcaaataaacaaacaagtgaagatgacacaaagattccatattcgaatccttcagcacctgcagcagaaaacactcagctgcctagggatactgatctatcacctggacagcctttgcaacctggaatgccatcatctggtgttggtgttatcggccgaagaagtgtatctgatcttggtacaatcggagataaccttactggaacttctggtagttctggtcatgatcagaattattatctgcaaatgcttgaagctgcattccacaagcttccacagcccaaggactctgagcgtgctaaaacttacattccgttacccctgctagctacccccaagttcaggcatcaattgtatcgaatcccaccttttgggaaagaattggtagcgacacattagctaccgacatgctgttctttgcgttctactaccaacagaacacatatcaacaatacttggctgctagagaactgaagaagcaatcatggagatttcaccggaggtacaatacctggttccagcggcatgtggagccacaggtcacgactgatgagtatgagcggggatcatatgtatactttgatttccatgtcactgaggatggctcaggatggtgccaaagaatcaagaatgacttcacatttgagtacaactacctggaggatgagctatcagtacaaacaaactaaagtgccatggcagtaggtctggtcaaacctttatgtccaatttgaattttgtagttctcataagagcttgttcggttgcttctggatcaaagaaggttggaggggattaaattccttctagtcaaaattgaatagaaattgatttaacccccctcaatctcctttatccagacgcaaccgaacaatgcctaaggtgactgactgactgttataatctggacccttgacaaaatctccagctgtaaactaatgtgtgaagttggatgcaccgaacatgctgaaattataatcgtgttatgccagccgaatctgtttgacgcagctgtacattgtcgttattatctggatgcgcctgaaaaatattttggatctttcttggcgcctacctgtttatttttagctaactcctggctggcgctttcgatctttctggttcgtttttttatcaaaaaaaa

SEQ ID NO: 48185 - DNA, 3083 bp, Zea Mays
tctctcagtccactctctagtctctactctctatccccgctcttgccctccaacggtcatctcatctctcgctctcgcacgcacacaaaagagcagaaccttccaaggatcggatccaatcgattagccacctttttcccggcggcgccgcgatggtggcggagggcgcgcggcggcgggtggtggtggaggtgtgcaacgcgcggaacctgatgcccaaggacggccagggcacggcgtgcgcctacgccgtcgtggacttcgacggccagcgccggcgcaccgccacgcgaccgcgggacctcaacccgcaaagaaggacgacaagaagaagtcgccggagaaggggaagaaagacggcgacaagcccaaggaggaaggcaaggctgagaaagacaagaaggacgcggccgcgccgccgccctctccatccaagctggcgccgccgcgctcgccgtccaagaaggacctggcgatcgccggggtggctggcgacctggagatccgcccccagagcgccgccgagaagagcatggccgcgtcgggcgccagcgcctcgtacgatctggtggatcgcgtgccttacctgttcgtccgcctcctcaaggccaagcgccacggcggtggcgacggccagccactctacgcgcagctgtccatcggcacccacgccgtgcgcacgcgcgccgccacggccgccggcgagtgggacctggtgttcgccttccacaaggacagcctcaccgacacctcgctcgaggtcaccgtcctcgaggaggccaagaagccggccaaggagggggacccggttccgccggaggccaacctgggtttcgtctccttcgacctccaggaggtcccgaagcggtcgcctccggacagcgcgctcgcgccgcagtggtataccctcgagggacacggatccgaggacggcgccgcggtctgcgacgtcatgctctccgtgtgggtcggcacgcaggtcgacgaggcgttccaggaggcgtggcagtcagactccggagggtacctggtgcacacccgctccaaggcctacctctccccaaagctctggtacctccgtctcagcgtcatccaggcgcaggacctacgcttgccgtccccgccggacgccaaggcgaagcagtgcggtcccatcttcccggagctgtacgtcaaggcgcagcttggcgcccaggtgttcaagaccggccgcgtccagctcggcagcgcggcggccgggacggccaacccaagctggaacgaggacctgctgttcgtcgccgcggagccgttcgacccgttcctgaccgttgtcgtggaagacgtgttctccgggcaggcggtgggccaatcccgcgttcccctgtccacggtgcacaggcgatccgacgaccgggtggagccaccgtcccggtggctgaacctgtgcggcggcgaggcccggccgtacgccgggcgggtgcacgtgcgcgtgtgcctggagggcgggtaccacgtgctggacgaggcggcgaacgtggccagcgacgtgcgcgcggcgtcgaagcagctgtcgaagccgccggtggggatgctggaggtgggcgtccgcggcgcggccaacctggtgccgatgaagatcgccaaggacggcgcgagcgggtcgacggacgcgtacgtggtgctcaagtacgggcccaagtgggcgcgcacgcgcaccatcctggaccagttcaaccctcggtggaacgagcagtacgcgtgggacgtgttcgacccctgcaccgtgctcaccatcgccgtcttcgacaacgtccggtacaaggccgccgcagccgacgatccggggaagctgcccagggactcccgcatcgggaagctccggatccggctgtcgacgctggacaccaaccgggtgtacgccaacaccttcgcgctgacggcggtgcacccggtgggcgtgcgcaagatgggcgagctggagctggcgatccggttcacctgcccgtcgtggctgacgctgatgcaggcgtacggcagcccgctgctgccgcggatgcactacgtgaagccgctgggcgcggcgcagcaggacgtgctgcggcacacggcgatgcgcacagtgtcggggcggctggcgcggtcggagccgccgctggggccggaggtggtgcagtacctgctggacacggacacgcagtcgtggagcatgcggcggagcaaggccaactggttccgcgtggtggggtgcctgtcccacgtggcgacggcggtgcggtgggcgcaccgggtccgcacctgggcgcacccgccgacgaccgtgctggtgcacctgctgctggtggccgtggtgctgtgcccggagatgatcctgcccaccgtgtgcctgtacctgttcctggtgctgctgtggcggtaccgcgcgcgggcgcggcagccggcgggcatggacccgcggctgtcccacgtggacagcgtgagccccgacgagctggacgaggagttcgacgggctcccatcggggcgccccgccgacgtggtccggatgcggtacgaccggctgcgcgccgtggccgcgcgcgcgcagacgctgctgggggacgtggcggcgcagggggagcgcgtggaggcgctgctgtcgtggcgggacccgcgcgcgacggcggtgttcgcggtggtgtgcctgctggcggcgctggtgctgtacgcggtgccgttcaaggtgctgctgctggggatggggttctactacctccgccaccccaggttccgcggcgacatgccctccgccggcttcaacttcttccgccgcctgccgtcgctctccgaccgggtcttctagactctctctctctctctctctctctctctctctctctctctctctcgcatgctcagatcgcggtctctgcctctgctactgatctctgatcagtctagttcgtttcttgatcgtttcatcttcacttctccgtgtaatctgcctttgtcaggttgccttgttttttttatcggttgcagtcagcagcaagcctcggttgatgaggcttgttggcaacatcaataacagcagcaataataatatctattgtattcgttcgttc

SEQ ID NO: 48186 - DNA, 3848 bp, Zea Mays
agcaacaaacgtctcacttcccattgtacgaatttgtcgtctattctatcgatctgatgctatacaaatacatttaattctgtatttattaatagactacgtttatagacacttcattgtacaataaagtctcttagttgtctcctgtgcttggagaaccgttttggtgtctctctactgtacatgcccttagctagcggatataaattaggcgcaccctgtgcggattattaccatatccatgcggtgtgggcacatagacgtagtaggggattactatttactagatcgatcagatagatgtaaaactggcatccatgcttgttgcttgtggtgtgtgccgtgtgcctgcctgcctaggacggcagctgctccatggccacctcctccatcttctggtgcgtccgggcctccatctcgcagcagaggcagcagggccggctgagcacggcgccgtgcccgtgggcgtgcgcgtgcgcgtgccccactccggcgacggggacgggcttacgcgcgacgatgacggagttgatcacctccccctccgggtggtgcacggcgagcacgtcgaagccgccgcggcggatctcgtctgggtcgacgacggggtacaggaaggcgcgcgcgccgtgcgcgctgcgcaccaccagcgcggcgccgggcgccatgtgcctcccgaggtgctccaccacgcgcgccttctcctcggccgccacgcccacgagcgccgccaggaagacgacgtcgtaggtggccaggccccgcgtgacgtgggccacgtcggaggtgcggaacgccatgcgcgcggcgagcgcggcgtcggcgcgcacgaggcggcgcgcccggccgttggcctccgcgcagatgtcgtagttgtcgaaggcggcggcggggaggtggcgcgcggcgagcacgagggagctgagcgggagcgggccggaccccacgaaggcgacgcgggcgggcggcgggcccgggacgtggcgcgccagcaggccgtgctccagctcgcccagcagcaggtagttgccgaagtaggggaagagcggcaggtggtccagcgggctgtccaaggccgccagcaggtccgagtagtgcgcctccagctgggcctcggcgtcggcgcagcggcggatgaggcccgcgcgcatgcgctgcagctccgggcccaggcgttccacgtccacggtgctgcgcgggatgcaggccgtgacgaggtccgtgaacagcgcgttcacctccggcgacgggctcagcgacggcagcttcgcgatggcggcggccaggccggagatcttgcgcaccagcgcggcctccgcctcattctccagcggcagcacctcgacggctcctacttcatatcattctttgttcagcactcttggcactttgatatatggatcatcataacttggaatggcctcctttatggcatctctgcattgacaaaaaaaaccaaaaatgataaagacactcgggttttcgttgcaaagcatttagtgctttagtaaaaaccatggaagactcattgccctgctcacctgttatcgaatgtttcaggcttatcttttctcaaagaaatatcagccgttgtacctgtggatgagatagtggaacatgaaaattgtaattcgttgaaataaacatacaaaaacagactaacagttaataagcattgtgtaacgggttttgtgtagggaatcaaataaaacatttggtttttggatgaaagcattagaattcagaactaattgttcaaaatgtaattaagtgatgacattataatccttctcccatgattattccatttcacatatgatgccaagcacagtactggtaggaaacaaatggctaaatgcctatttggcaataatatttctcaaaaccatggttttacaatactataatttgcaattgtcatgacaataccatagttttggtcagctccaagaataccattgttttgagaaacattgtctagatacaacattgtaaaccatggtatttaggcaaaagccatgcctttgggttggagtgaagtttacaatgctcaaaaaatactatgctatctagaataccatggttttgaaaacatcgtttttaagaatgcagccaaacaccttatagcataaaagtattcctataaggccatctccagcagatccctatctcatcccctatttcaaacttaactctgcaaacagtgtcaatcagtatcatccaccgaagacagcctaaaccatggtattgtctagaaactataaaaatactttacttccaaataggccctaaatgctcactacaagccctctactgtgtcacaactaattgggatgggtaactcattaaatcatgttttcatgcacattgaaaatgggttaagctttatgccttcaaaattctagtaaatcaagtgatattaacatgatgtctagcacagtgctagtatggagtagatggctaaatgctactagaagccttatatcgtgtcacaactgggataggaacttagcatcagtaaatcaattttaaagcatatcgaagtggggaaaggatttatgctttccaaattatagcaaatcaagagacgctaataaataataatcaatcatgagaatgccaccaagatgcataccagctctaagtgaaggctcaatggactcaaggtctactgcctgaagttgcccaaacctgtaaagaaaataaaaacaaagagcagctaagctctaccctgaaataaccagtgaagctttgattttcttacagtgcgtacaaatagaaaccaaaacccaacactctcatagtgtgaaacattcatgatcttcccattttgcgattaagaatcacataactacacaaaataaaaacatccactctgatcaagttatacaaatctaaaacatatcccttaactgtggcagtattttgggttttctgttcaataaggcagaagagggaggtctgctagcaactttcaagggggaaaaggctgcacagaatttctatgtatgcagacgatgtggttttattcctgcaccctttgatatctctgttactctggaaattcttcagttatttggagatgcttctggcttctacaatagtgcacagaagtccagcatttttcccattaggtgccccgtggataccttattggaagtccagaccctgctgccctgtgatgttgcagccttcccttgccggtatttaggtcttcctctttccattcataagttaaacagacatcattttcagactttggttgaaagggttgctgatcggctgccgcattagaaggcggatctaatgaccagatcagggagaagaacccttgtacaacatgtgcttacaggcatgtctatttatgtggcaatggcagttgacatcccccattgggcttcggagacgattgataaaataagaaaaggatttctctggaagggtagaaaggaagttagaggggggcactgtttggtagcatggggaaaggtttgcagaccccttcatctgggaggcctgggtatttctagtctctaggaactctgctgggcgctcagaatgaggtggttgtggctgcaaaaaactgagcctgggcgctcttggtttggtctatctattcaaattatggccaaggcccgggctttcttttccatggtcctgatttttgaagtgggagacggtgcaaacaccttgttctggactgataagtggctgcatggggaaagaatctctgagtcggcccctaggctttttggcataattcctaacagtgcgtttggatgttggaatttagactcggaattcagaattggaattgacaaacccgaattctggtgtttggatggtca

SEQ ID NO: 48187 - DNA, 3022 bp, Zea Mays
cggctccccgcacgacgaggcggacacggtgatcaacgaggtgaggcagccgggggagaagaggcggagccccagccccccgacgccgatcgatcacggaacaacaaaaaccctagcgccccacctcccgacccacggcgcctgcctccactccactactccccaccatgaactagctcgatcgcctccccaaagctccccccgcctttcgggatcgatcgtccccagaagccacaggtgaagaagtactacttcaagaagaagacgagcagtagtcatagcagaaatggtaaggatgatgtcaaccacgactccacgattcaacccaggtcgcccctgagcagacagagcctgaccttcgacgccatccccacataccacgctggagctttctacgagatcgaccacgataaattgccccctaaatccccaatccatctgaaatccatacgggtggttaaggtgagcgagtgcacgaacctggacatcacagtgaaattcccgtcccttcaggcgctgcgcagcttcttctcctcctacccggcacccggcaccggaccggaactagacgagcgcttcgtcatgagcagcaaccacgccgcgcgcatcttgcgccgccgagtgaccgaggaggagctcgagggcgaggtgcagcaggacagcttctggctcatcaagccccggctctatgacttcgccgcacctcagcaggtgccgtcacggacattgtgcctgccgccgccgcccgctccaccggcggctacgctggggctaacagctgactcctgtctactcaccacgttgaagtgcgatggcgccgggtggggtatgaggcgccgcgtcaggtacattggacggcatcgtgatgaagctcccaaggaggctagtgttgatggctacgacacagagtccagtgtcagggaggtgcagcagcctccagcgacgcaggaagttaaaaggagcgaaagaaactgtaaaagaaagcgggaggcggaagcgagcagcaaggacaacaacggagacgagggcaagaagaataacaaggttcagggcgccagcaagaagatttcaaaaaaggcgaagaagcggaccgtcgaatccaaggacggtgaccctcggcacggcaaggaccggtggtcagccgagcgctacgccgcagcagagaagagcctgctcaacatcatgcgctcccgagacgcacggttcggcgcaccggtgatgcggcaggtgctgcgggaggaagcccgcaagcacatcggcgacaccggcctccttgaccacctgctcaagcacatggctggccgggtgccggaaggcagcgttcaccggtttcgtcgccggcacaatgcggatggtgccatggagtactggcttgagccagccgagcttgctgaggtacggaaacaggccggtgtatctgatccatactgggtgccaccgccgggatggaaaccaggtgatgatgtgtccctcgtcgccggcgacattctagtcaagaggcaggttgaggagctcaccgaggaggtcaatggcgtaaaaaggcaaatggagcagttattgtgcaaggatgatggggacttcggtgcagagagagactacagttcattgaaagagaagtaccagcgtgctgtgagggctaatgaaaagcttgagaagcaggtgctctgtttgaaggacatgtgtgagaatgtggttcagatgaatggtgagctgaagaaggaggtgtcatccttcaaggaaaagtacgagcatatagctgacaagaatgataagttagaggagcaggttacctacctctccagctccttcctttctttcaaggatcagctggtagtggctctgaagctggaactggctccaagtgaagctgttccccgcacagcactgttcgttgcttccggtgagcagatgaccggcaccgtcatccaaggcggccaagacagggcggaaaggaagagcagcttccgcgtctgtaagccacagggcaagttcctgttgccgagcatggcgtctggcatgaccatcggcaggggcgccagcagcacctgcccggccgccgccacgccaggcccggggatccctcgcagcaccagtttccccagtatgccgggcctcccgcggtcgtcgcgaggcccagttgaggtggtggcggcggcgtccggcctggacgagcacgtgatgtttggcgcccacttctctacgccgcccctcggcgtcgtccaccaacgacgctgccaagctgcagctgtccctgcccagcccgaggtcgcccctgcagccgcagaagctgtttgacactgttactgctgctgcttctgggtttagtccccaaaagctgatgcatttctccggcctgactcgacgcgatgtggacacctcgtcgtcatcgtccggggcctgcggttccggcctgctagaggggaagagggtcctgttcgatgcagacgccggcgggatcagcgcggtgggaaccgagctggccctggctactccatcctactgctgacctactcctacctttccacttcaggatcatcgcctcttccccatctgcaagcaaagctttggatggttggcctcagggtgctccaattttctgtctttgtaacaaaggagcaacacgtagcgtaaatacagagagagagagaaaaaaagagagagagaaaaaagataagaaaaagggaatatgaactcacttgagcagtctttgtggcataatcgtacttccgtagccatctcaggttcgtcagtttctagttaattctcaggttgaagctaaagtcgttgcattggattggtctcttcagtaagtcagttgggtatggtcatctcccattctcccctgtccatggtgcatgacacatttggagttgagatgtgtcgattttgctggcaccatagggcatatagagtcatgttatagaatataccgggtcattcttgtatgcctgctgcactacatattaagtgtgaccaattttttcgggcatatatatattggtgatatttaatttccccttac

SEQ ID NO: 48188 - DNA, 2961 bp, Zea Mays
cttcttcgttctgatccgggccatttttctccatctggagacccaaaaaaaactctgaggacccgcatgcagatggacgtagagacggtgcaggcgggtcctgcgctcgcggctcatctgcagctgcaggcatcgccgaagccacaggtgaagaagtactacttcaagaagaagacgagcagtagtcatagcagaaatggtaaggatgatgtcaaccacgactccacgattcaacccaggtcgcccctgagcagacagagcctgaccttcgacgccatccccacataccacgctggtgagcacgggcatatacgatgcaacacggagctttctacgagatcgaccacgataaattgccccctaaatccccaatccatctgaaatccatacgggtggttaaggtgagcgagtgcacgaacctggacatcacagtgaaattcccgtcccttcaggcgctgcgcagcttcttctcctcctacccggcacccggcaccggaccggaactagacgagcgcttcgtcatgagcagcaaccacgccgcgcgcatcttgcgccgccgagtgaccgaggaggagctcgagggcgaggtgcagcaggacagcttctggctcatcaagccccggctctatgacttcgccgcacctcagcaggtgccgtcacggacattgtgcctgccgccgccgcccgctccaccggcggctacgctggggctaacagctgactcctgtctactcaccacgttgaagtgcgatggcgccgggtggggtatgaggcgccgcgtcaggtacattggacggcatcgtgatgaagctcccaaggaggctagtgttgatggctacgacacagagtccagtgtcagggaggtgcagcagcctccagcgacgcaggaagttaaaaggagcgaaagaaactgtaaaagaaagcgggaggcggaagcgagcagcaaggacaacaacggagacgagggcaagaagaataacaaggttcagggcgccagcaagaagatttcaaaaaaggcgaagaagcggaccgtcgaatccaaggacggtgaccctcggcacggcaaggaccggtggtcagccgagcgctacgccgcagcagagaagagcctgctcaacatcatgcgctcccgagacgcacggttcggcgcaccggtgatgcggcaggtgctgcgggaggaagcccgcaagcacatcggcgacaccggcctccttgaccacctgctcaagcacatggctggccgggtgccggaaggcagcgttcaccggtttcgtcgccggcacaatgcggatggtgccatggagtactggcttgagccagccgagcttgctgaggtacggaaacaggccggtgtatctgatccatactgggtgccaccgccgggatggaaaccaggtgatgatgtgtccctcgtcgccggcgacattctagtcaagaggcaggttgaggagctcaccgaggaggtcaatggcgtaaaaaggcaaatggagcagttattgtgcaaggatgatggggacttcggtgcagagagagactacagttcattgaaagagaagtaccagcgtgctgtgagggctaatgaaaagcttgagaagcaggtgctctgtttgaaggacatgtgtgagaatgtggttcagatgaatggtgagctgaagaaggaggtgtcatccttcaaggaaaagtacgagcatatagctgacaagaatgataagttagaggagcaggttacctacctctccagctccttcctttctttcaaggatcagctggtagtggctctgaagctggaactggctccaagtgaagctgttccccgcacagcactgttcgttgcttccggtgagcagatgaccggcaccgtcatccaaggcggccaagacagggcggaaaggaagagcagcttccgcgtctgtaagccacagggcaagttcctgttgccgagcatggcgtctggcatgaccatcggcaggggcgccagcagcacctgcccggccgccgccacgccaggcccggggatccctcgcagcaccagtttccccagtatgccgggcctcccgcggtcgtcgcgaggcccagttgaggtggtggcggcggcgtccggcctggacgagcacgtgatgtttggcgcccacttctctacgccgcccctcggcgtcgtccaccaacgacgctgccaagctgcagctgtccctgcccagcccgaggtcgcccctgcagccgcagaagctgtttgacactgttactgctgctgcttctgggtttagtccccaaaagctgatgcatttctccggcctgactcgacgcgatgtggacacctcgtcgtcatcgtccggggcctgcggttccggcctgctagaggggaagagggtcctgttcgatgcagacgccggcgggatcagcgcggtgggaaccgagctggccctggctactccatcctactgctgacctactcctacctttccacttcaggatcatcgcctcttccccatctgcaagcaaagctttggatggttggcctcagggtgctccaattttctgtctttgtaacaaaggagcaacacgtagcgtaaatacagagagagagagaaaaaaagagagagagaaaaaagataagaaaaagggaatatgaactcacttgagcagtctttgtggcataatcgtacttccgtagccatctcaggttcgtcagtttctagttaattctcaggttgaagctaaagtcgttgcattggattggtctcttcagtaagtcagttgggtatggtcatctcccattctcccctgtccatggtgcatgacacatttggagttgagatgtgtcgattttgctggcaccatagggcatatagagtcatgttatagaatataccgggtcattcttgtatgcctgctgcactacatattaagtgtgaccaattttttcgggcatatatatattggtgatatttaatttccccttac

SEQ ID NO: 48189 - DNA, 504 bp, Zea Mays
cgccccgcggcccccgttgcaagtccaacccgttcccccccaattcagcaccagcctttgcgcatcgcgacagcgatatcgggaagaggaaactcgaaagcccggcgagcggtatggcaacccgcgaggagcacgtggcggcgccggcgccggcggtcgaggagacgccggagaagaagcaggccagcacaaccgagctccccgcaccctcaggctggacgaagaagggagctctatgggctcgtgagcggtatggggctcgagctgccccaccggaccgcgatgtgggagtgagtattgtggacttcacttttatagctctccctattgcaacatccaagtcatttctgtaaacctattagggcctacagtccgttgggttcagtttacccggggatgatacgtttatcgtataagcaagtttcgactttagacctctcgatagtgtgttttggctcttatttggtccttgctaagcagtatgggtggatcctaacatggtta

SEQ ID NO: 48190 - DNA, 2729 bp, Zea Mays
ggcccaccgtccatgagagcgacgagcaagcgcagcagatatcaagcgcgcgtcccctctcgtccttcccccctccgcctcactctctctctcctcccccacctccgtccctccggccgccgccgcgggcgccagagatctccacagagtcttccaatccccaccccgcccgcctccagggtccacgggttcctcccgcctgcctcccccgagcgaggtcggtcgcgccctgtcccggatccgccattcccggttccgcgcctggtttcctgctccggctgcgtggttcctggctgtcgcgtccccgctcttggaccgggctctcctggcctgccgttcgcaggatctcgggccagatcctgccccgcatggggtgtcgtcggttctcagcctagcggcgccgcgccattgcccccaccatcacggagcaatcgcttgcgcggttccttcggttatctgagctgcgggaaatcccccgattgtttctttcgtcgtgcaccaatcgcccttgctgctccccgaatcagcagatccagtccgccgggccttttgcttgtccctaatttgaggcagactggtccccatcaatcaatcgctctcaatcccccctgcgtttcccctgatccctgccccctcccaccatcaccaccaacaaaccacgcacccaagatccgccgctgcattggccgcggccggcgtgcattctgcgaatccgggtgatccaagaggccgcagcaggcgcggcagccgctggccggagatgacgtcgccgtacgcgtcgccgttcctgctctccctgctcctgctcatctccatcccggtcgtcttcctccttgccccgcgcctgctcccgcccaagacgctcccggccatcccggacgccgacgagtccgacgacctcgcgctcttccgccgagccatcctctcctcctcttcggccactcccacgcccacctccgcggcctcctacttcttccgccgccgtccggcgcccaaggtcgctttcctcttcctcaccaactcggacctcgtcttctccccgctctgggagaagttcttccgcggccacacccacctcttcaacctctacgtccacgccgacccctactccgtcctcgagctgccgcccacgccatccttccgcggccgcttcgtccccgccaaggccacgcagcgcgcctcccctacactcatctccgccgcgcgccgcctcctcgccaccgcgctccttgacgaccccaacaaccagttcttcgcgctcctgtcgcagtcctgcatcccgctccacccgttccccaccctctacaacgcactcctctccgacaatgctggccctcatagccaccaccgcagcttcatagagataatggacaacatggacaacgacaccaagctgctgcatgacaggtactatgcccgaggtgacgatgtcatgctcccggaggttccatatgatcagttccgggctgggtcgcagttctttgtgctcacgagaaggcacgccatcatggtcgtgagggatatgcgactttggaagaagttcaagttgccctgtctgatcgagcgcagggattcatgctacccggaggagcattacttccccacactgctggatatgcaggatcctgagggttgtactaagtatacccttacaagggtaaattggacggattcagttgcaggccacccacacatgtatgagcctggagaggtatccgcaagcttgatcagggagctgaggaagtcgaacacgacacacccttacatgttcgcccgcaagttttctcctgagtgccttgagccgctgatggagattgtggactcggttatcctacgtgactagtctgaagcaacatcgatttgatggttggagtttgtacactgaaatgaaccaggtcatgctagattcattggatcaacgtaacaatgccatacttgctgaacctgtgactctcactgtggttctttgctaggtccaatgaacaatgtccataacgtcctctccttgtttcaggcatctaaggaaagttagactgcaatgctactttcgcttccgccgtgatcagatggacaaacgagtagtttcatctctgccttctagaacctcctcgaggaacaacatatcctcctcttgcctcttttttttttttgaagttattctcttttttcctgggaagaaggtgctgctgctgggagagtactatgtggctacgaattgtcgctttgtgagtacactgttcgagcacagcagtttctttagtagggcaatagttaatgtgatcatcctatgtatacatggtgaatacatgctgtgatgatttgtaggttctgttgcatatataccatctccaaccctgttttggtcgtgcagcctgtagtgcaaaacattgttttgtatgaccatatgcactatctgctggagacaaccttagaccactgtggtgtttgaagtgatcctaaactaattatcatgaaggagcatatttgacttcggctgtaggatttttttgtatgaactgtgttaggagaaaggggagggctaaagttcactgaacagaacaattcaccaaagcaaccttaaaccctaatatggccagagctggggcctactgttatttacattttttttatgccagtggtcggacttattgttaggtcaccggtttcacttatgtccttcatctgctccactaccaacattatactattagctattggcatgctcttat

SEQ ID NO: 48191 - DNA, 2628 bp, Zea Mays
ccaccgtccatgagagcgacgagcaagcgcagcagatatcaagcgcgcgtcccctctcgtccttcccccctccgcctcactctctctctcctcccccacctccgtccctccggccgccgccgcgggcgccagagatctccacagagtcttccaatccccaccccgcccgcctccagggtccacgggttcctcccgcctgcctcccccgagcgaggtcggtcgcgccctgtcccggatccgccattcccggttccgcgcctggtttcctgctccggctgcgtggttcctggctgtcgcgtccccgctcttggaccgggctctcctggcctgccgttcgcaggatctcgggccagatcctgccccgcatggggtgtcgtcggttctcagcctagcggcgccgcgccattgcccccaccatcacggagcaatcgcttgcgcggttccttcggttatctgagctgcgggaaatcccccgattgtttctttcgtcgtgcaccaatcgcccttgctgctccccgaatcagcagatccagtccgccgggccttttgcttgtccctaatttgaggcagactggtccccatcaatcaatcgctctcaatcccccctgcgtttcccctgatccctgccccctcccaccatcaccaccaacaaaccacgcacccaagatccgccgctgcattggccgcggccggcgtgcattctgcgaatccgggtgatccaagaggccgcagcaggcgcggcagccgctggccggagatgacgtcgccgtacgcgtcgccgttcctgctctccctgctcctgctcatctccatcccggtcgtcttcctccttgccccgcgcctgctcccgcccaagacgctcccggccatcccggacgccgacgagtccgacgacctcgcgctcttccgccgagccatcctctcctcctcttcggccactcccacgcccacctccgcggcctcctacttcttccgccgccgtccggcgcccaaggtcgctttcctcttcctcaccaactcggacctcgtcttctccccgctctgggagaagttcttccgcggccacacccacctcttcaacctctacgtccacgccgacccctactccgtcctcgagctgccgcccacgccatccttccgcggccgcttcgtccccgccaaggccacgcagcgcgcctcccctacactcatctccgccgcgcgccgcctcctcgccaccgcgctccttgacgaccccaacaaccagttcttcgcgctcctgtcgcagtcctgcatcccgctccacccgttccccaccctctacaacgcactcctctccgacaatgctggccctcatagccaccaccgcagcttcatagagataatggacaacatggacaacgacaccaagctgctgcatgacaggtactatgcccgaggtgacgatgtcatgctcccggaggttccatatgatcagttccgggctgggtcgcagttctttgtgctcacgagaaggcacgccatcatggtcgtgagggatatgcgactttggaagaagttcaagttgccctgtctgatcgagcgcagggattcatgctacccggaggagcattacttccccacactgctggatatgcaggatcctgagggttgtactaagtatacccttacaagggtaaattggacggattcagttgcaggccacccacacatgtatgagcctggagaggtatccgcaagcttgatcagggagctgaggaagtcgaacacgacacacccttacatgttcgcccgcaagttttctcctgagtgccttgagccgctgatggagattgtggactcggttatcctacgtgactagtctgaagcaacatcgatttgatggttggagtttgtacactgaaatgaaccagaacgtcctctccttgtttcaggcatctaaggaaagttagactgcaatgctactttcgcttccgccgtgatcagatggacaaacgagtagtttcatctctgccttctagaacctcctcgaggaacaacatatcctcctcttgcctcttttttttttttgaagttattctcttttttcctgggaagaaggtgctgctgctgggagagtactatgtggctacgaattgtcgctttgtgagtacactgttcgagcacagcagtttctttagtagggcaatagttaatgtgatcatcctatgtatacatggtgaatacatgctgtgatgatttgtaggttctgttgcatatataccatctccaaccctgttttggtcgtgcagcctgtagtgcaaaacattgttttgtatgaccatatgcactatctgctggagacaaccttagaccactgtggtgtttgaagtgatcctaaactaattatcatgaaggagcatatttgacttcggctgtaggatttttttgtatgaactgtgttaggagaaaggggagggctaaagttcactgaacagaacaattcaccaaagcaaccttaaaccctaatatggccagagctggggcctactgttatttacattttttttatgccagtggtcggacttattgttaggtcaccggtttcacttatgtccttcatctgctccactaccaacattatactattagctattggcatgctcttat

SEQ ID NO: 48192 - DNA, 2607 bp, Zea Mays
ccaccgtccatgagagcgacgagcaagcgcagcagatatcaagcgcgcgtcccctctcgtccttcccccctccgcctcactctctctctcctcccccacctccgtccctccggccgccgccgcgggcgccagagatctccacagagtcttccaatccccaccccgcccgcctccagggtccacgggttcctcccgcctgcctcccccgagcgaggtcggtcgcgccctgtcccggatccgccattcccggttccgcgcctggtttcctgctccggctgcgtggttcctggctgtcgcgtccccgctcttggaccgggctctcctggcctgccgttcgcaggatctcgggccagatcctgccccgcatggggtgtcgtcggttctcagcctagcggcgccgcgccattgcccccaccatcacggagcaatcgcttgcgcggttccttcggttatctgagctgcgggaaatcccccgattgtttctttcgtcgtgcaccaatcgcccttgctgctccccgaatcagcagatccagtccgccgggccttttgcttgtccctaatttgaggcagactggtccccatcaatcaatcgctctcaatcccccctgcgtttcccctgatccctgccccctcccaccatcaccaccaacaaaccacgcacccaagatccgccgctgcattggccgcggccggcgtgcattctgcgaatccgggtgatccaagaggccgcagcaggcgcggcagccgctggccggagatgacgtcgccgtacgcgtcgccgttcctgctctccctgctcctgctcatctccatcccggtcgtcttcctccttgccccgcgcctgctcccgcccaagacgctcccggccatcccggacgccgacgagtccgacgacctcgcgctcttccgccgagccatcctctcctcctcttcggccactcccacgcccacctccgcggcctcctacttcttccgccgccgtccggcgcccaaggtcgctttcctcttcctcaccaactcggacctcgtcttctccccgctctgggagaagttcttccgcggccacacccacctcttcaacctctacgtccacgccgacccctactccgtcctcgagctgccgcccacgccatccttccgcggccgcttcgtccccgccaaggccacgcagcgcgcctcccctacactcatctccgccgcgcgccgcctcctcgccaccgcgctccttgacgaccccaacaaccagttcttcgcgctcctgtcgcagtcctgcatcccgctccacccgttccccaccctctacaacgcactcctctccgacaatgctggccctcatagccaccaccgcagcttcatagagataatggacaacatggacaacgacaccaagctgctgcatgacaggtactatgcccgaggtgacgatgtcatgctcccggaggttccatatgatcagttccgggctgggtcgcagttctttgtgctcacgagaaggcacgccatcatggtcgtgagggatatgcgactttggaagaagttcaagttgccctgtctgatcgagcgcagggattcatgctacccggaggagcattacttccccacactgctggatatgcaggatcctgagggttgtactaagtatacccttacaagggtaaattggacggattcagttgcaggccacccacacatgtatgagcctggagaggtatccgcaagcttgatcagggagctgaggaagtcgaacacgacacacccttacatgttcgcccgcaagttttctcctgagtgccttgagccgctgatggagattgtggactcggttatcctacgtgactagtctgaagcaacatcgatttgatggttggagtttgtacactgaaatgaaccaggcatctaaggaaagttagactgcaatgctactttcgcttccgccgtgatcagatggacaaacgagtagtttcatctctgccttctagaacctcctcgaggaacaacatatcctcctcttgcctcttttttttttttgaagttattctcttttttcctgggaagaaggtgctgctgctgggagagtactatgtggctacgaattgtcgctttgtgagtacactgttcgagcacagcagtttctttagtagggcaatagttaatgtgatcatcctatgtatacatggtgaatacatgctgtgatgatttgtaggttctgttgcatatataccatctccaaccctgttttggtcgtgcagcctgtagtgcaaaacattgttttgtatgaccatatgcactatctgctggagacaaccttagaccactgtggtgtttgaagtgatcctaaactaattatcatgaaggagcatatttgacttcggctgtaggatttttttgtatgaactgtgttaggagaaaggggagggctaaagttcactgaacagaacaattcaccaaagcaaccttaaaccctaatatggccagagctggggcctactgttatttacattttttttatgccagtggtcggacttattgttaggtcaccggtttcacttatgtccttcatctgctccactaccaacattatactattagctattggcatgctcttat

SEQ ID NO: 48193 - DNA, 3156 bp, Zea Mays
ccaccgtccatgagagcgacgagcaagcgcagcagatatcaagcgcgcgtcccctctcgtccttcccccctccgcctcactctctctctcctcccccacctccgtccctccggccgccgccgcgggcgccagagatctccacagagtcttccaatccccaccccgcccgcctccagggtccacgggttcctcccgcctgcctcccccgagcgaggtcggtcgcgccctgtcccggatccgccattcccggttccgcgcctggtttcctgctccggctgcgtggttcctggctgtcgcgtccccgctcttggaccgggctctcctggcctgccgttcgcaggatctcgggccagatcctgccccgcatggggtgtcgtcggttctcagcctagcggcgccgcgccattgcccccaccatcacggagcaatcgcttgcgcggttccttcggttatctgagctgcgggaaatcccccgattgtttctttcgtcgtgcaccaatcgcccttgctgctccccgaatcagcagatccagtccgccgggccttttgcttgtccctaatttgaggcagactggtccccatcaatcaatcgctctcaatcccccctgcgtttcccctgatccctgccccctcccaccatcaccaccaacaaaccacgcacccaagatccgccgctgcattggccgcggccggcgtgcattctgcgaatccgggtgatccaagaggccgcagcaggcgcggcagccgctggccggagatgacgtcgccgtacgcgtcgccgttcctgctctccctgctcctgctcatctccatcccggtcgtcttcctccttgccccgcgcctgctcccgcccaagacgctcccggccatcccggacgccgacgagtccgacgacctcgcgctcttccgccgagccatcctctcctcctcttcggccactcccacgcccacctccgcggcctcctacttcttccgccgccgtccggcgcccaaggtcgctttcctcttcctcaccaactcggacctcgtcttctccccgctctgggagaagttcttccgcggccacacccacctcttcaacctctacgtccacgccgacccctactccgtcctcgagctgccgcccacgccatccttccgcggccgcttcgtccccgccaaggccacgcagcgcgcctcccctacactcatctccgccgcgcgccgcctcctcgccaccgcgctccttgacgaccccaacaaccagttcttcgcgctcctgtcgcagtcctgcatcccgctccacccgttccccaccctctacaacgcactcctctccgacaatgctggccctcatagccaccaccgcagcttcatagagataatggacaacatggacaacgacaccaagctgctgcatgacaggtactatgcccgaggtgacgatgtcatgctcccggaggttccatatgatcagttccgggctgggtcgcagttctttgtgctcacgagaaggcacgccatcatggtcgtgagggatatgcgactttggaagaagttcaagttgccctgtctgatcgagcgcagggattcatgctacccggaggagcattacttccccacactgctggatatgcaggatcctgagggttgtactaagtatacccttacaagggtaaattggacggattcagttgcaggccacccacacatgtatgagcctggagaggtatccgcaagcttgatcagggagctgaggaagtcgaacacgacacacccttacatgttcgcccgcaagttttctcctgagtgccttgagccgctgatggagattgtggactcggttatcctacgtgactagtctgaagcaacatcgatttgatggttggagtttgtacactgaaatgaaccaggtatggaaatatgcacttgctgcggcctctctgaaagaattcatcctcttctatttaggtgttgtgttgagagaaatgtctacagatggagtgtacatagcacggaatgtgagtgtattaggttgttcagtaatctgtatgcttatcattttcgtaataaagcggcatactacattagattgttattgtgtcatcaattgagtgcttgcaacattaggttattttcttaggcactgtaagcattttgcttctgttagaagatagaaatattggcctatatggtccttttattggtgctggtcaatgcttaagtgttaagtcatcttgaaagttgaaacacacacaaaaggttccttaggtagcccttccgttggtggtgaaagaattttttgtgggaatctgttgcattctggtcacaacaattttacaggtcatgctagattcattggatcaacgtaacaatgccatacttgctgaacctgtgactctcactgtggttctttgctaggtccaatgaacaatgtccataacgtcctctccttgtttcaggcatctaaggaaagttagactgcaatgctactttcgcttccgccgtgatcagatggacaaacgagtagtttcatctctgccttctagaacctcctcgaggaacaacatatcctcctcttgcctcttttttttttttgaagttattctcttttttcctgggaagaaggtgctgctgctgggagagtactatgtggctacgaattgtcgctttgtgagtacactgttcgagcacagcagtttctttagtagggcaatagttaatgtgatcatcctatgtatacatggtgaatacatgctgtgatgatttgtaggttctgttgcatatataccatctccaaccctgttttggtcgtgcagcctgtagtgcaaaacattgttttgtatgaccatatgcactatctgctggagacaaccttagaccactgtggtgtttgaagtgatcctaaactaattatcatgaaggagcatatttgacttcggctgtaggatttttttgtatgaactgtgttaggagaaaggggagggctaaagttcactgaacagaacaattcaccaaagcaaccttaaaccctaatatggccagagctggggcctactgttatttacattttttttatgccagtggtcggacttattgttaggtcaccggtttcacttatgtccttcatctgctccactaccaacattatactattagctattggcatgctcttat

SEQ ID NO: 48194 - DNA, 2360 bp, Zea Mays
taaccttctcccatttttgcattgatcttatctgcgcattctaattctatatttttcctattccaatattttgagaatcatatatatatatatatttaaaaagttctccgtcaatttatacatcttcatcctcgtattcgaacccacacggtgaccagtctacttggtaggagggagaggcggcctgagtcctggactcctggtccctcccgctggggctgggctacctcgttcgcttcgctgcctctgcctactcctctctcccctctttctccgctcatgtgctggtccatcgtctgcctcctcggtttgtcctgaatccttggacagacgcacacaggctcagctcaggtaaggtacaggcgtacagccgctgcctttcccgttgcaaatcttttcgccccccctgcaccatcctggtctcaccgtcactacgactcgatcttgctcgccactcgcctccctggctctctccctacttcccatgctgatctcggcgtgcttcgcttcctcctgccccagagcccggcctcgttggaaactcgactgatttcccttggcggttgctggatcctttggcgttccccatccggccaagaatcctgcaagagcctgcttggagttggagccggccaaacctgctgccgtcgacgtctcgggcgaggcagccttgagcatcagtctccttgacgaggcaagcaggccatgatgagcttcaagggacacgaggggttcggtcaggtgtccggagccgggatgagccaggcctcccatggcgccgcgcctgccggagccccgctgccgtggtgggctggggcccagctgctgtccggcgagccggcgcccctgtccccggaggaggcgccccgggacacccagttccaggtcgtgccgggggcctctcagggcacgccggatccagcgccgcccaagggagggacacctaaggtcctcaagttctctgtgttccaagggaatttggagtcgggtggtaaaggagagaaaaccccaaagaactctaccgctgtcgttctgcagtcgccattcgcggaatacaatggtcgtttcgagatcggtctcggtcaatctatgctggtcccttccagttattcttgtgctgaccagtgctatggcatgcttacgacttatggaatgagatccatgtctggtgggagaatgctgttgccactaattgcgccagccgatgcacccgtttatgtgaacccgaaacagtacgaaggcatcctccgtcgtcgccgtgctcgcgctaaggcggagagcgagaacaggctcaccaaaggcagaaaggtgtgagaagactcttcttgtagctggccttatctccatgagtcgcgccacctccacgcgatgcgccgggtgagaggctccggcgggcgcttcctcaacacgaataaaggagggcacggcacggacgttgctgcaaacgggggcagcaagatggcggcggcggcggcaccatcccgtctcgccatgccccctagcgctgagcctccatggctgtcagggctcagcgacggcagcaacccgtgctgccactcccggagtagtgtctccagcttgtccgggtcctacgtggcgagcatctacggtggcttggagcagcacctccgggcgccgcccttcttcaccccgctgccgcccgtcatggacggcgaccacggcggccccacggccgccaccatctcctccttcaagtgggcggccagcgacggctgctgcgagctcctcagggcgtgaaccgaggagggaggggatggctactcagacgaacggccttctccccgatggctggttgtctgtaggcaaatcattcttggctgttctgcattggggtgcgacctacacatcatccgcctaccgtacctaccccacccgtgtccctgaaattccagggtgcttgggttacttacaggggtcttgtgtggtgatgtggctcccccatatgcatttgctgtaacatagcgtacccaaaccactgttgcttggtacttctcgctatcactgcctcatcagtatggattctgcatttctgcgttgtcacagtgtatgaataattgaggcgtcagacttcagggttgctccagttcttggagataggtctgggtttgtttgaagcttgcctggaggtctgaaactttgtgtttggtgaagatgctacgttattgcagtttgaatctgtaagtttgggatcagcattcagttgttgcatcgtctgtgctctggtgccgaggtgttcgttctgaatatttgattcaattcaaaatcttcagctaagttactactgggacacataaagtttagcttttttattttgcttttgcaatatattcaaatttcac

SEQ ID NO: 48195 - DNA, 1205 bp, Zea Mays
cggccatgcccccaaccctagccgccactacctgctccctctccctagcagccgacagctgccatccagcgccaccaggaaagccgcccaggcgccccgcctctgcatccgcccgccaggagcagcgcccctgcaacccgctctgaagactcgacgcccagagccgcgcgcaaccccgttcgccgccccgccctccgtctcccgtcgcctcgcccctgcgctccgtcagctgcccctccccgaaccttctgcaaattcctattgtttcaagctgcatagaagtctgggattttctgagtgtggattcacagacatatattttcacagacactctctcagttatccaaatattgtcagtcagtttagatggtcggtcagccaccagggcctccccgtccggccgtcgtgcgtccaacagtcgggcaccggcgggcggcggccgctcgcccctgcggcttgggcgctcggccacagccagtgcgggccgtgcggcagtgtccactcgggcctcggccagctgctagctaatcctaatcagtaattacttttgcactttgtggacaagaagttgtgaatgccttcagtgctgcagtgttgggcctatcttcaggttgtgtttcttctcaagtcaaccaagagcagcctcatgatggttcccctcctctgagagaagatgacaagaatgggcattatgtttttgctgttggagataatctcacatctcgttataagatcaatgcaaaaatgggagaagtctacaggaatcagtggtcttctccgctacgctcctgaaatatttgagcagtctggagtggctagtttgttttcagacattggactttctcctcattcaacatcaattctcatgagtacccttaatgctttgctgatactcccttgtataactgccgcaatgctgctgatggatgtctgcgggagaaggtagaatctgagacaccatgaaaattagtgatgcagttgtggacttttgaacaatagctggagtgatatgaaacattagtgatgtagttgtgggcttttgaactgcttcaagctggagtgatgtcgctgtggtgcttttgtgactgatctagctagctatctgtaaatgatctagttgtgaatgatattataattgtgatgtttttgtgaatatataattgtggtgcttttgtgtttatgtgatggatctataactgtggtat

SEQ ID NO: 48196 - DNA, 1090 bp, Zea Mays
cggccatgcccccaaccctagccgccactacctgctccctctccctagcagccgacagctgccatccagcgccaccaggaaagccgcccaggcgccccgcctctgcatccgcccgccaggagcagcgcccctgcaacccgctctgaagactcgacgcccagagccgcgcgcaaccccgttcgccgccccgccctccgtctcccgtcgcctcgcccctgcgctccgtcagctgcccctccccgtcagtttagatggtcggtcagccaccagggcctccccgtccggccgtcgtgcgtccaacagtcgggcaccggcgggcggcggccgctcgcccctgcggcttgggcgctcggccacagccagtgcgggccgtgcggcagtgtccactcgggcctcggccagctgctagctaatcctaatcagtaattacttttgcactttgtggacaagaagttgtgaatgccttcagtgctgcagtgttgggcctatcttcaggttgtgtttcttctcaagtcaaccaagagcagcctcatgatggttcccctcctctgagagaagatgacaagaatgggcattatgtttttgctgttggagataatctcacatctcgttataagatcaatgcaaaaatgggagaagtctacaggaatcagtggtcttctccgctacgctcctgaaatatttgagcagtctggagtggctagtttgttttcagacattggactttctcctcattcaacatcaattctcatgagtacccttaatgctttgctgatactcccttgtataactgccgcaatgctgctgatggatgtctgcgggagaaggtagaatctgagacaccatgaaaattagtgatgcagttgtggacttttgaacaatagctggagtgatatgaaacattagtgatgtagttgtgggcttttgaactgcttcaagctggagtgatgtcgctgtggtgcttttgtgactgatctagctagctatctgtaaatgatctagttgtgaatgatattataattgtgatgtttttgtgaatatataattgtggtgcttttgtgtttatgtgatggatctataactgtggtat

SEQ ID NO: 48197 - DNA, 960 bp, Zea Mays
cccaaccctagccgccactacctgctccctctccctagcagccgacagctgccatccagcgccaccaggaaagccgcccaggcgccccgcctctgcatccgcccgccaggagcagcgcccctgcaacccgctctgaagactcgacgcccagagccgcgcgcaaccccgttcgccgccccgccctccgtctcccgtcgcctcgcccctgcgctccgtcagctgcccctccccgaaccttctgcaaattcctattgtttcaagctgcatagaagtctgggattttctgagtgtggattcacagtttgcactttgtggacaagaagttgtgaatgccttcagtgctgcagtgttgggcctatcttcaggttgtgtttcttctcaagtcaaccaagagcagcctcatgatggttcccctcctctgagagaagatgacaagaatgggcattatgtttttgctgttggagataatctcacatctcgttataagatcaatgcaaaaatgggagaagtctacaggaatcagtggtcttctccgctacgctcctgaaatatttgagcagtctggagtggctagtttgttttcagacattggactttctcctcattcaacatcaattctcatgagtacccttaatgctttgctgatactcccttgtataactgccgcaatgctgctgatggatgtctgcgggagaaggtagaatctgagacaccatgaaaattagtgatgcagttgtggacttttgaacaatagctggagtgatatgaaacattagtgatgtagttgtgggcttttgaactgcttcaagctggagtgatgtcgctgtggtgcttttgtgactgatctagctagctatctgtaaatgatctagttgtgaatgatattataattgtgatgtttttgtgaatatataattgtggtgcttttgtgtttatgtgatggatctataactgtggtat

SEQ ID NO: 48198 - DNA, 1126 bp, Zea Mays
cccaaccctagccgccactacctgctccctctccctagcagccgacagctgccatccagcgccaccaggaaagccgcccaggcgccccgcctctgcatccgcccgccaggagcagcgcccctgcaacccgctctgaagactcgacgcccagagccgcgcgcaaccccgttcgccgccccgccctccgtctcccgtcgcctcgcccctgcgctccgtcagctgcccctccccgacatatattttcacagacactctctcagttatccaaatattgtcagtcagtttagatggtcggtcagccaccagggcctccccgtccggccgtcgtgcgtccaacagtcgggcaccggcgggcggcggccgctcgcccctgcggcttgggcgctcggccacagccagtgcgggccgtgcggcagtgtccactcgggcctcggccagctgctagctaatcctaatcagtaattacttttgcactttgtggacaagaagttgtgaatgccttcagtgctgcagtgttgggcctatcttcaggttgtgtttcttctcaagtcaaccaagagcagcctcatgatggttcccctcctctgagagaagatgacaagaatgggcattatgtttttgctgttggagataatctcacatctcgttataagatcaatgcaaaaatgggagaagtctacaggaatcagtggtcttctccgctacgctcctgaaatatttgagcagtctggagtggctagtttgttttcagacattggactttctcctcattcaacatcaattctcatgagtacccttaatgctttgctgatactcccttgtataactgccgcaatgctgctgatggatgtctgcgggagaaggtagaatctgagacaccatgaaaattagtgatgcagttgtggacttttgaacaatagctggagtgatatgaaacattagtgatgtagttgtgggcttttgaactgcttcaagctggagtgatgtcgctgtggtgcttttgtgactgatctagctagctatctgtaaatgatctagttgtgaatgatattataattgtgatgtttttgtgaatatataattgtggtgcttttgtgtttatgtgatggatctataactgtggtat

SEQ ID NO: 48199 - DNA, 1172 bp, Zea Mays
ccaaccctagccgccactacctgctccctctccctagcagccgacagctgccatccagcgccaccaggaaagccgcccaggcgccccgcctctgcatccgcccgccaggagcagcgcccctgcaacccgctctgaagactcgacgcccagagccgcgcgcaaccccgttcgccgccccgccctccgtctcccgtcgcctcgcccctgcgctccgtcagctgcccctccccgaaccttctgcaaattcctattgtttcaagctgcatagaagtctgggattttctgagtgtggattcacaggttagtttccttatttaactctttatcatctcaatattttcaaaactgacgttcaataaattggggaatgtctctttgcagacatatattttcacagacactctctcagttatccaaatattgtcagtttgcactttgtggacaagaagttgtgaatgccttcagtgctgcagtgttgggcctatcttcaggttgtgtttcttctcaagtcaaccaagagcagcctcatgatggttcccctcctctgagagaagatgacaagaatgggcattatgtttttgctgttggagataatctcacatctcgttgtaattttctgccatcagcgtctcttgttaccaatgcaaatctgtttccatggttggttcttattgattcttttctatgcttgcagataagatcaatgcaaaaatgggagaagtctacaggaatcagtggtcttctccgctacgctcctgaaatatttgagcagtctggagtggctagtttgttttcagacattggactttctcctcattcaacatcaattctcatgagtacccttaatgctttgctgatactcccttgtataactgccgcaatgctgctgatggatgtctgcgggagaaggtagaatctgagacaccatgaaaattagtgatgcagttgtggacttttgaacaatagctggagtgatatgaaacattagtgatgtagttgtgggcttttgaactgcttcaagctggagtgatgtcgctgtggtgcttttgtgactgatctagctagctatctgtaaatgatctagttgtgaatgatattataattgtgatgtttttgtgaatatataattgtggtgcttttgtgtttatgtgatggatctataactgtggtat

SEQ ID NO: 48200 - DNA, 1557 bp, Zea Mays
ccctagccgccactacctgctccctctccctagcagccgacagctgccatccagcgccaccaggaaagccgcccaggcgccccgcctctgcatccgcccgccaggagcagcgcccctgcaacccgctctgaagactcgacgcccagagccgcgcgcaaccccgttcgccgccccgccctccgtctcccgtcgcctcgcccctgcgctccgtcagctgcccctccccgaaccttctgcaaattcctattgtttcaagctgcatagaagtctgggattttctgagtgtggattcacagacatatattttcacagacactctctcagttatccaaatattgtcagtcagtttagatggtcggtcagccaccagggcctccccgtccggccgtcgtgcgtccaacagtcgggcaccggcgggcggcggccgctcgcccctgcggcttgggcgctcggccacagccagtgcgggccgtgcggcagtgtccactcgggcctcggccagctgctagctaatcctaatcagtaattacttttgcactttgtggacaagaagttgtgaatgccttcagtgctgcagtgttgggcctatcttcaggttgtgtttcttctcaagtcaaccaagagcagcctcatgatggttcccctcctctgagagaagatgacaagaatgggcattatgtttttgctgttggagataatctcacatctcgttataagatcaatgcaaaaatgggagaaggttagtttggatgaccatatattctgaaatagttgatttaactcgattgggcatgccaatacattcaacaaattttgtctataactgaatgtagctgggactacttggtgtaacctgttagcccctttgatcttattgtgcacacagaaaaaagataactaattttatgagataattccttgcctttgtttgcaaaagtactttggccgataagctggtgttgactaatcattgtatgttgattatgtattcaattcagcatggagttcagtttacttgcatactggctaccatgtatacagaatgctagtgtctgctgacacgttcttttttgcttgttttttgtttgctcttctcaaaaatatagtctacaggaatcagtggtcttctccgctacgctcctgaaatatttgagcagtctggagtggctagtttgttttcagacattggactttctcctcattcaacatcaattctcatgagtacccttaatgctttgctgatactcccttgtataactgccgcaatgctgctgatggatgtctgcgggagaaggtagaatctgagacaccatgaaaattagtgatgcagttgtggacttttgaacaatagctggagtgatatgaaacattagtgatgtagttgtgggcttttgaactgcttcaagctggagtgatgtcgctgtggtgcttttgtgactgatctagctagctatctgtaaatgatctagttgtgaatgatattataattgtgatgtttttgtgaatatataattgtggtgcttttgtgtttatgtgatggatctataactgtggtat

SEQ ID NO: 48201 - DNA, 1509 bp, Zea Mays
ctagccgccactacctgctccctctccctagcagccgacagctgccatccagcgccaccaggaaagccgcccaggcgccccgcctctgcatccgcccgccaggagcagcgcccctgcaacccgctctgaagactcgacgcccagagccgcgcgcaaccccgttcgccgccccgccctccgtctcccgtcgcctcgcccctgcgctccgtcagctgcccctccccgaaccttctgcaaattcctattgtttcaagctgcatagaagtctgggattttctgagtgtggattcacagtcagtttagatggtcggtcagccaccagggcctccccgtccggccgtcgtgcgtccaacagtcgggcaccggcgggcggcggccgctcgcccctgcggcttgggcgctcggccacagccagtgcgggccgtgcggcagtgtccactcgggcctcggccagctgctagctaatcctaatcagtaattacttttgcactttgtggacaagaagttgtgaatgccttcagtgctgcagtgttgggcctatcttcaggttgtgtttcttctcaagtcaaccaagagcagcctcatgatggttcccctcctctgagagaagatgacaagaatgggcattatgtttttgctgttggagataatctcacatctcgttataagatcaatgcaaaaatgggagaaggttagtttggatgaccatatattctgaaatagttgatttaactcgattgggcatgccaatacattcaacaaattttgtctataactgaatgtagctgggactacttggtgtaacctgttagcccctttgatcttattgtgcacacagaaaaaagataactaattttatgagataattccttgcctttgtttgcaaaagtactttggccgataagctggtgttgactaatcattgtatgttgattatgtattcaattcagcatggagttcagtttacttgcatactggctaccatgtatacagaatgctagtgtctgctgacacgttcttttttgcttgttttttgtttgctcttctcaaaaatatagtctacaggaatcagtggtcttctccgctacgctcctgaaatatttgagcagtctggagtggctagtttgttttcagacattggactttctcctcattcaacatcaattctcatgagtacccttaatgctttgctgatactcccttgtataactgccgcaatgctgctgatggatgtctgcgggagaaggtagaatctgagacaccatgaaaattagtgatgcagttgtggacttttgaacaatagctggagtgatatgaaacattagtgatgtagttgtgggcttttgaactgcttcaagctggagtgatgtcgctgtggtgcttttgtgactgatctagctagctatctgtaaatgatctagttgtgaatgatattataattgtgatgtttttgtgaatatataattgtggtgcttttgtgtttatgtgatggatctataactgtggtat

SEQ ID NO: 48202 - DNA, 1238 bp, Zea Mays
cctgctccctctccctagcagccgacagctgccatccagcgccaccaggaaagccgcccaggcgccccgcctctgcatccgcccgccaggagcagcgcccctgcaacccgctctgaagactcgacgcccagagccgcgcgcaaccccgttcgccgccccgccctccgtctcccgtcgcctcgcccctgcgctccgtcagctgcccctccccgtttgcactttgtggacaagaagttgtgaatgccttcagtgctgcagtgttgggcctatcttcaggttgtgtttcttctcaagtcaaccaagagcagcctcatgatggttcccctcctctgagagaagatgacaagaatgggcattatgtttttgctgttggagataatctcacatctcgttataagatcaatgcaaaaatgggagaaggttagtttggatgaccatatattctgaaatagttgatttaactcgattgggcatgccaatacattcaacaaattttgtctataactgaatgtagctgggactacttggtgtaacctgttagcccctttgatcttattgtgcacacagaaaaaagataactaattttatgagataattccttgcctttgtttgcaaaagtactttggccgataagctggtgttgactaatcattgtatgttgattatgtattcaattcagcatggagttcagtttacttgcatactggctaccatgtatacagaatgctagtgtctgctgacacgttcttttttgcttgttttttgtttgctcttctcaaaaatatagtctacaggaatcagtggtcttctccgctacgctcctgaaatatttgagcagtctggagtggctagtttgttttcagacattggactttctcctcattcaacatcaattctcatgagtacccttaatgctttgctgatactcccttgtataactgccgcaatgctgctgatggatgtctgcgggagaaggtagaatctgagacaccatgaaaattagtgatgcagttgtggacttttgaacaatagctggagtgatatgaaacattagtgatgtagttgtgggcttttgaactgcttcaagctggagtgatgtcgctgtggtgcttttgtgactgatctagctagctatctgtaaatgatctagttgtgaatgatattataattgtgatgtttttgtgaatatataattgtggtgcttttgtgtttatgtgatggatctataactgtggtat

SEQ ID NO: 48203 - DNA, 1110 bp, Zea Mays
ctgctccctctccctagcagccgacagctgccatccagcgccaccaggaaagccgcccaggcgccccgcctctgcatccgcccgccaggagcagcgcccctgcaacccgctctgaagactcgacgcccagagccgcgcgcaaccccgttcgccgccccgccctccgtctcccgtcgcctcgcccctgcgctccgtcagctgcccctccccgaaccttctgcaaattcctattgtttcaagctgcatagaagtctgggattttctgagtgtggattcacagacatatattttcacagacactctctcagttatccaaatattgtcagtcagtttagatggtcggtcagccaccagggcctccccgtccggccgtcgtgcgtccaacagtcgggcaccggcgggcggcggccgctcgcccctgcggcttgggcgctcggccacagccagtgcgggccgtgcggcagtgtccactcgggcctcggccagctgctagctaatcctaatcagtaattactgttgtgtttcttctcaagtcaaccaagagcagcctcatgatggttcccctcctctgagagaagatgacaagaatgggcattatgtttttgctgttggagataatctcacatctcgttataagatcaatgcaaaaatgggagaagtctacaggaatcagtggtcttctccgctacgctcctgaaatatttgagcagtctggagtggctagtttgttttcagacattggactttctcctcattcaacatcaattctcatgagtacccttaatgctttgctgatactcccttgtataactgccgcaatgctgctgatggatgtctgcgggagaaggtagaatctgagacaccatgaaaattagtgatgcagttgtggacttttgaacaatagctggagtgatatgaaacattagtgatgtagttgtgggcttttgaactgcttcaagctggagtgatgtcgctgtggtgcttttgtgactgatctagctagctatctgtaaatgatctagttgtgaatgatattataattgtgatgtttttgtgaatatataattgtggtgcttttgtgtttatgtgatggatctataactgtggtat

SEQ ID NO: 48204 - DNA, 1352 bp, Zea Mays
ctgctccctctccctagcagccgacagctgccatccagcgccaccaggaaagccgcccaggcgccccgcctctgcatccgcccgccaggagcagcgcccctgcaacccgctctgaagactcgacgcccagagccgcgcgcaaccccgttcgccgccccgccctccgtctcccgtcgcctcgcccctgcgctccgtcagctgcccctccccgaaccttctgcaaattcctattgtttcaagctgcatagaagtctgggattttctgagtgtggattcacagacatatattttcacagacactctctcagttatccaaatattgtcagtttgcactttgtggacaagaagttgtgaatgccttcagtgctgcagtgttgggcctatcttcaggttgtgtttcttctcaagtcaaccaagagcagcctcatgatggttcccctcctctgagagaagatgacaagaatgggcattatgtttttgctgttggagataatctcacatctcgttataagatcaatgcaaaaatgggagaaggttagtttggatgaccatatattctgaaatagttgatttaactcgattgggcatgccaatacattcaacaaattttgtctataactgaatgtagctgggactacttggtgtaacctgttagcccctttgatcttattgtgcacacagaaaaaagataactaattttatgagataattccttgcctttgtttgcaaaagtactttggccgataagctggtgttgactaatcattgtatgttgattatgtattcaattcagcatggagttcagtttacttgcatactggctaccatgtatacagaatgctagtgtctgctgacacgttcttttttgcttgttttttgtttgctcttctcaaaaatatagtctacaggaatcagtggtcttctccgctacgctcctgaaatatttgagcagtctggagtggctagtttgttttcagacattggactttctcctcattcaacatcaattctcatgagtacccttaatgctttgctgatactcccttgtataactgccgcaatgctgctgatggatgtctgcgggagaaggtagaatctgagacaccatgaaaattagtgatgcagttgtggacttttgaacaatagctggagtgatatgaaacattagtgatgtagttgtgggcttttgaactgcttcaagctggagtgatgtcgctgtggtgcttttgtgactgatctagctagctatctgtaaatgatctagttgtgaatgatattataattgtgatgtttttgtgaatatataattgtggtgcttttgtgtttatgtgatggatctataactgtggtat

SEQ ID NO: 48205 - DNA, 618 bp, Zea Mays
caggaaagccgcccaggcgccccgcctctgcatccgcccgccaggagcagcgcccctgcaacccgctctgaagactcgacgcccagagccgcgcgcaaccccgttcgccgccccgccctccgtctcccgtcgcctcgcccctgcgctccgtcagctgcccctccccgtctacaggaatcagtggtcttctccgctacgctcctgaaatatttgagcagtctggagtggctagtttgttttcagacattggactttctcctcattcaacatcaattctcatgagtacccttaatgctttgctgatactcccttgtataactgccgcaatgctgctgatggatgtctgcgggagaaggtagaatctgagacaccatgaaaattagtgatgcagttgtggacttttgaacaatagctggagtgatatgaaacattagtgatgtagttgtgggcttttgaactgcttcaagctggagtgatgtcgctgtggtgcttttgtgactgatctagctagctatctgtaaatgatctagttgtgaatgatattataattgtgatgtttttgtgaatatataattgtggtgcttttgtgtttatgtgatggatctataactgtggtat

SEQ ID NO: 48206 - DNA, 1419 bp, Zea Mays
caggaaagccgcccaggcgccccgcctctgcatccgcccgccaggagcagcgcccctgcaacccgctctgaagactcgacgcccagagccgcgcgcaaccccgttcgccgccccgccctccgtctcccgtcgcctcgcccctgcgctccgtcagctgcccctccccgacatatattttcacagacactctctcagttatccaaatattgtcagtcagtttagatggtcggtcagccaccagggcctccccgtccggccgtcgtgcgtccaacagtcgggcaccggcgggcggcggccgctcgcccctgcggcttgggcgctcggccacagccagtgcgggccgtgcggcagtgtccactcgggcctcggccagctgctagctaatcctaatcatttgcactttgtggacaagaagttgtgaatgccttcagtgctgcagtgttgggcctatcttcaggttgtgtttcttctcaagtcaaccaagagcagcctcatgatggttcccctcctctgagagaagatgacaagaatgggcattatgtttttgctgttggagataatctcacatctcgttataagatcaatgcaaaaatgggagaaggttagtttggatgaccatatattctgaaatagttgatttaactcgattgggcatgccaatacattcaacaaattttgtctataactgaatgtagctgggactacttggtgtaacctgttagcccctttgatcttattgtgcacacagaaaaaagataactaattttatgagataattccttgcctttgtttgcaaaagtactttggccgataagctggtgttgactaatcattgtatgttgattatgtattcaattcagcatggagttcagtttacttgcatactggctaccatgtatacagaatgctagtgtctgctgacacgttcttttttgcttgttttttgtttgctcttctcaaaaatatagtctacaggaatcagtggtcttctccgctacgctcctgaaatatttgagcagtctggagtggctagtttgttttcagacattggactttctcctcattcaacatcaattctcatgagtacccttaatgctttgctgatactcccttgtataactgccgcaatgctgctgatggatgtctgcgggagaaggtagaatctgagacaccatgaaaattagtgatgcagttgtggacttttgaacaatagctggagtgatatgaaacattagtgatgtagttgtgggcttttgaactgcttcaagctggagtgatgtcgctgtggtgcttttgtgactgatctagctagctatctgtaaatgatctagttgtgaatgatattataattgtgatgtttttgtgaatatataattgtggtgcttttgtgtttatgtgatggatctataactgtggtat

SEQ ID NO: 48207 - DNA, 2081 bp, Zea Mays
  misc_feature (1)..(2): n is a, c, g, or t
nnaacgtccccttttctctctgctgtctccctctcttttattccaatacttttccctaaacatagaaactagggagcagtataatgctcaataaggtaactaatactaccattacaaaaatgagggatacttgctaccaaataagtcacaactgattactttccataacctactgtttcctaaaatacactctattcggctgggccatatcatttttattttacctttatagctatttttcacttgacattttattgtcgtgtgtctgcacttgttactgatgtcctagtagaagttatttgcacaatgacatctcactttggttttaccttttcgccttgcaggttgtggtggctgctgaaactggaggtgccctaggtggcatggtcaggcagctatcaattgaccaatttgaaaatgaagggagaagagtcagctatggaaccccagagaacgcaactgcagcaagaaagctactagatagacaaatgtctattaatagtattcctaaaaaggtaattgcatctctgttgaaacctcgtggctggaaaccccctgtccggaggcagttcttcttggattgcaatgaaattgcagacctatgtgacagtgctgagcgaatattttcaagtgaaccaagtgttttgcagcttaaagctcctgttaagatatttggagatttacacggacaatttggagatctgatgaggttatttgatgaatatggtgctccttcgactgcaggtgacattgcttacattgattatctattcttgggggattatgtagatcgcggccagcatagtttagaaactatcactcttcttcttgcattgaaggttgaatatcctcaaaatgtacatttgattcgaggaaatcacgaagctgcagatatcaatgctttgtttggtttccgaatagagtgtatagaacgaatgaaaagaaaatcatctgtatgcatggtggcatcggtcggtcaatcaaccatgtcgagcaaattgagaatcttcaaaggccaattacaatggaagctggctcggttgttctcatggatcttctatggtctgatccaacagagaatgacagtgttgaaggactgaggcccaatgcccggggtcctggtcttgttacatttgggcctgatcgggttatggagttctgcaacaacaatgatcttcagttaattgtacgagcacatgagtgtgtgatggatggctttgaacgctttgcccaaggtcatctgatcactcttttctccgcaacaaattattgtggtactgcaaataatgcaggtgcgatcttggttttgggtagagatcttgtggttgtgccaaaactaatccatcctttgccccctgcaattacatcacctgaagcgtcgccggatcatattgaggacacatggatgcaggagctaaatgctaacagaccaccaactccgaccagggggcgtccccaagcagtagctaatgaacggggctctctcgcctggatatagtagattcattacacattggttggtatgatccatatgaagcctgagtgatcaggatcttgttatttcatttgtgttcgggagaggggttggtccacagccatacggaaacgaaaggttgatgtacagggagcagagaggactaaagtcggtagaagtgagcttgatctaggacagtgctctccaattcgttccattgaacacaagtagcagtacaaatagaactcatcctaagatccttggaggcttcacttgtatatactcagctgggtggataggtggtgggtgtatggtgtgattttggcatccaattggaatggcaaaggtaatagtgttattgtactaggaattctttccctttttttttctttctcggggcctagaattctcatgttgcaaattatttttgagttgccacagggatttgccaggagggctcgaagtcctgttgttttgtataatagtgctctcagcctcattgtaatttcagacacatgctgatgtgtacaattttgtgttaaagtgagaattttttgggggtggagaatggacggcttgatttatagtggaggtaaagagctgttat

SEQ ID NO: 48208 - DNA, 2078 bp, Zea Mays
ctctctgctgtctccctctcttttattccaatacttttccctaaacatagaaactagggagcagtataatgctcaataaggtaactaatactaccattacaaaaatgagggatacttgctaccaaataagtcacaactgattactttccataacctactgtttcctaaaatacactctattcggctgggccatatcatttttattttacctttatagctatttttcacttgacattttattgtcgtgtgtctgcacttgttactgatgtcctagtagaagttatttgcacaatgacatctcactttggttttaccttttcgccttgcaggttgtggtggctgctgaaactggaggtgccctaggtggcatggtcaggcagctatcaattgaccaatttgaaaatgaagggagaagagtcagctatggaaccccagagaacgcaactgcagcaagaaagctactagatagacaaatgtctattaatagtattcctaaaaaggtaattgcatctctgttgaaacctcgtggctggaaaccccctgtccggaggcagttcttcttggattgcaatgaaattgcagacctatgtgacagtgctgagcgaatattttcaagtgaaccaagtgttttgcagcttaaagctcctgttaagatatttggagatttacacggacaatttggagatctgatgaggttatttgatgaatatggtgctccttcgactgcaggtgacattgcttacattgattatctattcttgggggattatgtagatcgcggccagcatagtttagaaactatcactcttcttcttgcattgaaggttgaatatcctcaaaatgtacatttgattcgaggaaatcacgaagctgcagatatcaatgctttgtttggtttccgaatagagtgtatagaacgaatgggcgaaagagatggtatctggacatggcatcgaatgaataggctatttaattggcttcctttggctgcgcttatagaaaagaaaatcatctgtatgcatggtggcatcggtcggtcaatcaaccatgtcgagcaaattgagaatcttcaaaggccaattacaatggaagctggctcggttgttctcatggatcttctatggtctgatccaacagagaatgacagtgttgaaggactgaggcccaatgcccggggtcctggtcttgttacatttgggcctgatcgggttatggagttctgcaacaacaatgatcttcagttaattgtacgagcacatgagtgtgtgatggatggctttgaacgctttgcccaaggtcatctgatcactcttttctccgcaacaaattattgtggtactgcaaataatgcaggtgcgatcttggttttgggtagagatcttgtggttgtgccaaaactaatccatcctttgccccctgcaattacatcacctgaagcgtcgccggatcatattgaggacacatggatgcaggagctaaatgctaacagaccaccaactccgaccagggggcgtccccaagcagtagctaatgaacggggctctctcgcctggatatagtagattcattacacattggttggtatgatccatatgaagcctgagtgatcaggatcttgttatttcatttgtgttcgggagaggggttggtccacagccatacggaaacgaaaggttgatgtacagggagcagagaggactaaagtcggtagaagtgagcttgatctaggacagtgctctccaattcgttccattgaacacaagtagcagtacaaatagaactcatcctaagatccttggaggcttcacttgtatatactcagctgggtggataggtggtgggtgtatggtgtgattttggcatccaattggaatggcaaagggatttgccaggagggctcgaagtcctgttgttttgtataatagtgctctcagcctcattgtaatttcagacacatgctgatgtgtacaattttgtgttaaagtgagaattttttgggggtggagaatggacggcttgatttatagtggaggtatgcagggaactatagctgttataggtgcattatgacacaatct

SEQ ID NO: 48209 - DNA, 1786 bp, Zea Mays
cgtgtgtctgcacttgttactgatgtcctagtagaagttatttgcacaatgacatctcactttggttttaccttttcgccttgcaggttgtggtggctgctgaaactggaggtgccctaggtggcatggtcaggcagctatcaattgaccaatttgaaaatgaagggagaagagtcagctatggaaccccagagaacgcaactgcagcaagaaagctactagatagacaaatgtctattaatagtattcctaaaaaggtaattgcatctctgttgaaacctcgtggctggaaaccccctgtccggaggcagttcttcttggattgcaatgaaattgcagacctatgtgacagtgctgagcgaatattttcaagtgaaccaagtgttttgcagcttaaagctcctgttaagatatttggagatttacacggacaatttggagatctgatgaggttatttgatgaatatggtgctccttcgactgcaggtgacattgcttacattgattatctattcttgggggattatgtagatcgcggccagcatagtttagaaactatcactcttcttcttgcattgaaggttgaatatcctcaaaatgtacatttgattcgaggaaatcacgaagctgcagatatcaatgctttgtttggtttccgaatagagtgtatagaacgaatgggcgaaagagatggtatctggacatggcatcgaatgaataggctatttaattggcttcctttggctgcgcttatagaaaagaaaatcatctgtatgcatggtggcatcggtcggtcaatcaaccatgtcgagcaaattgagaatcttcaaaggccaattacaatggaagctggctcggttgttctcatggatcttctatggtctgatccaacagagaatgacagtgttgaaggactgaggcccaatgcccggggtcctggtcttgttacatttgggcctgatcgggttatggagttctgcaacaacaatgatcttcagttaattgtacgagcacatgagtgtgtgatggatggctttgaacgctttgcccaaggtcatctgatcactcttttctccgcaacaaattattgtggtgcgatcttggttttgggtagagatcttgtggttgtgccaaaactaatccatcctttgccccctgcaattacatcacctgaagcgtcgccggatcatattgaggacacatggatgcaggagctaaatgctaacagaccaccaactccgaccagggggcgtccccaagcagtagctaatgaacggggctctctcgcctggatatagtagattcattacacattggttggtatgatccatatgaagcctgagtgatcaggatcttgttatttcatttgtgttcgggagaggggttggtccacagccatacggaaacgaaaggttgatgtacagggagcagagaggactaaagtcggtagaagtgagcttgatctaggacagtgctctccaattcgttccattgaacacaagtagcagtacaaatagaactcatcctaagatccttggaggcttcacttgtatatactcagctgggtggataggtggtgggtgtatggtgtgattttggcatccaattggaatggcaaagggatttgccaggagggctcgaagtcctgttgttttgtataatagtgctctcagcctcattgtaatttcagacacatgctgatgtgtacaattttgtgttaaagtgagaattttttgggggtggagaatggacggcttgatttatagtggaggtaaagagctgttat

SEQ ID NO: 48210 - DNA, 606 bp, Zea Mays
gccaattttcctattggttagattagaaaaaaaaattaaaatcaagtattcatggataagtattagatgagagaaaaactaggatatccaccttcacgcccaatgggagagttaagcctccggagatgtgaaagtgtagaagcataggtcaggcgattgagcacctgagaaacccctgctctggttccagcttggttagcctgtccccagtttccagtagcaagggagtacttcaaaccactggtaatagtttttgcttttatagcaaattgcaaattaacttcctttccattatctacacactaggatcaaggaaaaggaagagttaataaccacaaggatcgaatgggtggggaaaatagaaaatttcacagtttagacagcagaaaaccttttgcacataagatctcacgtcccttgttaacttcctgaaaagctatagttgcagaagaagaaaaatcaggcaattaatccagtaaaaaaagggttgacaacatttaatattcttgtatatttaggcaaaccattctaaacagccctccaagcagtggaccagcaagatctagtcgtttgtttccataatgatctcggtcatcctcagctctt

SEQ ID NO: 48211 - DNA, 2560 bp, Zea Mays
gtcacataaaagcagcccggtgtgatgcaaagctctggtcggcccaattacccccttcggccacttcgggcaccaacacctctgcggctctgccgtcctatcgaaaaagaaaaaaaaaacaaaatgaataaacctccgcagaccacgcccaccaacgcccatggcccaggctctcgggcacgtcagaggcgatcacgacgcctgcacccagttcagtggtccaccatcatcgctcgtgtcgtgtgctcagccgcagccgtgaggatccccagttccccaacctctcttgctcgctcccctcccaggctcccacagtcacacactcgtctcgagcgccgccccaaacccccaaccaaaccctcgccgccgtcagcggccatggatcttcgccgcccgccgcgctcctcgtcgggcggcgtggagcccaagatccgccaggtcggcttcttcaccccggatgcctccgcgccgtccgagcccatgccccccgccgcggtggtccaggcaccatcggcgcagcagaggccggtcacggcgtcgcctccggcgtcagacgacttctcccaggggcgcctttcccctgtcatgatccctcccccgcgccatgccgaccacctcgccctgggcccacaccccccggcggcggccgacgtcgtcctcgccacttctgcgcccgtgcgttcgtccccgcgcctcgacatcgtgtccgagatcggcgacgacgactcctggtcacgcgctccttctgctgtggagctagtttgtttcagaagaaaacaagtgtggtttggctgaaatacggaatgagggtgctccagcttccattccacaaaagcagaaaacctcgaaggcagagagacgtgcaattcaggaggcccaacgtgctgctaaagctgcagcgaaggaggcagataaatcaggaaaatctgctggtgctgcgatgtccaagcaagccaagccagcaaaaactgctcagaagaaagatgtgccccaagctgcaagtacacttgcttctgagaagaaggctactgaacgtcctccagaaagagaaaaaaaattagatgctccccatccccgcatgcagtttgatgatgtgcataaggtggagaaagcaaaaaaacgtgcggtagtcaaccaatcagaagctcaaaacagagttgaactgttcaggcatcttcctcagtatgtgcatggcactcagcttcctgacctcgagtcaaaattctttcaattagaaccaatgcatccttctgtatacaaggttgggctccaatatttgtctggtgaagtatctggtggtaatgatcgttgtgtagcaatgcttcttgcattcaaagaggcaataaaagattacactacacctacaaataaaacactcagcagagatcttactgcaaaaatcagcagttatgtgtcatttcttatcgagtgtaggcctctttcaatcagcatgggcaatgctattaggtttctgaagagcaggatagcaaagctaccacatgcattgtcagagtctgaagccaaaactagtcttcagtctgatattgatcgttttataaatgagaagatagttcttgcagataaagttattgtcagccatgccatcacaaaggtcagagacaacgatgtcttactgacatatggatcatcaacagttgttgaaatgattttggattatgctcatgaacttgggaggaactttcgagttgtagtggtagattctcgcccaaagcttgagggacagggattgctgcggagattagtggcaaagggcattaattgcacatatacacacataaatgccatctcatacatcatgcatgaagtaactcgagttttgttgggtgcctcatcaatattatcaaatgggacagtttattctcgagttgggacagcatctgtggctatggttgcgcatgcatttggagttccagttctggtttgttgtgaggcatacaagtttcacgagagagtgcaacttgattctatatgtgctaatgagcttggcgatccagatgtcattttgaaaattcctgggaaggcagaggaccatcttaagaactgggcagacagtgcaaatctccaattgctaaatttaacgtacgatgccaccccacctgattatgtgtcgatgatcataactgactacggaatgcttccgccaactagtgtaccggtcattgtgagagagtaccgcaaggagcaactatggatatgactcactgccctactggcgtatggtagcatttttggtgacctttgcctgagtgcaacatgataaatgattgcactgctggcctgagtttttttttttgtctgtccttgttgcctttttaccaaaagacggtccgtcgtgttttgcgatcacctgtataacttgcaactctgaatggtgcactcgtgtgccctcggacatcgttgagtcgatggatcagtgatgagtaccatccttgggctctaaatatttcaatggaatgccacctccaaccacagagaaggttgaatatttgatatggtttttgatactctacgttgaacgctaatttttactgtagtaccc

SEQ ID NO: 48212 - DNA, 2395 bp, Zea Mays
gcccggtgtgatgcaaagctctggtcggcccaattacccccttcggccacttcgggcaccaacacctctgcggctctgccgtcctatcgaaaaagaaaaaaaaaacaaaatgaataaacctccgcagaccacgcccaccaacgcccatggcccaggctctcgggcacgtcagaggcgatcacgacgcctgcacccagttcagtggtccaccatcatcgctcgtgtcgtgtgctcagccgcagccgtgaggatccccagttccccaacctctcttgctcgctcccctcccaggctcccacagtcacacactcgtctcgagcgccgccccaaacccccaaccaaaccctcgccgccgtcagcggccatggatcttcgccgcccgccgcgctcctcgtcgggcggcgtggagcccaagatccgccaggtcggcttcttcaccccggatgcctccgcgccgtccgagcccatgccccccgccgcggtggtccaggcaccatcggcgcagcagaggccggtcacggcgtcgcctccggcgtcagacgacttctcccaggggcgcctttcccctgtcatgatccctcccccgcgccatgccgaccacctcgccctgggcccacaccccccggcggcggccgacgtcgtcctcgccacttctgcgcccgtgcgttcgtccccgcgcctcgacatcgtgtccgagatcggcgacgacgactcctggtcacgcgctccttctgctgtggagctagataaatcaggaaaatctgctggtgctgcgatgtccaagcaagccaagccagcaaaaactgctcagaagaaagatgtgccccaagctgcaagtacacttgcttctgagaagaaggctactgaacgtcctccagaaagagaaaaaaaattagatgctccccatccccgcatgcagtttgatgatgtgcataaggtggagaaagcaaaaaaacgtgcggtagtcaaccaatcagaagctcaaaacagagttgaactgttcaggcatcttcctcagtatgtgcatggcactcagcttcctgacctcgagtcaaaattctttcaattagaaccaatgcatccttctgtatacaaggttgggctccaatatttgtctggtgaagtatctggtggtaatgatcgttgtgtagcaatgcttcttgcattcaaagaggcaataaaagattacactacacctacaaataaaacactcagcagagatcttactgcaaaaatcagcagttatgtgtcatttcttatcgagtgtaggcctctttcaatcagcatgggcaatgctattaggtttctgaagagcaggatagcaaagctaccacatgcattgtcagagtctgaagccaaaactagtcttcagtctgatattgatcgttttataaatgagaagatagttcttgcagataaagttattgtcagccatgccatcacaaaggtcagagacaacgatgtcttactgacatatggatcatcaacagttgttgaaatgattttggattatgctcatgaacttgggaggaactttcgagttgtagtggtagattctcgcccaaagcttgagggacagggattgctgcggagattagtggcaaagggcattaattgcacatatacacacataaatgccatctcatacatcatgcatgaagtaactcgagttttgttgggtgcctcatcaatattatcaaatgggacagtttattctcgagttgggacagcatctgtggctatggttgcgcatgcatttggagttccagttctggtttgttgtgaggcatacaagtttcacgagagagtgcaacttgattctatatgtgctaatgagcttggcgatccagatgtcattttgaaaattcctgggaaggcagaggaccatcttaagaactgggcagacagtgcaaatctccaattgctaaatttaacgtacgatgccaccccacctgattatgtgtcgatgatcataactgactacggaatgcttccgccaactagtgtaccggtcattgtgagagagtaccgcaaggagcaactatggatatgactcactgccctactggcgtatggtagcatttttggtgacctttgcctgagtgcaacatgataaatgattgcactgctggcctgagtttttttttttgtctgtccttgttgcctttttaccaaaagacggtccgtcgtgttttgcgatcacctgtataacttgcaactctgaatggtgcactcgtgtgccctcggacatcgttgagtcgatggatcagtgatgagtaccatccttgggctctaaatatttcaatggaatgccacctccaaccacagagaaggttgaatatttgatatggtttttgatactctacgttgaacgctaatttttactgtagtaccc

SEQ ID NO: 48213 - DNA, 1848 bp, Zea Mays
ttcacgattcagccttgtgaactacccactttccaattcgacatcttcgccctcgaatcgagcttccctccaccgaatcgagttcctccatccaaatcgagctcattgccgccggatcgaggtctgcgtggatcgagctcgagctttggagaaggagaggaaacgggggacgggcacggggggagcaaggcaaccaaacgggtggagggaaacacgccaaacaggctcctcgatcgttccgggctcgggctgccacccgccattcggtgtcccctccttgacaggtgcccgagccgcgccgagctccagcctcatttccacggttggactgcacaacgtggagcggagatctatccgaacacgggattgattcatctggtggtgttacaacatagggtttttgatatagcaatgggattactcatgtataaatgaacaaagtttggagacagttggacctgacaattgccactttttacatgttttaactcattttttttctgggaaacaagtaattctgaagttaccttggaagtcctttgcgcttttgactggtcgggttgcataggccattgttgagaggtgatttggcctaagaatgggggctccaaaacaaaggtggacttctgaggaagaggctgctcttagagctggaatagcaaggcatggagttggaaaatggcgcacaatattgaaagatccagaatttagttccaccttatgctaccgctcaaatgttgatctcaaggacaagtggcgaaacatgaatgtgattgtcagtacatcgagttctcgtgacaaggcgaagtctgcattgaagagaatacgaactattcccaagaataatgagcacaccatggcaattaccagagttacttctgatattgatgatgagattgttgacgaaaagcctatagtatcattgcctagtgaagcaaagaacacatcaagttcgaagaaatctcacaggctagataatattataatggaggctataaagaacttaaatgagcctacgggatcacacagaactactattgctaattacatagaggagcaatattggccacctagtgattttgatcacttactatctgcaaaactgaaggacttgtccaccagtggcaaattgataaaggtgaaccggaagtacagaatagcacctagttcacccaattcagagcgccgaagccccaaaatgccactgttggaagatgtccaaagagagcctgtcaagatatggagtgatgatactaaaacccttaccagatctcaagttgatgctgaattggcacgtatggcaaccatgactgctgaggaagcttcagtggcagcggctcgagcagttgctgaagcagaggccatcatggcagaagctgaagctgcagcgaaagaggcagaggctgcagaagcagaagcccaagccgcacaagcatttgctgaagcagcgtttttgacattgaagaacagaaatgctggaaaattggtaatagctctaattcatgcatccctttgttacatactaccatgttttatatcctatcacatttagaaccaggttttataaccccttatgcaactgattggttagttttgtatactgcaaaaacaaaatcccatcatgagcacgtttgcttagtctatccccccacccccatgaaggtagtgatttccaaaggcacccttatgccaacaatagcgtctgctgcaacagcaaagcttttagtcccaagaaactatagagtaggaaactcagtgagagccacagataaagttgatagaatagtaataagtagcaggtatcataatagtaaaggtcattatgacaagttgtgaaaagaattatac

SEQ ID NO: 48214 - DNA, 1563 bp, Zea Mays
ttcacgattcagccttgtgaactacccactttccaattcgacatcttcgccctcgaatcgagcttccctccaccgaatcgagttcctccatccaaatcgagctcattgccgccggatcgaggtctgcgtggatcgagctcgagctttggagaaggagaggaaacgggggacgggcacggggggagcaaggcaaccaaacgggtggagggaaacacgccaaacaggctcctcgatcgttccgggctcgggctgccacccgccattcggtgtcccctccttgacaggtgcccgagccgcgccgagctccagcctcatttccacggtccgcgccggcactcttccctctcccgatcgtcctcctcgtcgcctgccgcctcttccttcttcccactccactagcttcaggttggactgcacaacgtggagcggagatctatccgaacacgggattgattcatctggtggtgttacaacatagggtttttgatatagcaatgggattactcattaattctgaagttaccttggaagtcctttgcgcttttgactggtcgggttgcataggccattgttgagaggtgatttggcctaagaatgggggctccaaaacaaaggtggacttctgaggaagaggctgctcttagagctggaatagcaaggcatggagttggaaaatggcgcacaatattgaaagatccagaatttagttccaccttatgctaccgctcaaatgttgatctcaaggacaagtggcgaaacatgaatgtgattgtcagtacatcgagttctcgtgacaaggcgaagtctgcattgaagagaatacgaactattcccaagaataatgagcacaccatggcaattaccagagttacttctgatattgatgatgagattgttgacgaaaagcctatagtatcattgcctagtgaagcaaagaacacatcaagttcgaagaaatctcacaggctagataatattataatggaggctataaagaacttaaatgagcctacgggatcacacagaactactattgctaattacatagaggagcaatattggccacctagtgattttgatcacttactatctgcaaaactgaaggacttgtccaccagtggcaaattgataaagatggcctaaggttgatcctacttggactctcggcctcgcggctgttctgaaacggcttttctgtgccatgtagatttgtacaacagtacgtgtttactacacttcggtttaaagcagctgccccggtgagtgtatcaccttatgttagtgggagccatgtgaaaactccagcctccagcgcactagtagcaacaatagcagcttgccacaacgccattcagaaaactgggtggcataaactcttccagtgtcaaatgtttcgctaacgatttgcagtattgcattgtgcatgaacagcctttgcattagtgcattattgcgctgcctgccaacagtcggcccgtttgctgaaaacgtttgtccggtggtgcactggcgctgataactacatattctcacaatattaaattaccagtttcaacatgttat

SEQ ID NO: 48215 - DNA, 1915 bp, Zea Mays
ttcacgattcagccttgtgaactacccactttccaattcgacatcttcgccctcgaatcgagcttccctccaccgaatcgagttcctccatccaaatcgagctcattgccgccggatcgaggtctgcgtggatcgagctcgagctttggagaaggagaggaaacgggggacgggcacggggggagcaaggcaaccaaacgggtggagggaaacacgccaaacaggctcctcgatcgttccgggctcgggctgccacccgccattcggtgtcccctccttgacaggtgcccgagccgcgccgagctccagcctcatttccacggttggactgcacaacgtggagcggagatctatccgaacacgggattgattcatctggtggtgttacaacatagggtttttgatatagcaatgggattactcatgtataaatgaacaaagtttggagacagttggacctgacaattgccactttttacatgttttaactcattttttttctgggaaacaagtaattctgaagttaccttggaagtcctttgcgcttttgactggtcgggttgcataggccattgttgagaggtgatttggcctaagaatgggggctccaaaacaaaggtggacttctgaggaagaggctgctcttagagctggaatagcaaggcatggagttggaaaatggcgcacaatattgaaagatccagaatttagttccaccttatgctaccgctcaaatgttgatctcaaggacaagtggcgaaacatgaatgtgattgtcagtacatcgagttctcgtgacaaggcgaagtctgcattgaagagaatacgaactattcccaagaataatgagcacaccatggcaattaccagagttacttctgatattgatgatgagattgttgacgaaaagcctatagtatcattgcctagtgaagcaaagaacacatcaagttcgaagaaatctcacaggctagataatattataatggaggctataaagaacttaaatgagcctacgggatcacacagaactactattgctaattacatagaggagcaatattggccacctagtgattttgatcacttactatctgcaaaactgaaggacttgtccaccagtggcaaattgataaaggtgaaccggaagtacagaatagcacctagttcacccaattcagagcgccgaagccccaaaatgccactgttggaagatgtccaaagagagcctgtcaagatatggagtgatgatactaaaacccttaccagatctcaagttgatgctgaattggcacgtatggcaaccatgactgctgaggaagcttcagtggcagcggctcgagcagttgctgaagcagaggccatcatggcagaagctgaagctgcagcgaaagaggcagaggctgcagaagcagaagcccaagccgcacaagcatttgctgaagcagcgtttttgacattgaagaacagaaatgctggaaaattgatggcctaaggttgatcctacttggactctcggcctcgcggctgttctgaaacggcttttctgtgccatgtagatttgtacaacagtacgtgtttactacacttcggtttaaagcagctgccccggtgagtgtatcaccttatgttagtgggagccatgtgaaaactccagcctccagcgcactagtagcaacaatagcagcttgccacaacgccattcagaaaactgggtggcataaactcttccagtgtcaaatgtttcgctaacgatttgcagtattgcattgtgcatgaacagcctttgcattagtgcattattgcgctgcctgccaacagtcggcccgtttgctgaaaacgtttgtccggtggtgcactggcgctgataactacatattctcacaatattaaattaccagtttcaacatgttat

SEQ ID NO: 48216 - DNA, 524 bp, Zea Mays
ggcgctgggtagcgggttaggcagtgctgtgcagatccacctgcgtcccgccttgttctgtgctgccgcttgtcgctgcgtcatttaccaagtgctcctgtgccagccggcctacggccagcaccacagttcgcagggccgctggtgttctctcttggctggccccagtcccctgctcgtcctacacagtctgccactgtccctcgctgttgcagtggccaagtaacgaatcactgtctcgttctcaatgggacacagtttcttttcgatgcacaggataacatctcgctcgatgttacagctctgccgtgaagggaggcacctcgatcgctggcgtatgtgacatcattgctgtcgcatctgggaaaggcggcgtaggcaagtccaccactgcagttaacattgctgtagcacttgcaaaggagtttaagcttcaggttggtttgctagatgctgacatctatggaccatccattcccacaatgatgaatctccatgccaagcctgaattaagtgaagtgtaa

SEQ ID NO: 48217 - DNA, 2119 bp, Zea Mays
gttcgagttcacgctaagcatcgtcatcgccccatcggtccgtcgttagtgcccctcgctccctcggaaaaccctctcctctcccctatcctctcgtctccccccaccccgccgcgatcaaccgagacccaccgccatgacgagcgacgacgaggaggcgtgcgactacttctacgacgacgacgacgacgccgaggaagacgccgccgccggactggaggaggactcttcgcttccaacgccggagggccgcgcggactactggaaacaagatctgtctacggtgatgaacttgctcaatataaatcaacatcaagcacgagccctcctcattcaccaccgatggagtatggatggcatctatgattctctagacatggggcgagaacgcatgctcagaaattcagggatcgtgctgcaggaggtcaacagcattgcagcagctggctcaatgacaccatggagaacagtgacctgcaaagtgtgttttgaggacttctccatggatgctgtttcgaccatggactgtgggcactgcttctgcaatgactgttggacggagtatttccacgctgcggtagagagcgggaaaaagcaaattcggtgcatggaggtcaagtgctcggctttctgcgatgaggacctcgtgcggtttctccttgtccaaaagtatccagacatggccaagaacttcaatcgcttcctgcttgggtcctaccttgaggacaatgcctctgtgaagtggtgccctagcaccccgaactgtggccatgccattcgcgtgggcactgatgagcgctgctgtgaggtggaatgcccctgcggcttaagcttctgctttaactgcatggggcatgcgcactcgccttgcccgtgcaccatatgggagaaatggaatgccagccggtccgagggagagaacatcaagtggatcctcgctaacaccaagagctgccccaaatgcttcaaggccatcgagaagaacggcggctgcaaccttgtccgctgcaagtgcggacagtgtatgtgttggctctgcggcggaggtaccggccaagatcacacgtggaacagcattaccggccacagctgcaaccgctacgaggaggagatctgtgtagagaccgtgcacaccggcaggcagcagatgcagcggtacaagcactaccacgaccggttcaagatccacggcgactcgtcgtacggcgtggagaagcagaagcttggggcggccatcgaggagcgggtgcggcttcttgagtcggaccgcgagcgcccgctcgccatccgcgacggcgactggctgacccgggcgcaccggcggctgctggtttctcggcaggtgctgtcgcggtcgtacgtgttcgcatactacatgttcggcggccacgagctgcggacgcgcccggccgagcgggcgaacctgggcgtggcgcgtaacctgttcgagcaccagcaggagcagctggagcggcacgtagagcacctgtccaggtcgctcgcggagtcggccgacctggcgggggctccggacgcggagatcgtgaagcagaagcagacggcgatcacgctcaccaagaccgtggagcggctgtgcggggagatgtacaagtgcatccaggacgagctgctgacgctgctcgtggagcccatgagcatcgcggcgtacaggccggacggccccgacagagcgaagcccgcgatctgatggggtggggccgtggggggctgtcttttttactcgctgccacattttgccattagggctaggcgtaggattttgatcgccttggtttgataaaaagctgcctgtcaggcagcaaccaacacgccatatacagcgtgaacgtgccgtgaaatgattttaggctgttagcacacaagggttaggtactgactgaaagttaaaaaaaggctggacatgtttatttttttaaaaaaagctgattcatccgtccatttgaactccattctttttttttggagaccacaagatgaatccttgtgtctggtagttcgcctctattgtcttgatcttagcttaaccgtttaagcttctgctttgaacttgatttgtatggtatccaccttttctaaattagaagcatcttaagtttgg

SEQ ID NO: 48218 - DNA, 3685 bp, Zea Mays
gttcgagttcacgctaagcatcgtcatcgccccatcggtccgtcgttagtgcccctcgctccctcggaaaaccctctcctctcccctatcctctcgtctccccccaccccgccgcgatcaaccgagacccaccgccatgacgagcgacgacgaggaggcgtgcgactacttctacgacgacgacgacgacgccgaggaagacgccgccgccggactggaggaggactcttcgcttccaacgccggagggccgcgcggactactgggtgagtgatctctgatccgaaccccggggcgccccggctagtcgcggggatgataattgtgtgtgtttgccgggttgggatttccgcgccggcgagatctgggaggacctcgccgatcgattcgagaatcgccctgcctgccccgattcaccaaacctttatataagttcatcgttgtaagaaataaaataacggggtgtcacgaggaaccggtgctggatgtcttcagatcctcaccagattgggttgttatattttaattcggtgggatgtatccgtgtgtacttggaatttgagagcagtgaacaaacaaattcctgtctacttgtcttagctgtataagataagaattgctagagtccatcagagtacttgtcttttcactgtaaagtgtaaagtgtagtatttaattttgcccaaagtagtggccattggtcaacaaaatcttacctttgccaaataattacgagatgcatgtgcatgttggtcacttctctttttttccttaaaaacctggaatttcaatttacttaaaaactggatgaaacacaatctgttatttatcctcatgtatttgattaccactaagataactaaacatcatactgatattcaccaagcagtcactaagtcggtaacttctgactgttttcaagtcagacgacttgttggccgttaattgcgattaatcatgattagtcggccgacttgttggccgttaattgcgattaatcatgattagccggacgacttgggcgattaattgtgattggtccaaaccgacttggacgattaatcgcaactaatcacaattaatcggacgacttgaaaacagcctgaagtccgaaataaggtatgttgtagcaagcaatcattcatctattatactgatattagttcagttctcaccatctgatgggcagaggtttgatctatggtgtaaacatctgtttttcttctttatttgtgtagtagtggtcttgttttgtgcaatcatatatacggaatattttgcattgtttgaggtgcagatcagtggagtgcacccaaaacagaggatgtgtttccccaagaagattctttatttgttttaaccaactaaattcacccatgctgtttttagattcatccatgttgtttgcatactgaatattacttgtaaagaaacatgttacatgcataattgttgttgcaggctatcacacaagataccgttttcgctgcacaggtaatggaacagattcaaccatttcctaagtgttcatagccatcgttcagatggtatctgttctgtccaaatgtttatctactactacccctccgtacacaaatatatgacatcgttgactttttttcaaaaactttgaccaccggtcttattcaaaaatgtaaaactttaagttaagcacaaactagcttaagtgataaaacaaatcacaacaaaataaatgataactcattatttttttaataagacgagtgacttaagttttttttaaagtcaatggtgttatatatttatgaacggagggagtacagttttgtactaaccaactctacccacagaaacaagatctgtctacggtgatgaacttgctcaatataaatcaacatcaagcacgagccctcctcattcaccaccgatggagtatggatggcatctatgattctctagacatggggcgagaacgcatgctcagaaattcagggatcgtgctgcaggaggtcaacagcattgcagcagctggctcaatgacaccatggagaacagtgacctgcaaagtgtgttttgaggacttctccatggatgctgtttcgaccatggactgtgggcactgcttctgcaatgactgttggacggagtatttccacgctgcggtagagagcgggaaaaagcaaattcggtgcatggaggtcaagtgctcggctttctgcgatgaggacctcgtgcggtttctccttgtccaaaagtatccagacatggccaagaacttcaatcgcttcctgcttgggtcctaccttgaggacaatgcctctgtgaagtggtgccctagcaccccgaactgtggccatgccattcgcgtgggcactgatgagcgctgctgtgaggtggaatgcccctgcggcttaagcttctgctttaactgcatggggcatgcgcactcgccttgcccgtgcaccatatgggagaaatggaatgccagccggtccgagggagagaacatcaagtggatcctcgctaacaccaagagctgccccaaatgcttcaaggccatcgagaagaacggcggctgcaaccttgtccgctgcaagtgcggacagtgtatgtgttggctctgcggcggaggtaccggccaagatcacacgtggaacagcattaccggccacagctgcaaccgctacgaggaggagatctgtgtagagaccgtgcacaccggcaggcagcagatgcagcggtacaagcactaccacgaccggttcaagatccacggcgactcgtcgtacggcgtggagaagcagaagcttggggcggccatcgaggagcgggtgcggcttcttgagtcggaccgcgagcgcccgctcgccatccgcgacggcgactggctgacccgggcgcaccggcggctgctggtttctcggcaggtgctgtcgcggtcgtacgtgttcgcatactacatgttcggcggccacgagctgcggacgcgcccggccgagcgggcgaacctgggcgtggcgcgtaacctgttcgagcaccagcaggagcagctggagcggcacgtagagcacctgtccaggtcgctcgcggagtcggccgacctggcgggggctccggacgcggagatcgtgaagcagaagcagacggcgatcacgctcaccaagaccgtggagcggctgtgcggggagatgtacaagtgcatccaggacgagctgctgacgctgctcgtggagcccatgagcatcgcggcgtacaggccggacggccccgacagagcgaagcccgcgatctgatggggtggggccgtggggggctgtcttttttactcgctgccacattttgccattagggctaggcgtaggattttgatcgccttggtttgataaaaagctgcctgtcaggcagcaaccaacacgccatatacagcgtgaacgtgccgtgaaatgattttaggctgttagcacacaagggttaggtactgactgaaagttaaaaaaaggctggacatgtttatttttttaaaaaaagctgattcatccgtccatttgaactccattctttttttttggagaccacaagatgaatccttgtgtctggtagttcgcctctattgtcttgatcttagcttaaccgtttaagcttctgctttgaacttgatttgtatggtatccaccttttctaaattagaagcatcttaagtttgg

SEQ ID NO: 48219 - DNA, 3251 bp, Zea Mays
gttcgagttcacgctaagcatcgtcatcgccccatcggtccgtcgttagtgcccctcgctccctcggaaaaccctctcctctcccctatcctctcgtctccccccaccccgccgcgatcaaccgagacccaccgccatgacgagcgacgacgaggaggcgtgcgactacttctacgacgacgacgacgacgccgaggaagacgccgccgccggactggaggaggactcttcgcttccaacgccggagggccgcgcggactactgggtgagtgatctctgatccgaaccccggggcgccccggctagtcgcggggatgataattgtgtgtgtttgccgggttgggatttccgcgccggcgagatctgggaggacctcgccgatcgattcgagaatcgccctgcctgccccgattcaccaaacctttatataagttcatcgttgtaagaaataaaataacggggtgtcacgaggaaccggtgctggatgtcttcagatcctcaccagattgggttgttatattttaattcggtgggatgtatccgtgtgtacttggaatttgagagcagtgaacaaacaaattcctgtctacttgtcttagctgtataagataagaattgctagagtccatcagagtacttgtcttttcactgtaaagtgtaaagtgtagtatttaattttgcccaaagtagtggccattggtcaacaaaatcttacctttgccaaataattacgagatgcatgtgcatgttggtcacttctctttttttccttaaaaacctggaatttcaatttacttaaaaactggatgaaacacaatctgttatttatcctcatgtatttgattaccactaagataactaaacatcatactgatattcaccaagcagtcactaagtcggtaacttctgactgttttcaagtcagacgacttgttggccgttaattgcgattaatcatgattagtcggccgacttgttggccgttaattgcgattaatcatgattagccggacgacttgggcgattaattgtgattggtccaaaccgacttggacgattaatcgcaactaatcacaattaatcggacgacttgaaaacagcctgaagtccgaaataaggtatgttgtagcaagcaatcattcatctattatactgatattagttcagttctcaccatctgatgggcagaggtttgatctatggtgtaaacatctgtttttcttctttatttgtgtagtagtggtcttgttttgtgcaatcatatatacggaatattttgcattgtttgaggtgcagatcagtggagtgcacccaaaacagaggatgtgtttccccaagaagattctttatttgttttaaccaactaaattcacccatgctgtttttagattcatccatgttgtttgcatactgaatattacttgtaaagaaacatgttacatgcataattgttgttgcaggctatcacacaagataccgttttcgctgcacagaaacaagatctgtctacggtgatgaacttgctcaatataaatcaacatcaagcacgagccctcctcattcaccaccgatggagtatggatggcatctatgattctctagacatggggcgagaacgcatgctcagaaattcagggatcgtgctgcaggaggtcaacagcattgcagcagctggctcaatgacaccatggagaacagtgacctgcaaagtgtgttttgaggacttctccatggatgctgtttcgaccatggactgtgggcactgcttctgcaatgactgttggacggagtatttccacgctgcggtagagagcgggaaaaagcaaattcggtgcatggaggtcaagtgctcggctttctgcgatgaggacctcgtgcggtttctccttgtccaaaagtatccagacatggccaagaacttcaatcgcttcctgcttgggtcctaccttgaggacaatgcctctgtgaagtggtgccctagcaccccgaactgtggccatgccattcgcgtgggcactgatgagcgctgctgtgaggtggaatgcccctgcggcttaagcttctgctttaactgcatggggcatgcgcactcgccttgcccgtgcaccatatgggagaaatggaatgccagccggtccgagggagagaacatcaagtggatcctcgctaacaccaagagctgccccaaatgcttcaaggccatcgagaagaacggcggctgcaaccttgtccgctgcaagtgcggacagtgtatgtgttggctctgcggcggaggtaccggccaagatcacacgtggaacagcattaccggccacagctgcaaccgctacgaggaggagatctgtgtagagaccgtgcacaccggcaggcagcagatgcagcggtacaagcactaccacgaccggttcaagatccacggcgactcgtcgtacggcgtggagaagcagaagcttggggcggccatcgaggagcgggtgctgtcgcggtcgtacgtgttcgcatactacatgttcggcggccacgagctgcggacgcgcccggccgagcgggcgaacctgggcgtggcgcgtaacctgttcgagcaccagcaggagcagctggagcggcacgtagagcacctgtccaggtcgctcgcggagtcggccgacctggcgggggctccggacgcggagatcgtgaagcagaagcagacggcgatcacgctcaccaagaccgtggagcggctgtgcggggagatgtacaagtgcatccaggacgagctgctgacgctgctcgtggagcccatgagcatcgcggcgtacaggccggacggccccgacagagcgaagcccgcgatctgatggggtggggccgtggggggctgtcttttttactcgctgccacattttgccattagggctaggcgtaggattttgatcgccttggtttgataaaaagctgcctgtcaggcagcaaccaacacgccatatacagcgtgaacgtgccgtgaaatgattttaggctgttagcacacaagggttaggtactgactgaaagttaaaaaaaggctggacatgtttatttttttaaaaaaagctgattcatccgtccatttgaactccattctttttttttggagaccacaagatgaatccttgtgtctggtagttcgcctctattgtcttgatcttagcttaaccgtttaagcttctgctttgaacttgatttgtatggtatccaccttttctaaattagaagcatcttaagtttgg

SEQ ID NO: 48220 - DNA, 943 bp, Zea Mays
gtacaccttagtgtgtagaggctgggagtaatcttagttccattgtgtcatcttgatgtaattgtctaagattaataaagcttactttatcgaaaaaggactaggatccataagggctggtgtatgtgaacccttttattttatatttttactccatccaggtgctggtacaattgaatcttatagatgatgaagtggctaatattaaaattactgttagaagaagacgatgtgctgttgcagttgattgaaatatgtaatgatggttaattgtcttttgctatattagaattagttgctatattggtaatcctttacatggatataatgttgttgcttcatatttacaatttgtgttcttctgtctagttcgatgttggtaatactacttttctcttggtatcaggtaatgagtgctcttgagaagatgacaaggggagttgcttggggggaccttgatattcttgttgttgatatgcccccaggcactggtgatgctcaactatcaatgtcccaaaggcttcggttatctggtgctttaattgtttcaactcctcaagatattgctcttatcgatgctagaagaggagccaacatgttccgcaaagttcaagttccagtacctcttgaaatcagtatcagaacaggttcagatgaaggcaaccctattgttgtatcatcacccaactcagcatctgcgcaagcgtacgtaaatgttgcggagaaggtgactcaaaggctcaaggagttagcagaggagcgacggatgggcccagaaatcttactttgagaaattcaggctgcttttctcacacctttccctgtttgacgctacggcgccaaaacaatgtactgataagtagattgctgttggaagtaaactttaaatttcgtcactctgtctgaaaatttactcaaacaaacttctgctgcttctatggtc

SEQ ID NO: 48221 - DNA, 934 bp, Zea Mays
attgtgtcatcttgatgtaattgtctaagattaataaagcttactttatcgaaaaaggactaggatccataagggctggtgtatgtgaacccttttattttatatttttactccatccaggtgctggtacaattgaatcttatagatgatgaagtggctaatattaaaattactgttagaagaagacgatgtgctgttgcagttgattgaaatatgtaatgatggttaattgtcttttgctatattagaattagttgctatattggtaatcctttacatggatataatgttgttgcttcatatttacaatttgtgttcttctgtctagttcgatgttggtaatactacttttctcttggtatcaggtaatgagtgctcttgagaagatgacaaggggagttgcttggggggaccttgatattcttgttgttgatatgcccccaggcactggtgatgctcaactatcaatgtcccaaaggcttcggttatctggtgctttaattgtttcaactcctcaagatattgctcttatcgatgctagaagaggagccaacatgttccgcaaagttcaagttccagtacatattctgtcttctctccataactgttggtacctcttgaaatcagtatcagaacaggttcagatgaaggcaaccctattgttgtatcatcacccaactcagcatctgcgcaagcgtacgtaaatgttgcggagaaggtgactcaaaggctcaaggagttagcagaggagcgacggatgggcccagaaatcttactttgagaaattcaggctgcttttctcacacctttccctgtttgacgctacggcgccaaaacaatgtactgataagtagattgctgttggaagtaaactttaaatttcgtcactctgtctgaaaatttactcaaacaaacttctgctgcttctatggtc

SEQ ID NO: 48222 - DNA, 2137 bp, Zea Mays
atgactcactgcagcgtatggattccaacggtcacgcccaaaccttctatattccttccagaccataaggaccaggcaccacaaaaaatcatcgttttaactgagtcagtgaagtggtcgtcagccataaataccctattggatatcgggtcccgttgcaagtccacctacctcttcgagtcgggagtccggtgcggtctccacgagcgctccagctccactcctcgcacccgaatcagccgctcagatccccaggcccgcctctccctccggcggcagttcctcgccggggtcctgcccgcctctcccttcatcccctcctcagatttttcatgtctgtggctagaacttatggatggacaggtggagacctttgtcggagatgaggaaggcgggtcgcctcaagttccttacgatggggagcagccaacgctgtatgatagtgtcgcgaagcagtacagtgaagagctaggtgaccagtacaacgagcaacctcgtgcccaatatgatgaagggtctgggaatccgtataatgattatgaagagcaagcaaacctgtacagtgaggaaactgggaatcggtacaacgaggacccagcagattcttaccaggaagagcaggagaatgcattcagtgggggcataaaccaacaggacaacttgcaggtcaacaatgttgacgataacaaatggcctggatggcctggagagagtgttttccgcatactcgttccagctcagaaggttggagctatcattggccgcaaaggggagtttatcaagaagatgtgcgaggagactaaagcgcgcatcaaaatacttgatggcccacctggtgtaccagaaagagcagtaatgatttcagcaaaggatgaaccagatgcacctctctctccagctatggatggcttacttagagttcataaaagaataactgatagttcagatggtgaatctagtcaacctcaacgaagtgctggtaatataggaccaacacgacttctagtgccatcttcgcaagctggcagccttattggcaagcagggagcaactattaaatcaatacaagattcttcaaaatctattgtccgtattgttgagaatgtgcctcctgttgcactaaatgatgatagagttgtggagatacaaggcgagcctcttggtgtccaggaagcagtggaattaatatcgagtcacctgagaaaatttcttgttgaccgcagtgttctaccattgtttgaagcgcatatgaaaatgcatggtatgccgagggagcaaccagtgccacctccccagcattggggccctcctcaaacctggatccgccctccaaacattcctccaggtggtcctggttttggaggaaatccacagttcatgcatccaaggccgcaagacagttactatccttctcctgatgtcccccatatggaaaagcagccgcactacggtatttctgcatacggccgggaggccccaccaagtggtgcttctgctacagggaatcaaccaccctctcatgcaggttctcaggtggctcatgacatgcacattccccttgcctacgctgatgctgtgattggggcagctggtgctagtatcagttatatccgtagacacagcggcgcaacagtaactattcaagagagcagaggtgcacccggagagatgaccgtggagataactgggactgcagcccaagttcaaactgcgcagcagctgatccagaatttcatggcagaagctgccccaccaccaccaggcccggcgccagcttccaaccctcccgcaccaccagttgatccaagctatggctcttacccaccaccatatggagcagctccttcttatggttcttccgcagctgctgggcctccgcagtacaatggtgggaactacggtggcccgacctaccctcccagctatggctattagtagacaagtgtagcataccaaggatttgccccccccccccccctctttttttccgaataacgacagtgttgggcttgacatccccctgcccctggttgggagtgcagtttttaaaaccacaatttttcaataccagtctgataattgctatgatataactatggtctttttatattcgtcaatcgaacacccgtttggtgtc

SEQ ID NO: 48223 - DNA, 2298 bp, Zea Mays
atgactcactgcagcgtatggattccaacggtcacgcccaaaccttctatattccttccagaccataaggaccaggcaccacaaaaaatcatcgttttaactgagtcagtgaagtggtcgtcagccataaataccctattggatatcgggtcccgttgcaagtccacctacctcttcgagtcgggagtccggtgcggtctccacgagcgctccagctccactcctcgcacccgaatcagccgctcagatccccaggcccgcctctccctccggcggcagttcctcgccggggtcctgcccgcctctcccttcatcccctcctcagatttttcatgtctgtggctagaacttatggatggacaggtggagacctttgtcggagatgaggaaggcgggtcgcctcaagttccttacgatggggagcagccaacgctgtatgatagtgtcgcgaagcagtacagtgaagagctaggtgaccagtacaacgagcaacctcgtgcccaatatgatgaagggtctgggaatccgtataatgattatgaagagcaagcaaacctgtacagtgaggaaactgggaatcggtacaacgaggacccagcagattcttaccaggaagagcaggagaatgcattcagtgggggcataaaccaacaggacaacttgcaggtcaacaatgttgacgataacaaatggcctggatggcctggagagagtgttttccgcatactcgttccagctcagaaggttggagctatcattggccgcaaaggggagtttatcaagaagatgtgcgaggagactaaagcgcgcatcaaaatacttgatggcccacctggtgtaccagaaagagcagttgtgactgcagtctaaggccccaaaacaaacaacctttcataaatggttgatctgacatggttttgaaagtccagttttgggctcctgtgctggaaatatgaataggtcatttcattattggatgaagatctcgttcaagatgctccttaaactatctggtaatgatttcagcaaaggatgaaccagatgcacctctctctccagctatggatggcttacttagagttcataaaagaataactgatagttcagatggtgaatctagtcaacctcaacgaagtgctggtaatataggaccaacacgacttctagtgccatcttcgcaagctggcagccttattggcaagcagggagcaactattaaatcaatacaagattcttcaaaatctattgtccgtattgttgagaatgtgcctcctgttgcactaaatgatgatagagttgtggagatacaaggcgagcctcttggtgtccaggaagcagtggaattaatatcgagtcacctgagaaaatttcttgttgaccgcagtgttctaccattgtttgaagcgcatatgaaaatgcatggtatgccgagggagcaaccagtgccacctccccagcattggggccctcctcaaacctggatccgccctccaaacattcctccaggtggtcctggttttggaggaaatccacagttcatgcatccaaggccgcaagacagttactatccttctcctgatgtcccccatatggaaaagcagccgcactacggtatttctgcatacggccgggaggccccaccaagtggtgcttctgctacagggaatcaaccaccctctcatgcaggttctcaggtggctcatgacatgcacattccccttgcctacgctgatgctgtgattggggcagctggtgctagtatcagttatatccgtagacacagcggcgcaacagtaactattcaagagagcagaggtgcacccggagagatgaccgtggagataactgggactgcagcccaagttcaaactgcgcagcagctgatccagaatttcatggcagaagctgccccaccaccaccaggcccggcgccagcttccaaccctcccgcaccaccagttgatccaagctatggctcttacccaccaccatatggagcagctccttcttatggttcttccgcagctgctgggcctccgcagtacaatggtgggaactacggtggcccgacctaccctcccagctatggctattagtagacaagtgtagcataccaaggatttgccccccccccccccctctttttttccgaataacgacagtgttgggcttgacatccccctgcccctggttgggagtgcagtttttaaaaccacaatttttcaataccagtctgataattgctatgatataactatggtctttttatattcgtcaatcgaacacccgtttggtgtc

SEQ ID NO: 48224 - DNA, 1348 bp, Zea Mays
cacagccagcctagcccacgccccggccgcgacgtcgctgcgtgcatgtgtatgtgtctctacaggcagcccggctgacgacccactccttcgtccttcctcttcctcctataaaacatgcgccccgcccccgagaggccaaacacacacaacaccagctcatcacatccatctcattctactactgcctcagagaccaagctgctgcaaccggagaaggagatctattctacaaagtgaagtacttagcttgggacatggaaaccgtcgtgggagacctcatggcgaccgagctgaggcttggcctgccgggcaccaagcgccccgccgccgaggaggaggaggcaaacaagcgcgacgcggaggcagcacccccggcggccaaggcgcccgtggtcggatggccaccggtgaggtcgtaccggaagagctgcttccagcaggcaaagcagcaggccgtcagcagcagcagcaaggcggccgacaaagaggatgctgcggcgccggcgcccagctgcacggcgtccgcagccgcctcaaacgccaccgccagcgccggggccggctcattcgtcaaggtgagcatggacggcgccccgtacctgcggaagctcgacctgaggatgtacaaggggtaccgggagctccgggaggccctggaggccatgttcgtctcctccggcagcgccaacaacaacaacaacctgtcggagttcgccgtcacctaccaggacaaggacggcgacctcatgctcgtcggagacgtgccgttcgagatgttcgctagcacctgcaggaagctgaggatcatgaagagatctgaagccacaggcctgggatcggcgagacaatgaagaaggtctgacgacgaccgagggcccgacaacgttcatgtcgatctcttctttttttttctttttgccccattattttattttgttcttcttgtccgagagaccccaagccaaaaggatgagcttggtgggtggcgcatcaatctacaaagcgcatgcatatacgcggatgtgtgtgcggctttggttctgtaagacgacgactagtagctaggtcttttttagcagcagcacagaagctaaggagatgcatgctgatgacgagcggttgtttcggcttagctctccgtatgctgtgtttgtacaaaccaaacaatacagttatcttcaccgtcgttgatcccttactaattgcttgtggagatcgaggcgatggtcctcttgagctttcagcttgttcagcgtttcgatgccttcgttttcgtattccgtatgtgtgagttcatggcgttatatatatgacatgtgatcccttactaacagttgggattaac

SEQ ID NO: 48225 - DNA, 1261 bp, Zea Mays
caaacacacacaacaccagctcatcacatccatctcattctactactgcctcagagaccaagctgctgcaaccggagaaggagatctattctacaaagtgaagtacttagcttgggacatggaaaccgtcgtgggagacctcatggcgaccgagctgaggcttggcctgccgggcaccaagcgccccgccgccgaggaggaggaggcaaacaagcgcgacgcggaggcagcacccccggcggccaaatgctgccggtggtgctcacgcgcgccagctacttgtcaccaactcttgcagggcgcccgtggtcggatggccaccggtgaggtcgtaccggaagagctgcttccagcaggcaaagcagcaggccgtcagcagcagcagcaaggcggccgacaaagaggatgctgcggcgccggcgcccagctgcacggcgtccgcagccgcctcaaacgccaccgccagcgccggggccggctcattcgtcaaggtgagcatggacggcgccccgtacctgcggaagctcgacctgaggatgtacaaggggtaccgggagctccgggaggccctggaggccatgttcgtctcctccggcagcgccaacaacaacaacaacctgtcggagttcgccgtcacctaccaggacaaggacggcgacctcatgctcgtcggagacgtgccgttcgagatgttcgctagcacctgcaggaagctgaggatcatgaagagatctgaagccacaggcctgggatcggcgagacaatgaagaaggtctgacgacgaccgagggcccgacaacgttcatgtcgatctcttctttttttttctttttgccccattattttattttgttcttcttgtccgagagaccccaagccaaaaggatgagcttggtgggtggcgcatcaatctacaaagcgcatgcatatacgcggatgtgtgtgcggctttggttctgtaagacgacgactagtagctaggtcttttttagcagcagcacagaagctaaggagatgcatgctgatgacgagcggttgtttcggcttagctctccgtatgctgtgtttgtacaaaccaaacaatacagttatcttcaccgtcgttgatcccttactaattgcttgtggagatcgaggcgatggtcctcttgagctttcagcttgttcagcgtttcgatgccttcgttttcgtattccgtatgtgtgagttcatggcgttatatatatgacatgtgatcccttactaacagttgggattaac

SEQ ID NO: 48226 - DNA, 2814 bp, Zea Mays
gcacaaagcgacaagcacaaacccatcgccagaatccaaaatcaaaagcatcgatttgatctcggcacggcccgcccgcatcctcttctccttccctgtcgctttttctgtctacagcttccatggcgctctctctctctgaatgaatactcctccatcttgccttcacctttttcctcctttttatatcaatatataaaatgttgaggttccagggcaaccagcgggtttgaagtttgaactcagtccctccccccgcaagctttctctctctctctctctctctctgatcaaatgtggcgagatctgtgtgagtaagcgtgaataccactacggtttttcgtcctccccttcccttcttgagctacttgagctactctggtcacttcttggagccggcaactgccagttgggggttttttaggacaaagggagcaaaaaaaaacgaacaccttcctgagcttaagacagcatggatcagtacgaggtgctggagcagatcggcaaaggagcatttggctctgccctgctggtcaggcacaagctggagaggaagaagtatgtgttgaaaaagatccgtcttgcgcgtcagacagaccgcactcgccggtccgcccaccaagagatgcagctcattgctaatgtgaggaatccattcattgtggagcacaaggattcatgggtggataagggttgctacgtctgcattgttatagggtactgcgagggaggagacatggctgaagctattaaaagggctaatgatacccacttttctgaggagaagctttgccagtggctagtgcagcttctcatggcccttgactatttgcatgcacatcacattcttcaccgtgatgtgaagtgctcgaatatatttctcactagggaccaaaacataagactcggtgactttggtctcgcaaaaatattgaccgccgatgatttggcattctcgattgtaggaacaccaagttacatgtgcccagaactcctcgccgatataccttatggtaccaaatctgacatttggtcactaggatgctgcatgtatgaaatggctgcgctcaaacctgcttttagagcttttgatatgcaaaaccttatcaacaagattaccaagtcgatagtatcacctttgccaacaagatattctggtgcattccgtacgtcctgcaactccatctgaagtcacacctttctcgcagcatagttcctgttcaccagtctccaagcgagaagaggatgacattcgccgcagagcccgtttgcagaagcaagggcaggaggaactctttaggcagcgaaaggatgatagcagcctttagcaaaccttctcctgatagaagttctgtcagctctattcggagtgtcaaggacgactacaccgccacacagagtgtcagagagctatcggttgatgaaagcatggtcgaggttgctagtaaacccgtggcatcaaggacctcagatgtcatgaggactccgaaggcgactccgtggaagatgatgacgactctgaggaatcggctagaagctccacaagcatcatatgacagaacgagtcatacagagttttcaagaacaccggttgacaagaggaacagccgcgtggcccgcagagcatcgcttcctctgcccgtatttgagaccccgaagcagcgcagcagcatgagcgtcctggagcggctggagtcccccgacgtctccgtgaactcgcctcgcatcgacagaatcgccgagtttccgctagcttcgtgcgaggaccccttgttctcgaccgtgaagccaccgacacccgccagcgccagcgccagcgccacgcctccgttcgtggaccggtccatcaccaaggacaagtgcacggcccagacgctccggtccgcggcccacgacggtggcaacggcagaagcgaggacggcggcggtttgtcctcgggtcgcaccaccaccacggcagcgtcaagcggtgggacgtcggggtcgttgcagccgaaggggcggttcgacacgacgtcgtaccagcagcgcgcggaggcgctggagggcctgctggagttcagcgcgcagctgctgcagcaggagcggtacgaggagctcggggtcctgctgaggccgttcggccccgacgagatggtgtcccccagggagacggccatctggctcaccaagagcttcaaggaggcgatggccacgggcttgtagcggtggcctcctttcaccggcatggacggatcaggaattcaggatcgcccatcagccttgcaggctgtagacggccggatggcatcgccggtgctggcgtgtgtaggtcaggtaggtaggctatgagaattgagaagagagaggcgttagcgttgacggatcagttgttagttgctgggagtggacacaacaccatctcagtgttggccccccggtttattttgttactatgctagcagttcttagttagttaatggcgctctggctagctagctagtgatgtaccaatgcaacccccccccccccccccccccccccccagcagaattagtagcatcagggagtagcagtagaggtagagctggaggagtcttgagctaggaaggagaaggggattagtgagatataattcctatactgtgatgtagcccaagtatgtaccagtagcttcatatgcatcagtgctgactgctgaagaacattcagacatctatggattcagccattcaggccgattgctacgcttatctgcagttatttgctcctgcaatccaggagtgtggaatgggcgctgacactgttttggccttgccggtgcctccctcatat

SEQ ID NO: 48227 - DNA, 2884 bp, Zea Mays
cacaaacccatcgccagaatccaaaatcaaaagcatcgatttgatctcggcacggcccgcccgcatcctcttctccttccctgtcgctttttctgtctacagcttccatggcgctctctctctctgaatgaatactcctccatcttgccttcacctttttcctcctttttatatcaatatataaaatgttgaggttccagggcaaccagcgggtttgaagtttgaactcagtccctccccccgcaagctttctctctctctctctctctctctgatcaaatgtggcgagatctgtgtgagtaagcgtgaataccactacggtttttcgtcctccccttcccttcttgagctacttgagctactctggtcacttcttggagccggcaactgccagttgggggttttttaggacaaagggagcaaaaaaaaacgaacaccttcctgagcttaagacagcatggatcagtacgaggtgctggagcagatcggcaaaggagcatttggctctgccctgctggtcaggcacaagctggagaggaagaagtatgtgttgaaaaagatccgtcttgcgcgtcagacagaccgcactcgccggtccgcccaccaagagatgcagctcattgctaatgtgaggaatccattcattgtggagcacaaggattcatgggtggataagggttgctacgtctgcattgttatagggtactgcgagggaggagacatggctgaagctattaaaagggctaatgatacccacttttctgaggagaagctttgccagtggctagtgcagcttctcatggcccttgactatttgcatgcacatcacattcttcaccgtgatgtgaagtgctcgaatatatttctcactagggaccaaaacataagactcggtgactttggtctcgcaaaaatattgaccgccgatgatttggcattctcgattgtaggaacaccaagttacatgtgcccagaactcctcgccgatataccttatggtaccaaatctgacatttggtcactaggatgctgcatgtatgaaatggctgcgctcaaacctgcttttagagcttttgatatgcaaaaccttatcaacaagattaccaagtcgatagtatcacctttgccaacaagatattctggtgcatttcgaagacttgttaggagcatgctacggagaagtccagagcataggccaagtgcagccgaactacttaagcatccacatctgcagccgtacgtcctgcaactccatctgaagtcacacctttctcgcagcatagttcctgttcaccagtctccaagcgagaagaggatgacattcgccgcagagcccgtttgcagaagcaagggcaggaggaactctttaggcagcgaaaggatgatagcagcctttagcaaaccttctcctgatagaagttctgtcagctctattcggagtgtcaaggacgactacaccgccacacagagtgtcagagagctatcggttgatgaaagcatggtcgaggttgctagtaaacccgtggcatcaaggacctcagatgtcatgaggactccgaaggcgactccgtggaagatgatgacgactctgaggaatcggctagaagctccacaagcatcatatgacagaacgagtcatacagagttttcaagaacaccggttgacaagaggaacagccgcgtggcccgcagagcatcgcttcctctgcccgtatttgagaccccgaagcagcgcagcagcatgagcgtcctggagcggctggagtcccccgacgtctccgtgaactcgcctcgcatcgacagaatcgccgagtttccgctagcttcgtgcgaggaccccttgttctcgaccgtgaagccaccgacacccgccagcgccagcgccagcgccacgcctccgttcgtggaccggtccatcaccaaggacaagtgcacggcccagacgctccggtccgcggcccacgacggtggcaacggcagaagcgaggacggcggcggtttgtcctcgggtcgcaccaccaccacggcagcgtcaagcggtgggacgtcggggtcgttgcagccgaaggggcggttcgacacgacgtcgtaccagcagcgcgcggaggcgctggagggcctgctggagttcagcgcgcagctgctgcagcaggagcggtacgaggagctcggggtcctgctgaggccgttcggccccgacgagatggtgtcccccagggagacggccatctggctcaccaagagcttcaaggaggcgatggccacgggcttgtagcggtggcctcctttcaccggcatggacggatcaggaattcaggatcgcccatcagccttgcaggctgtagacggccggatggcatcgccggtgctggcgtgtgtaggtcaggtaggtaggctatgagaattgagaagagagaggcgttagcgttgacggatcagttgttagttgctgggagtggacacaacaccatctcagtgttggccccccggtttattttgttactatgctagcagttcttagttagttaatggcgctctggctagctagctagtgatgtaccaatgcaacccccccccccccccccccccccccccagcagaattagtagcatcagggagtagcagtagaggtagagctggaggagtcttgagctaggaaggagaaggggattagtgagatataattcctatactgtgatgtagcccaagtatgtaccagtagcttcatatgcatcagtgctgactgctgaagaacattcagacatctatggattcagccattcaggccgattgctacgcttatctgcagttatttgctcctgcaatccaggagtgtggaatgggcgctgacactgttttggccttgccggtgcctccctcatat

SEQ ID NO: 48228 - DNA, 2814 bp, Zea Mays
aaacccatcgccagaatccaaaatcaaaagcatcgatttgatctcggcacggcccgcccgcatcctcttctccttccctgtcgctttttctgtctacagcttccatggcgctctctctctctgaatgaatactcctccatcttgccttcacctttttcctcctttttatatcaatatataaaatgttgaggttccagggcaaccagcgggtttgaagtttgaactcagtccctccccccgcaagctttctctctctctctctctctctctgatcaaatgtggcgagatctgtgtgagtaagcgtgaataccactacggtttttcgtcctccccttcccttcttgagctacttgagctactctggtcacttcttggagccggcaactgccagttgggggttttttaggacaaagggagcaaaaaaaaacgaacaccttcctgagcttaagacagcatggatcagtacgaggtgctggagcagatcggcaaaggagcatttggctctgccctgctggtcaggcacaagctggagaggaagaaatgcagctcattgctaatgtgaggaatccattcattgtggagcacaaggattcatgggtggataagggttgctacgtctgcattgttatagggtactgcgagggaggagacatggctgaagctattaaaagggctaatgatacccacttttctgaggagaagctttgccagtggctagtgcagcttctcatggcccttgactatttgcatgcacatcacattcttcaccgtgatgtgaagtgctcgaatatatttctcactagggaccaaaacataagactcggtgactttggtctcgcaaaaatattgaccgccgatgatttggcattctcgattgtaggaacaccaagttacatgtgcccagaactcctcgccgatataccttatggtaccaaatctgacatttggtcactaggatgctgcatgtatgaaatggctgcgctcaaacctgcttttagagcttttgatatgcaaaaccttatcaacaagattaccaagtcgatagtatcacctttgccaacaagatattctggtgcatttcgaagacttgttaggagcatgctacggagaagtccagagcataggccaagtgcagccgaactacttaagcatccacatctgcagccgtacgtcctgcaactccatctgaagtcacacctttctcgcagcatagttcctgttcaccagtctccaagcgagaagaggatgacattcgccgcagagcccgtttgcagaagcaagggcaggaggaactctttaggcagcgaaaggatgatagcagcctttagcaaaccttctcctgatagaagttctgtcagctctattcggagtgtcaaggacgactacaccgccacacagagtgtcagagagctatcggttgatgaaagcatggtcgaggttgctagtaaacccgtggcatcaaggacctcagatgtcatgaggactccgaaggcgactccgtggaagatgatgacgactctgaggaatcggctagaagctccacaagcatcatatgacagaacgagtcatacagagttttcaagaacaccggttgacaagaggaacagccgcgtggcccgcagagcatcgcttcctctgcccgtatttgagaccccgaagcagcgcagcagcatgagcgtcctggagcggctggagtcccccgacgtctccgtgaactcgcctcgcatcgacagaatcgccgagtttccgctagcttcgtgcgaggaccccttgttctcgaccgtgaagccaccgacacccgccagcgccagcgccagcgccacgcctccgttcgtggaccggtccatcaccaaggacaagtgcacggcccagacgctccggtccgcggcccacgacggtggcaacggcagaagcgaggacggcggcggtttgtcctcgggtcgcaccaccaccacggcagcgtcaagcggtgggacgtcggggtcgttgcagccgaaggggcggttcgacacgacgtcgtaccagcagcgcgcggaggcgctggagggcctgctggagttcagcgcgcagctgctgcagcaggagcggtacgaggagctcggggtcctgctgaggccgttcggccccgacgagatggtgtcccccagggagacggccatctggctcaccaagagcttcaaggaggcgatggccacgggcttgtagcggtggcctcctttcaccggcatggacggatcaggaattcaggatcgcccatcagccttgcaggctgtagacggccggatggcatcgccggtgctggcgtgtgtaggtcaggtaggtaggctatgagaattgagaagagagaggcgttagcgttgacggatcagttgttagttgctgggagtggacacaacaccatctcagtgttggccccccggtttattttgttactatgctagcagttcttagttagttaatggcgctctggctagctagctagtgatgtaccaatgcaacccccccccccccccccccccccccccagcagaattagtagcatcagggagtagcagtagaggtagagctggaggagtcttgagctaggaaggagaaggggattagtgagatataattcctatactgtgatgtagcccaagtatgtaccagtagcttcatatgcatcagtgctgactgctgaagaacattcagacatctatggattcagccattcaggccgattgctacgcttatctgcagttatttgctcctgcaatccaggagtgtggaatgggcgctgacactgttttggccttgccggtgcctccctcatat

SEQ ID NO: 48229 - DNA, 2996 bp, Zea Mays
ccatcgccagaatccaaaatcaaaagcatcgatttgatctcggcacggcccgcccgcatcctcttctccttccctgtcgctttttctgtctacagcttccatggcgctctctctctctgaatgaatactcctccatcttgccttcacctttttcctcctttttatatcaatatataaaatgttgaggttccagggcaaccagcgggtttgaagtttgaactcagtccctccccccgcaagctttctctctctctctctctctctctgatcaaatgtggcgagatctgtgtgagtaagcgtgaataccactacggtttttcgtcctccccttcccttcttgagctacttgagctactctggtcacttcttggagccggcaactgccagttgggggttttttaggacaaagggagcaaaaaaaaacgaacaccttcctgagcttaagacagcatggatcagtacgaggtgctggagcagatcggcaaaggagcatttggctctgccctgctggtcaggcacaagctggagaggaagaagtgagaccaccacactcactactttagcacttgtttgtgtcgccatcttattccactttgaatgatcacgggggagtctgaacatgcgcagatgcagctcattgctaatgtgaggaatccattcattgtggagcacaaggattcatgggtggataagggttgctacgtctgcattgttatagggtactgcgagggaggagacatggctgaagctattaaaagggctaatgatacccacttttctgaggagaagctttgccagtggctagtgcagcttctcatggcccttgactatttgcatgcacatcacattcttcaccgtgatgtgaagtgctcgaatatatttctcactagggaccaaaacataagactcggtatgtcagttgccatcactctacaaaaaggcaatctttgttgttgcaagtacatagttttggcacaatccaatttgccttataaacaaatgcaggtgactttggtctcgcaaaaatattgaccgccgatgatttggcattctcgattgtaggaacaccaagttacatgtgcccagaactcctcgccgatataccttatggtaccaaatctgacatttggtcactaggatgctgcatgtatgaaatggctgcgctcaaacctgcttttagagcttttgatatgcaaaaccttatcaacaagattaccaagtcgatagtatcacctttgccaacaagatattctggtgcatttcgaagacttgttaggagcatgctacggagaagtccagagcataggccaagtgcagccgaactacttaagcatccacatctgcagccgtacgtcctgcaactccatctgaagtcacacctttctcgcagcatagttcctgttcaccagtctccaagcgagaagaggatgacattcgccgcagagcccgtttgcagaagcaagggcaggaggaactctttaggcagcgaaaggatgatagcagcctttagcaaaccttctcctgatagaagttctgtcagctctattcggagtgtcaaggacgactacaccgccacacagagtgtcagagagctatcggttgatgaaagcatggtcgaggttgctagtaaacccgtggcatcaaggacctcagatgtcatgaggactccgaaggcgactccgtggaagatgatgacgactctgaggaatcggctagaagctccacaagcatcatatgacagaacgagtcatacagagttttcaagaacaccggttgacaagaggaacagccgcgtggcccgcagagcatcgcttcctctgcccgtatttgagaccccgaagcagcgcagcagcatgagcgtcctggagcggctggagtcccccgacgtctccgtgaactcgcctcgcatcgacagaatcgccgagtttccgctagcttcgtgcgaggaccccttgttctcgaccgtgaagccaccgacacccgccagcgccagcgccagcgccacgcctccgttcgtggaccggtccatcaccaaggacaagtgcacggcccagacgctccggtccgcggcccacgacggtggcaacggcagaagcgaggacggcggcggtttgtcctcgggtcgcaccaccaccacggcagcgtcaagcggtgggacgtcggggtcgttgcagccgaaggggcggttcgacacgacgtcgtaccagcagcgcgcggaggcgctggagggcctgctggagttcagcgcgcagctgctgcagcaggagcggtacgaggagctcggggtcctgctgaggccgttcggccccgacgagatggtgtcccccagggagacggccatctggctcaccaagagcttcaaggaggcgatggccacgggcttgtagcggtggcctcctttcaccggcatggacggatcaggaattcaggatcgcccatcagccttgcaggctgtagacggccggatggcatcgccggtgctggcgtgtgtaggtcaggtaggtaggctatgagaattgagaagagagaggcgttagcgttgacggatcagttgttagttgctgggagtggacacaacaccatctcagtgttggccccccggtttattttgttactatgctagcagttcttagttagttaatggcgctctggctagctagctagtgatgtaccaatgcaacccccccccccccccccccccccccccagcagaattagtagcatcagggagtagcagtagaggtagagctggaggagtcttgagctaggaaggagaaggggattagtgagatataattcctatactgtgatgtagcccaagtatgtaccagtagcttcatatgcatcagtgctgactgctgaagaacattcagacatctatggattcagccattcaggccgattgctacgcttatctgcagttatttgctcctgcaatccaggagtgtggaatgggcgctgacactgttttggccttgccggtgcctccctcatat

SEQ ID NO: 48230 - DNA, 2536 bp, Zea Mays
gttttttaagtcagaattaccgagcctacaggcaaacgattattaatcttggagccctcaagacaaagggagcaaaaaaaaacgaacaccttcctgagcttaagacagcatggatcagtacgaggtgctggagcagatcggcaaaggagcatttggctctgccctgctggtcaggcacaagctggagaggaagaagtatgtgttgaaaaagatccgtcttgcgcgtcagacagaccgcactcgccggtccgcccaccaagagatgcagctcattgctaatgtgaggaatccattcattgtggagcacaaggattcatgggtggataagggttgctacgtctgcattgttatagggtactgcgagggaggagacatggctgaagctattaaaagggctaatgatacccacttttctgaggagaagctttgccagtggctagtgcagcttctcatggcccttgactatttgcatgcacatcacattcttcaccgtgatgtgaagtgctcgaatatatttctcactagggaccaaaacataagactcggtgactttggtctcgcaaaaatattgaccgccgatgatttggcattctcgattgtaggaacaccaagttacatgtgcccagaactcctcgccgatataccttatggtaccaaatctgacatttggtcactaggatgctgcatgtatgaaatggctgcgctcaaacctgcttttagagcttttgatatgcaaaaccttatcaacaagattaccaagtcgatagtatcacctttgccaacaagatattctggtgcatttcgaagacttgttaggagcatgctacggagaagtccagagcataggccaagtgcagccgaactacttaagcatccacatctgcagccgtacgtcctgcaactccatctgaagtcacacctttctcgcagcatagttcctgttcaccagtctccaagcgagaagaggatgacattcgccgcagagcccgtttgcagaagcaagggcaggaggaactctttaggcagcgaaaggatgatagcagcctttagcaaaccttctcctgatagaagttctgtcagctctattcggagtgtcaaggacgactacaccgccacacagagtgtcagagagctatcggttgatgaaagcatggtcgaggttgctagtaaacccgtggcatcaaggacctcagatgtcatgaggactccgaaggcgactccgtggaagatgatgacgactctgaggaatcggctagaagctccacaagcatcatatgacagaacgagtcatacagagttttcaagaacaccggttgacaagaggaacagccgcgtggcccgcagagcatcgcttcctctgcccgtatttgagaccccgaagcagcgcagcagcatgagcgtcctggagcggctggagtcccccgacgtctccgtgaactcgcctcgcatcgacagaatcgccgagtttccgctagcttcgtgcgaggaccccttgttctcgaccgtgaagccaccgacacccgccagcgccagcgccagcgccacgcctccgttcgtggaccggtccatcaccaaggacaagtgcacggcccagacgctccggtccgcggcccacgacggtggcaacggcagaagcgaggacggcggcggtttgtcctcgggtcgcaccaccaccacggcagcgtcaagcggtgggacgtcggggtcgttgcagccgaaggggcggttcgacacgacgtcgtaccagcagcgcgcggaggcgctggagggcctgctggagttcagcgcgcagctgctgcagcaggagcggtacgaggagctcggggtcctgctgaggccgttcggccccgacgagatggtgtcccccagggagacggccatctggctcaccaagagcttcaaggaggcgatggccacgggcttgtagcggtggcctcctttcaccggcatggacggatcaggaattcaggatcgcccatcagccttgcaggctgtagacggccggatggcatcgccggtgctggcgtgtgtaggtcaggtaggtaggctatgagaattgagaagagagaggcgttagcgttgacggatcagttgttagttgctgggagtggacacaacaccatctcagtgttggccccccggtttattttgttactatgctagcagttcttagttagttaatggcgctctggctagctagctagtgatgtaccaatgcaacccccccccccccccccccccccccccagcagaattagtagcatcagggagtagcagtagaggtagagctggaggagtcttgagctaggaaggagaaggggattagtgagatataattcctatactgtgatgtagcccaagtatgtaccagtagcttcatatgcatcagtgctgactgctgaagaacattcagacatctatggattcagccattcaggccgattgctacgcttatctgcagttatttgctcctgcaatccaggagtgtggaatgggcgctgacactgttttggccttgccggtgcctccctcatat

SEQ ID NO: 48231 - DNA, 2068 bp, Zea Mays
cctgtatacagtaaaagcaggagaaaccggttcaaattacagtcgaccttgacaaccagtacagtcgctagctatgactcttcggtttcagtgacgcagtacatgctagcttgctgccatctctcttctctatatatatgtgcatcgccgcgcgcatacatacatgcatagtaaagttagcaatgtcgatggattacttggctgctgctgtacccgtgaccttggctctgggagtgggatctatcttgttggtcttacgatggacgtactgccgccgccgaacaagcgccgaacaagtgagactgccgccggggtcaaggggcctcctgttcctaggggagacgctccactacctggcagcgtcctccaccccgggggtattgccaccattcttccagcgacggttggaaaggtatggccccatcttccggacgaacctggtcggggaggatctcgtcgtgtcgctggacgcggagctgaacgcgcacgtgctgaagcaggaggagcgcggcttccagatctggtacccgccctccttcatgcgcgtcttcggcgccgacaacatcaccgccaagctcggcgtgctccaccaccacatgaggaccctcgtgctccgcctcttcggccaccagaccgtccgctccgtgctgctgcacgacgtgcagcggagcgcgcgcgacgagctgcgctcatggctcggccgcccggacgtcgaggtcaggacggccacctccaggatgatatttggcgtcactgccaagaagctgatcagccatgacgacgcagcatctggagaaacgttgtggagatgcttccacgactggacttcggggctgctctcgtttccggtttccattcccggcacaaccttctacagatgcatgcagggacgtaagaaggttatgacgatgctgaaacagcagctcgttgagcgtcgacggaacgcagcggagcgcgagacgacagaggatttcttcgatctcgtgatcgatgaactgaacaagccagaccctatgatggacgagagcaccgcgttggacttgctgttcaccatgttgtttgcgagccatgagacgacgtccatggtattaaccgtcatactcaagtatctaacggacaaccccaaagctttgcaagaactgacagaggagcacgaaagaatcctggaaagtagggccaatccaggctctgacctcacgtgggaggagtacaagtctatgaaattcacatctcatgttatacatgagtcgctaaggctcgcaaacatcgcactggccatgttcaggaaagcaaatcaggatgtgcacataaatgggtacacaattccaaaaggatcaaagatcatgatgtgtgcactagcatcgcacttgaatacggaggtctacgaggacccctcagtgttcaatccatggagatggaaggatattcctgaaccagtcggcacctctaaggactttatggccttcgggggtggtttgcgcctatgcgctggtgccgagttttccaagatgcagatggctatgttcctccattacttggtcacaaattacagctggaaacccgtcagcggtgggacaatgttattctatccaggactgcaatttccagaaggcttccacatccagcttcttccaaaaatcccaaacgtggttccataaaccctatgaagaaatatgaatacgaataatttaagcaaatattctaaatgtaccctggggaattgaagttcgataacgatgtggtacgggctgatttggtaaccatggatcacaggaggatgggagaggattgatggagaaattagttcatttctccctcaacctctttcaatcctcttatgatccacttatcaccaaatcaaccctaatgatagcaggtcgaattgtcggaacaaataatagtttcaccaaacagaaggggagtatgcatgtgtgtaactttttatagttataaataatagtagagtaaattctgctcgttgtgtaacaactatgcaggtgagtaaaaattggttcagcatattgtgtatattatgcccagttcaatggaaaaaaaactttgttgtttg

SEQ ID NO: 48232 - DNA, 951 bp, Zea Mays
caactcgccacgtcgctaactcctggacccgctttgcattagctcctcctttcccctccgcacgacttcgcgtaacaacctggttcgattcttgtgggagtcaatctccacaaccccggatgaattggccgccttgatcgtggtgcatataagttgcgccccagaacctctaatcccacgtcggaatcacgtagaaccaccgcgagggagagagagagtcgatcatatcgtcgcgatcaaccagagtaatagcgaggggagagggagagccgctgcggcaaactcgggtgattgacctccagtctacgccaggctgctgggggaggcgctaggatcaccaccgaacgaagaagggcccgagattccgaggatagttcgtcggcgtggaagcttcgccgccgcgccaccatctgcgtttgggagccttcttccactgacccgctctctggtaagacctccagatagtctctacttgttacaaggatggtgtagcgcatgtccgggggaggaatcgtgcacccaagggccagattgacttgctccggcaagcaaaccatcatgggtgcgggcgccgccgtgtcgggattgctggaggatggtggcgccctctgatcgttgatatgtagatgtgcggctaagattagtctgtcttaccggtttggtgaggatgaagtttatgttgtaaatttagagaaataagtgacatgctttctacatatttatatatattaaatattttaattccgaataaaacaatcatataactcagataaataccatatgaaattatagcaggaatgaacagtagcaattctaagacatgtaaacatgtaaaatagctacacaggtccatttcataattaaacatggcttgcagataaagaaggcagattaaacaaataaacataattgtttatcttaaactattgctctcaaaatagcgggttgctg

SEQ ID NO: 48233 - DNA, 499 bp, Zea Mays
ctcctggacccgctttgcattagctcctcctttcccctccgcacgacttcgcgtaacaacctggttcgattcttgtgggagtcaatctccacaaccccggatgaattggccgccttgatcgtggtgcatataagttgcgccccagaacctctaatcccacgtcggaatcacgtagaaccaccgcgagggagagagagagtcgatcatatcgtcgcgatcaaccagagtaatagcgaggggagagggagagccgctgcggcaaactcgggtgattgacctccagtctacgccaggctgctgggggaggcgctaggatcaccaccgaacgaagaagggcccgagattccgaggatagttcgtcggcgtggaagcttcgccgccgcgccaccatctgcgtttgggagccttcttccactgacccgctctctggtgaagagcaggtggccaaggaggactattatgaggagttcgacgaggtctaggtgacgtctcccagtca

SEQ ID NO: 48234 - DNA, 1932 bp, Zea Mays
taatcacctcatcacaggtccccccagcctcactctcgcgccggctcaaggtacattgcgtgtcctagccaagacacgcagctcatctcagcctcacacgcacagcaagagcgaggcgtgattcgccatgggcggcctcactatggaccaggccttcgtgcaggcccccgagcaccgccccaagcccatcgtcaccgaggccaccggcatccctctcatcgacctctcgcctctggccgccagcggcggcgccgtggacgcgctggccgccgaggtgggcgcggcgagccgccgccgccggcagccgtggccgacggcgagcttgtgttcgataacaagtggccccaggatctaccgggcttcagagaggcgctggaggagtacgcgaaagcgatggaagagctggcgttcaagctgctggagctgatcgcccggagcctgaagctgaggcccgaccggctgcacggcttcttcaaggaccagacgaccttcatccggctgaaccactaccctccttgcccgagccccgacctggccctcggcgtggggcggcacaaggacgccggcgccctgaccatcctgtaccaggacgacgtcggggggctcgacgtccggcggcgctccgacggcgagtgggtccgcgtcaggcccgtgcccgactcgttcatcatcaacgtcggcgacctcatccaggtgtggagcaacgacaggtacgagagcgcggagcaccgggtgtcggtgaactcggcgagggagaggttctccatgccctacttcttcaacccggcgacctacaccatggtggagccggtggaggagctggtgagcaaggacgatccgcccaggtacgacgcctacaactggggcgacttcttcagcaccaggaagaacagcaacttcaagaagctcaacgtggagaacattcagatcgcgcatttcaagaagagcctcgtcctcgcctaactactgctactgctaggatccatgccattgccatgtcgtcttcagattcagagcacgccatgtcgtcgctagcttcgtggtagaacaaataatgatgtgcgtgctgtgtgtaagcatggatatggatgtgaatatgtaatatgatgagcactcctactttggtatgtttgggaataacagacttgtgttggtctggttcattatttgtaagaaaatcaaaaagagttagtagggcaggaggctaaccacagtcatgctgcaccacatccctggtggaaagctggccgggttacgctacgctcgtgcagccagattactgcagggccgggatatgcttccggtggaaggaaggggacggtggctgaggaccatggggctggagcctgggagagaggtcgagctagaagaaagggggagagagaagacgcacaacgaagatgggtcagccagggatttcgacccaagggggagctagtggattttgggagaaaacagaaaagagaaaagagaaaagaagaaaaatttgttggtgtgaacacaaggtttgaagcacagagacggtggtcgacgcaaaggtgaacgtcatgcaggttcgtgccgatggaccgggagcagtgaaagacgagcgttgggacttgaacaagggaccagagtcgccggatgactagccgcagtggctgacgcctggaacacgcatagacgtgaggacgtggtagagcaggtgaaaatcgcctagagggggggggggtgaatagacaaaacctaaaaattataaactttgaacacaaactttacctgaggttaccgttagaacgagtattaatgaaatcggagtgcggaaggcaagttcttcttgctacgagttgcttaatcaatattgataactttgggagtcaactcaaaatgatcacaagcaaaagaactagagagagaggagaggaagaatcaactcgcaaagtaatgatcaac

SEQ ID NO: 48235 - DNA, 1086 bp, Zea Mays
tcaattgccatttccaatccctccaggctccagccaaagcccagcacgaccaaaacccagaacctgagaatggcgcagttccttcgcggcaaggccgccgccgccgccggggcggcggtgctgcgcgcgtcgtctccggcgccatggcggcggacggcctccgcgtcgtaccaccacacgatccaggctgtaccgcgggagacagccggcccgcgcgccgcggcacgcgagcgccgccacggccgcgtcccggcggtcctgctcacgctcgcgggcgccgcgccagggaacggaattgcccaccggcacctccttaccgccgacaggaggcagctcgcggagatgctcaagcagtcgccctacttcctctccacccccgtccgcctccaggtccgcgcgggcgagcgatccaacgccatcctccacgccggcaccgtcctccccatcaaggtgcatagagatgaaaattctgggaatatactgaatttggtaatggtgaaggcagatgaaggaacaatgctgaaggtggatttgcctgtagagttcaagggaaaggatgcttgccctgggttgaagaaaggaggctttttgcagaaaataaggaccagcctggtgtatctctgcccagctgagcacatccctccaaaaattgaggtggacctgacaaatcttgatgtcggagatagggtattgatgcatgacattcccgtccatccatcgctcaagttgctgagtaaaaacgagaccatgcccgtctgcaagatcttggcctcaaagccagacgagtaggaggcgctgcaaatacttcagagctgataacattgtacctttaggtggtacagccctccagcagctccgtccctagttcttggcttgctttttggtcatctgccccctaggtttcaatgtgatagtggattcagacaagctatgggcttcaagtaaagatacgaaggaacaaaatgaagaaatatcactggagagacattgtctgtaccaaccgctatagaataacatcctttctcattcagtttgggttcagggacacatgacatggatggaccattgcatgcatgcatgatcttg

SEQ ID NO: 48236 - DNA, 1209 bp, Zea Mays
aattgccatttccaatccctccaggctccagccaaagcccagcacgaccaaaacccagaacctgagaatggcgcagttccttcgcggcaaggccgccgccgccgccggggcggcggtgctgcgcgcgtcgtctccggcgccatggcggcggacggcctccgcgtcgtaccaccacacgatccaggctgtaccgcgggagacagccggcccgcgcgccgcggcacgcgagcgccgccacggccgcgtcccggcggtcctgctcacgctcgcgggcgccgcgccagggaacggaattgcccaccggcacctccttaccgccgacaggaggcagctcgcggagatgctcaagcagtcgccctacttcctctccacccccgtccgcctccaggtccgcgcgggcgagcgatccaacgccatcctccacgccggcaccgtcctccccatcaaggtgcatagagatgaaaattctgggaatatactgaatttggtaatggtgaaggcagatgaaggaacaatgctgaaggtggatttgcctgtagagttcaagggaaaggatgcttgccctgggttgaagaaagaaaataaggaccagcctggtgtatctctgcccagctgagcacatccctccaaaaattgaggtggacctgacaaatcttgatgtcggagatagggtattgatgcatgacattcccgtccatccatcgctcaagttgctgagtaaaaacgagaccatgcccgtctgcaagatcttggcctcaaagccagacgagtaggaggcgctgcaaatacttcagagctgataacattgtacctttaggtggtacagccctccagcagctccgtccctagttcttggcttgctttttggtcatctgccccctaggtttcaatgtgatagtggattcagacaagctatgggcttcaagtaaagatacgaaggaacaaaatgaagaaatatcactggagagacattgtctgtaccaaccgctatagaataacatcctttctcattcagtttgggttcagggacacatgacatgtaagacgactatcctttgctgtggcctgggtgaattcattctctaagctactcttgcagcggctcacaattcatcgtcctgactgcatgcattgtactgtcatgattctacgtattgaatgttgtattcatgcaaacgatccggtagatgagtgttgccctgtacgggc

SEQ ID NO: 48237 - DNA, 1162 bp, Zea Mays
ccgccacccccccagcggagacaacgcgcgatgcctcctccacgcgtgcctcatcgacaccacaatcattgccacatcccccgccgccgaggtcgtgtggtggaaccgtcgagtctagcgccgcccccaaccagacctgcccgctaccccgatgcgccgtcgcctccacgcccatctcgctcccaggaaccgcctgcctgtagccccccgcgtcaccgcctccactggccatattcccccattccccaattcaacggatgttaaaagggattcacctcttgctcctccccaccctccatcacctacccttgaagaacctgtggaagaagcacccaagacatatgcttcagtgttgcgaacgaaatcaaaggcaacgatggcgattacagagtcacaacaggctcaacagttggcccagcagccacagtctgcctcagtgcatgaaaagtctaacctggacaaccaccgggatgttagcgtccctgaggatgaagttctgtaaaggagaacaaggacacacaagagggctagatggcaggggttcaggctgaaggtgcttccacagagcaggcattatcatcagctctaacaagtattatggatgcgctgaagagtactgactggaatacaaggaaggatgcctcactagctctttcaagtattgtggtcagttctgggtatttgattacctctttcagaacttcctgccttcgctcacttgagtgtagtaaatttgacaaggtaaaactggtacgtgacaccattatacatgcagttcagctgtggaaagctattccagggtctcatactcctgaaccatcagaagctggaccatcaacataagattgcaagcattgtagcttctggtattcaacctctccataacctcacagtgttgaggttcattgaccagaaggttggtgcatgggagagtgtgttgtggactcaacaacaaatcgagagaggtttcacagctattgagaacctgatacaactaaaaggatgcgccgggaagtatgcaacaggagatgaagtccaattgagttcaagtactgatcttaatgttgaagaactattggcgtaataaagctcatttttaagagcagtaattttggatcacgtgttctgacgaatctgttagctaattgttgatgcttttatt

SEQ ID NO: 48238 - DNA, 1373 bp, Zea Mays
ccgccacccccccagcggagacaacgcgcgatgcctcctccacgcgtgcctcatcgacaccacaatcattgccacatcccccgccgccgaggtcgtgtggtggaaccgtcgagtctagcgccgcccccaaccagacctgcccgctaccccgatgcgccgtcgcctccacgcccatctcgctcccaggaaccgcctgcctgtagccccccgcgtcaccgcctccactggccatattcccccattccccaattcaacggatgttaaaagggattcacctcttgctcctccccaccctccatcacctacccttgaagaacctgtggaagaagcacccaagacatatgcttcagtgttgcgaacgaaatcaaaggcaacgatggcgattacagagtcacaacaggctcaacagttggcccagcagccacagtctgcctcagtgcatgaaaagtctaacctggacaaccaccgggatgttagcgtccctgaggatgaagttctgtaaaggagaacaaggacacacaagagggctagatggcaggggttcaggctgaaggtgcttccacagagcaggcattatcatcagctctaacaagtattatggatgcgctgaagagtactgactggaatacaaggaaggatgcctcactagctctttcaagtattgtggtcagttctgggtatttgattacctctttcagaacttcctgccttcgctcacttgagtgtagtaaatttgacaaggtaaaactggtacgtgacaccattatacatgcagttcagctgtggaaagctattccagggtctcatactcctgaaccatcagaagctggaccatcaacataagattgcaagcattgtagcttctggtattcaacctctccataacctcacagtgttgaggttcattgaccagaaggttggtgcatgggagagtgtgttgtggactcaacaacaaatcgagagaggtttcacagctattgagaacctgatacaactaaaaggatgcgccgggaagtatgcaacaggagatgaagtccaattggcctgacttctcaaattgttctgatactggagaagtttaagagtgtccttgacagagatggcacactcaacaatatgctaagctcgatctgccaggagactcgtgatcacaagaactggcttgctcattgggtccaaaggctcaagcatagccagcctgatctctctgggcctcctccgccaaaactgttgtaactattcaccattcagtaccttctcccttccaaaccctgctaatccgataggcaacagagtgcaatttcagttattttctgtctatagacaaaaaagattagtagtagtagtagcacagttagcgcttgcttcgcttc

SEQ ID NO: 48239 - DNA, 1871 bp, Zea Mays
gggatgttagcgtccctgaggatgaaggtaatgaacatggctaaaaatccaatcgatctttgtgcgcctgaactggtattgttaattgttcatttggtttttattcaaatcttccagttttagatttttgcttaattatcttttcaaggccttcttggatggtttaagttcagacccaaatctttgactaagtattttagccagtagttaaggagattttaaattgaccctttatagaagttcctcctagaatatttaaatcgatatcgatgacctttactgaccgccttttaaattgtcattatatcagttctgtaaataatgtttcttaagtgggggctcttgttaggctatccaaactcctgtttgcttattttcaactgttatttttttctcattatgtgtaactatgtaagagctgctacatcatcgataattcggtagcttattttcaacaccaggtttgcatgtttccagtttcattttatttaggcccaatcttcaatactagcagatttttagcaagtagttaagaagtaggcaatcgtagtagcaattgctgcatcaattaggagggtttcatgggcaggtgtatagccccatgtcagctatataattgtgattgcttgtgtagctgcattaaccaaatacttgtgctgtttactaaagcatgctaccagtaccagtatgtaatgaggtacctgagtcagaatttcttctttattaaccactctttgcgaatgcgctgtatttatctttcttgaagcattatgacagtattgttaggctgagacatagttttttcttcattaaaagtttgcgtcccccttacaaacttccatgctacagctctaaattgctaatttatctgacaggggcctacttcatgcaacatattttttgtctttcaatggtcaaaggttctttatgtttgtatatctttgtatgtatatcatgactagattgtagcaccttgcatgtctatctcgcgtgaactcatttagcaaaattgtttataatcatctattaaatatgtcatgatctgttgccgcattatgttattagatattctctttagtgctctttgttatcctacatctattgtagttctgtaaaggagaacaaggacacacaagagggctagatggcaggggttcaggctgaaggtgcttccacagagcaggcattatcatcagctctaacaagtattatggatgcgctgaagagtactgactggaatacaaggaaggatgcctcactagctctttcaagtattgtggtcagttctgggtatttgattacctctttcagaacttcctgccttcgctcacttgagtgtagtaaatttgacaaggtaaaactggtacgtgacaccattatacatgcagttcagctgtggaaagctattccagggtctcatactcctgaaccatcagaagctggaccatcaacataagattgcaagcattgtagcttctggtattcaacctctccataacctcacagtgttgaggttcattgaccagaaggttggtgcatgggagagtgtgttgtggactcaacaacaaatcgagagaggtttcacagctattgagaacctgatacaactaaaaggatgcgccgggaagtatgcaacaggagatgaagtccaattgcttcaaaatcaagtccgacttccaagaagagcaaggatgacgatgattctgatgaggacgagacagatgaaaccaattgccttttaatggtctatgttatcattcaaaattaccttatgttgacactatgtatatatgttattcacaataacagagccattcatgctgttgggcgcttggatgaactatcttttcttcaacaaagatggagcttat

SEQ ID NO: 48240 - DNA, 2040 bp, Zea Mays
gggatgttagcgtccctgaggatgaaggtaatgaacatggctaaaaatccaatcgatctttgtgcgcctgaactggtattgttaattgttcatttggtttttattcaaatcttccagttttagatttttgcttaattatcttttcaaggccttcttggatggtttaagttcagacccaaatctttgactaagtattttagccagtagttaaggagattttaaattgaccctttatagaagttcctcctagaatatttaaatcgatatcgatgacctttactgaccgccttttaaattgtcattatatcagttctgtaaataatgtttcttaagtgggggctcttgttaggctatccaaactcctgtttgcttattttcaactgttatttttttctcattatgtgtaactatgtaagagctgctacatcatcgataattcggtagcttattttcaacaccaggtttgcatgtttccagtttcattttatttaggcccaatcttcaatactagcagatttttagcaagtagttaagaagtaggcaatcgtagtagcaattgctgcatcaattaggagggtttcatgggcaggtgtatagccccatgtcagctatataattgtgattgcttgtgtagctgcattaaccaaatacttgtgctgtttactaaagcatgctaccagtaccagtatgtaatgaggtacctgagtcagaatttcttctttattaaccactctttgcgaatgcgctgtatttatctttcttgaagcattatgacagtattgttaggctgagacatagttttttcttcattaaaagtttgcgtcccccttacaaacttccatgctacagctctaaattgctaatttatctgacaggggcctacttcatgcaacatattttttgtctttcaatggtcaaaggttctttatgtttgtatatctttgtatgtatatcatgactagattgtagcaccttgcatgtctatctcgcgtgaactcatttagcaaaattgtttataatcatctattaaatatgtcatgatctgttgccgcattatgttattagatattctctttagtgctctttgttatcctacatctattgtagttctgtaaaggagaacaaggacacacaagagggctagatggcaggggttcaggctgaaggtgcttccacagagcaggcattatcatcagctctaacaagtattatggatgcgctgaagagtactgactggaatacaaggaaggatgcctcactagctctttcaagtattgtggtcagttctgggtatttgattacctctttcagaacttcctgccttcgctcacttgagtgtagtaaatttgacaaggtaaaactggtacgtgacaccattatacatgcagttcagctgtggaaagctattccagggtctcatactcctgaaccatcagaagctggaccatcaacataaggttgcaaagtagacatcccctatttctatagttcatgcttcatggtcacacttcaaagaacccccccacgagcgcttccccagtggatgcgtgcccggaccggcggtggctccctcctctctggctgctatggcaggggaccctgcagcggcgtgaaacacacttgtagattgcaagcattgtagcttctggtattcaacctctccataacctcacagtgttgaggttcattgaccagaaggttggtgcatgggagagtgtgttgtggactcaacaacaaatcgagagaggtttcacagctattgagaacctgatacaactaaaaggatgcgccgggaagtatgcaacaggagatgaagtccaattgcttcaaaatcaagtccgacttccaagaagagcaaggatgacgatgattctgatgaggacgagacagatgaaaccaattgccttttaatggtctatgttatcattcaaaattaccttatgttgacactatgtatatatgttattcacaataacagagccattcatgctgttgggcgcttggatgaactatcttttcttcaacaaagatggagcttat

SEQ ID NO: 48241 - DNA, 738 bp, Zea Mays
gttagcgtccctgaggatgaaggtaatgaacatggctaaaaatccaatcgatctttgtgcgcctgaactgttctgtaaaggagaacaaggacacacaagagggctagatggcaggggttcaggctgaaggtgcttccacagagcaggcattatcatcagctctaacaagtattatggatgcgctgaagagtactgactggaatacaaggaaggatgcctcactagctctttcaagtattgtggtcagttctgggtatttgattacctctttcagaacttcctgccttcgctcacttgagtgtagtaaatttgacaaggtaaaactggtacgtgacaccattatacatgcagttcagctgtggaaagctattccagggtctcatactcctgaaccatcagaagctggaccatcaacataagattgcaagcattgtagcttctggtattcaacctctccataacctcacagtgttgaggttcattgaccagaaggttggtgcatgggagagtgtgttgtggactcaacaacaaatcgagagaggtttcacagctattgagaacctgatacaactaaaaggatgcgccgggaagtatgcaacaggagatgaagtccaattgagttcaagtactgatcttaatgttgaagaactattggcgtaataaagctcatttttaagagcagtaattttggatcacgtgttctgacgaatctgttagctaattgttgatgcttttatt

SEQ ID NO: 48242 - DNA, 1424 bp, Zea Mays
tatccaaactcctgtttgcttattttcaactgttatttttttctcattatgtgtaactatgtaagagctgctacatcatcgataattcggtagcttattttcaacaccaggtttgcatgtttccagtttcattttatttaggcccaatcttcaatactagcagatttttagcaagtagttaagaagtaggcaatcgtagtagcaattgctgcatcaattaggagggtttcatgggcaggtgtatagccccatgtcagctatataattgtgattgcttgtgtagctgcattaaccaaatacttgtgctgtttactaaagcatgctaccagtaccagtatgtaatgaggtacctgagtcagaatttcttctttattaaccactctttgcgaatgcgctgtatttatctttcttgaagcattatgacagtattgttaggctgagacatagttttttcttcattaaaagtttgcgtcccccttacaaacttccatgctacagctctaaattgctaatttatctgacaggggcctacttcatgcaacatattttttgtctttcaatggtcaaaggttctttatgtttgtatatctttgtatgtatatcatgactagattgtagcaccttgcatgtctatctcgcgtgaactcatttagcaaaattgtttataatcatctattaaatatgtcatgatctgttgccgcattatgttattagatattctctttagtgctctttgttatcctacatctattgtagttctgtaaaggagaacaaggacacacaagagggctagatggcaggggttcaggctgaaggtgcttccacagagcaggcattatcatcagctctaacaagtattatggatgcgctgaagagtactgactggaatacaaggaaggatgcctcactagctctttcaagtattgtggtcagttctgggtatttgattacctctttcagaacttcctgccttcgctcacttgagtgtagtaaatttgacaaggtaaaactggtacgtgacaccattatacatgcagttcagctgtggaaagctattccagggtctcatactcctgaaccatcagaagctggaccatcaacataagattgcaagcattgtagcttctggtattcaacctctccataacctcacagtgttgaggttcattgaccagaaggttggtgcatgggagagtgtgttgtggactcaacaacaaatcgagagaggtttcacagctattgagaacctgatacaactaaaaggatgcgccgggaagtatgcaacaggagatgaagtccaattgagttcaagtactgatcttaatgttgaagaactattggcgtaataaagctcatttttaagagcagtaattttggatcacgtgttctgacgaatctgttagctaattgttgatgcttttatt

SEQ ID NO: 48243 - DNA, 626 bp, Zea Mays
tctctactactgtataaacaccatgttctgtgatctaatttaggttgcaaagtagacatcccctatttctatagttcatgcttcatggtcacacttcaaagaacccccccacgagcgcttccccagtggatgcgtgcccggaccggcggtggctccctcctctctggctgctatggcaggggaccctgcagcggcgtgaaacacacttgtagattgcaagcattgtagcttctggtattcaacctctccataacctcacagtgttgaggttcattgaccagaaggttggtgcatgggagagtgtgttgtggactcaacaacaaatcgagagaggtttcacagctattgagaacctgatacaactaaaaggatgcgccgggaagtatgcaacaggagatgaagtccaattgcttcaaaatcaagtccgacttccaagaagagcaaggatgacgatgattctgatgaggacgagacagatgaaaccaattgccttttaatggtctatgttatcattcaaaattaccttatgttgacactatgtatatatgttattcacaataacagagccattcatgctgttgggcgcttggatgaactatcttttcttcaacaaagatggagcttat

SEQ ID NO: 48244 - DNA, 468 bp, Zea Mays
ccctcctctctggctgctatggcaggggaccctgcagcggcgtgaaacacacttattgcaagcattgtagcttctggtattcaacctctccataacctcacagtgttgaggttcattgaccagaaggttggtgcatgggagagtgtgttgtggactcaacaacaaatcgagagaggtttcacagctattgagaacctgatacaactaaaaggatgcgccgggaagtatgcaacaggagatgaagtccaattgcttcaaaatcaagtccgacttccaagaagagcaaggatgacgatgattctgatgaggacgagacagatgaaaccaattgccttttaatggtctatgttatcattcaaaattaccttatgttgacactatgtatatatgttattcacaataacagagccattcatgctgttgggcgcttggatgaactatcttttcttcaacaaagatggagcttat

SEQ ID NO: 48245 - DNA, 707 bp, Zea Mays
ttcggagaatactgtgtacaagtataggaaaagaaaactcatctcaaaagtataatccttaattgaccgtaaggaaccaaaaagaggacgaataaacatgaaatggtacatctttactatagcagagaaggcaaaatagaaagagttctgttttcttttcataaaatttatgcaaaaagatgaacaccacagtgagctcacattagtgttattggtattgaactttaatcaatataaaaagtatcttgcaaactgaaaaatggagaagattggtcacgtggagatagagtttttcacggtggtctgacttggcgtgcgtaaattagattctggtaatttttttagttcttcatcttccccttaattcctcccaaggagcatgcatgttgtccggcattgatattgttgcaaaagtgtcacattagccttgacaaaagaaaattggaaaaaaacactctatcagtacaaaagacctgcaaaaaacttgcttaagaggagataaaatactaacatcatggatgacctaaagaaattcatatcttctacgtaatttacaagctcggaaaatggagtgaaataaccatccatgctaaacactctgcacttgattataaataaaaagagattatatatttttaatataataaggcactctgtcccaaattaaatttcattttagcctttaaatagattcatacaatattata

SEQ ID NO: 48246 - DNA, 702 bp, Zea Mays
caagggaagcttcaatggaattatttggtctaaaattaagcaagacactcatgtcgagggtcaagggctcatgttgaaggctatctccacattttaaggaagtatgaaacaaaaaagaaaaataaaccaaaaacaaagcatagaatataaattcgtttgaaaattgtgtaccgtgattattacacgtggtaggagaagacgaagttatcgatgaggctgcgctcgccgctgatttccaagaccttagaaatctcctcgacctggatcacgctgtggaaggaacaaaagcacataaacagctatctgtcgaagtgtttaacactcatgtcgagggtcaagggctcatgttgaaggttcccgattgtgtgtgggaagtggattgagatgaaattatggaaacctcaaagaaacatgtcattacttcttcagaaccttcatcttaaaaagacaaatcttcttcaggttgtgcagcagcttgctcccggaacgatcagtgacgacgtcgtccgtgccgatgttactgtagaagtcccatggtcgacgatccaacgggaacgttcatgctaccaatgttgcatgtggtggcctaacagatggcgaagatctcacctcgtgcaggctcttcttgatgtctaggctgacggaaaggagtttgcagcctatttgcagtgcgaggtttcctctgtacatgtacggattgaa

SEQ ID NO: 48247 - DNA, 826 bp, Zea Mays
caaccatatattttgatgagagcacttagagcaatcctatagaaagaaatagaaagacaacagtccacagacacaggggaaatataggcaggagacttaggccattcaatacagttaacaccagaccctgcacattggagcaagcaacacgacactgtcccagtagaaaggatcattcatatggagctgcaccaccacagttcctcccatggagaacccgtagaggaatcttttctttagcatgttctctcatttatatggaaatgcaatggacatgttagcaaataaatggaggtcccatgtagggctatggtttgcgtacatagccactagaatccacagcttcgttctcaccagatacactcttgaaatggtcagagcagtctctaacgtgtcatcaaagctcgacaggtagcctgtcgagcctgaagatttactgtggccatcatggttgtttccatggacaatgtatccacggtgtactaaaacaaaggttgtgtctgtgttttttatggaagtttgtgagcatacatcgatgccatgagttcatggttttcactaatgaaaagaacatgaaaaatgaaactgaaggtttacctccgatggatatgctgcactcggcttcgtatcctagcaaaattgagccacagaagaaagagccgctcgttagttcttaatcaaatcatagccaagggaggaaatgagtgtaaggagatgtctctaccgtggcagataaagaccagagctctgcactctgatttcctcggtgtacacctgcaggtgaagagcttgtttcctcatgaattcatgaagaagtcttgcaaaa

SEQ ID NO: 48248 - DNA, 1598 bp, Zea Mays
tcttcataattgatatcttctttgtactgaacctgcataaatcagaaaaccaaatgctaagagtcaaggaggcaaaagaaacatgaagaaacaagagcaaattcttctgaatatgtgaaatattttttcctgaatatcgtatgattatgtccaggcaatctatatgcacaacaacacaacctttgttttactgaagcttagatatgggatgaaaaaaacaaaactatggacatatctaaaatatattggccaaagtcagtaagcaatccatgaaatttgtgtagtgatgaaatgaaaattatgaaaggaaaatgggtcactattggaaaaatttccacatctaccaagccaccacgtccgacatggatcctctctttggttcaatgaatatattcggactgaattcctaaaagaaataaaaggtaaagaaattatagcaaaccagaattattaatactctcccatcagttcactgatatgtccatgtcatgtctgtacaaaggttgtaggcttaccaattattgagctttagaaaatctggagaacctaaatgttgcgattctttcttgtttcttaatgggcatggaaggggtagctgtgaagatgattgttcacaagaacattcttcctgaaaacaataccttttttgctgactcctggtaatcatcacatcttgaaatttctcaaattatatataacccctcacaaagaaccaatgcaaagacaaatatcatgacattgagtctgagtttttttagtcagaaataagagtaatcgggtcgattgacagaaagaaaattcaatgaacaacagtcatcatacaacttcagccgattgatagcaagagtagtacatgggaatttggggatgactgtgagatcgggccagagaggcggagcaggcatgcccatcataggtcgacctgatcccatcgtccctcactccctatcaaatggtgagagcacaggaccagcgttgcaactggtgggtggaccgaggcgatggtattggtggccggcggcaggccaactccgcacgatgatgaagatgcacttgaatgcagcggcgatgcacctgccccattcattcagcacgaagccggccggtggcttgggcatggcggactggcagtggcccgggtgctcctagaaattatatgcggttattcaacttccacgaagatgacaaataccatgattccacaatggcgtgatatggtcatggggaaggggaccgaggaaggcgccatgaatggcgtggaggcgaactttccatcgaggacgcgagatctacagacgcgagggctattggcgggcggggtttctgaaactcgagggaaactgaatcgacgcggacgcggcgccccgaagcgagaatggcggctggggcgggctcgggatggtgcccttatgggggaggcagattgccgtgggggccgtgggggagggcgagcatgggggcgccgcggagcgagcgagattggcgcggagcgagggacattgccaagattgtcgtggagcgagggcgcggcaagattgctgcgggggagagggcgcttgccgagggagattgccgctagggagggggcgcttgccgag

SEQ ID NO: 48249 - DNA, 2284 bp, Zea Mays
cgcagcccacatcgtcgtcttcggttcgtctcttctgttgctgggctcgtcgcgagggtagcagaggccagatgagggacagagcaagcgagagaagctgaagaaacaatttgttttttttctttcttatcgaaacagcacagaccagtgaaagagggagcgaattagcgaaaagaagaagacaatataaaaaataaataaataaataactacaccgaatgcagcgagcgaggtggaggtgggggaaaaagggcgaggtgacaccgtgacagagagaaggcgagggagggatcacgaggtgtgcttcctcctccgcccaatcctgcccaaccaaatccgccagcgccgcctcctttacactcccacctctgtcccggagcaaaaaaaggagggagaggctcgcttcttggatcgcggggtcacgggacgcgcgccgcgggccggtacgctgctgctggcggactgctcgacccttgcctaccagctgctgcctgctgctgcttccttggctggcgccggcgagagacggaggcgaggcgaggcgaggcgacgacgatggaccgggcggcgctcaccgtgggcccggggatggacatgcccataatgcacgacggcgaccgctacgagctcgtccgcgacatcggctccggcaacttcggcgtcgcgcgcctcatgcgcaaccgcgccgacggccagctcgtcgccgtcaagtacatcgagcgaggcgagaagattgacgagaacgtgcagcgggagatcatcaaccaccgctccctgcgccaccccaacatcatccgcttcaaggaggtcatcctcaccccgacgcacctcgccatcgtcatggagtacgcctccggcggggagctcttcgagcgcatctgcaacgctggcaggttcagcgaggacgaggtccattccttttctttcgtcttctctcgctttcatcaacgctgcttgctcgtgctgcctttcctctgtacttgtgatgacactcctgccctgtacaactacaaacatggtacactaatcaaactgtcaaagcttctttcaggcgcgtttctttttccagcaactcatatcaggggtcagctactgccattccatgtatgccatcgcgacttgaagctagagaacaccctgttggacgggagcaccgcgcctcgcctcaagatatgtgattttggctactcaaagtcatcagttctacactcgcagccgaaatctacagtgggaactcctgcatacattgctcctgaggttcttctgaagaaggaatacgatggaaaggtcgctgatgtgtggtcatgtggagtaacgctgtacgtgatgctggtcggtgcatatccatttgaggacccagatgagcctaagaatttcaggaagacaattcagagaatattgggtgtgcagtactcaattccagactatgtccacatatctccagagtgccaaaatcttgtctctaggattttcgtcgccgacccagccaccaggatcaccatccctgagataaggaaccatccatggttcttgaagaacctgccagctgacctaatggatgacagcacgatgagcaagcagtacgaggagcctgagcaaccgatgcagagcatggatgagatcatgcagatcctggctgaggcgaccattccagcagctggtccccatggactcaatcagttcctgaacgacggccttgacctcgacgatgacatggacgacctggactcagataccgatcttgacctggaaagcagtggggaaatcgtgtatgctatttgacagcagcgaggcaatgcgtatcatcagtcgtgctcagatcgtttgttgcgccgcaggttaccgagataattagagagacaggggggaggtatctgctggagatgctgctcgtgtctgatgccgtgatgcccccctttttttcatcctgttatgtttggctgttgtttggttgtggtgcacctccagtgttttacaacagtttggcccttcggaattggttgtgctagaacctcgtccatctgagaagaccctttgtttttgcatccccagctaagagagtgaagtacttgtataattatactgtttgtgtcatatgtatttggtgtaggaaaataaagaaactccattgcccgttcttgttccttccgtgtctcacgaattttttcagaaccctctcaattttagtgtctttttggctgctgtatctcacggctgaatcaccaaggcacaatattttaaacgactgtcgcctatttaaatctttacatatttagtggttccg

SEQ ID NO: 48250 - DNA, 1876 bp, Zea Mays
cccctcccaacggcgcccttcctccccgcacgctacgacggccgagacgaacgcgcggcttcctccccaccaacggcgccctttccaaaagcctcgacccgctgctctcgccgagatcccgcgcgtagcacgcgcggcttccttcccaggctggcgagatgcctccttctacgctcgcgcatgcactatgcccctgtcgttgtccacctcccacgcccacgcatgcacccatcccctcgtcacgcaaaccatagtctcctccgcccccgtgctcgccaccgcgtcgacttcggtggagtccagcgatagggcgaggtcgtaccccgacgactcccccccccccgacgtgtcgtcctagcccgcacgctccgcctctggcaccgttgcacaccacgccatcctcacccttcaactcctaaactgtccagtgggagacgatgccgccctcggttcgcgatgccgcccactcccacacgtcgtcgcgcgaagccggcgctcacttcgggccagatctacctgcccgtgtggtgttgtgcgtacgaccacctcgtgaagatgctgcaacaggcgtacgcgcaggtcgaggagctctccgtcgagcgcgagcacctcgtcaatgagctctagcttctacagagccgcttccacaagcgcaagatctgccaggcctgcctccagaagatggatggatttgatcaaacagtgaatgtgaaggttgtaatggcaactaatagggcacatactctagattctactttgttgcggccaggtagacttgacaggaaagttgagttctctcttcctgattggcggtagaagaggcctgtgttccaagtatgtactactaagatgaatttgagtgacgaggctgatttggaagattatgtttgcagactggataagatcagtgatgctgatgttgagttggtttcatggcacagaccaaaaattttatgcatttgttgttttctaacaattgtattgctagggacttttgtcctgcgctggccaaagctgtcaaaactatgaaaaaggcagagaagctgctccttatatatagtaaagccattggtagaccaacagttggagaggaaggtgttctgatgagcatcatcttgttctgcatcatcactaatcaacttgttatgcacagtgtccgatgtgcctgtctcaactcgattggtattatgttgtgtgtttagtgattctggtttatcctttgggatgcttatgtgataatatgtttgtaatgtgtttttccagctaaggcatataattgacctaaaaaggcacttcaagcgggtaggaaaattcaaggtcgttctcaagtacttccaagtcggtacggtcgttgagcctgcatctgagttctactcaagtaggctgaaaaatagggaacgcaaggcaacattggttgacgagctgttatcagatcaatctctgaagagctacaggcagctacgtgcccacgtttggcgaggcgccatttccggccaccggccacgtcgccgcgcgcaggagagaagctaggcactacatgatgtcagccgaccaagatttttaaaaaaagatacgaaagcttgctacaaaataaaccggtccagtcacaagctagctagctagccagattaagtcgatgccgcactgcttgtatatgcattggattccatattgttctcttcagatggacatcaaatgttctgttcattaattaaggttaatcagtggcatcctatgtggaatcgtccctgcttacatgcatatatagtgcgtgcgtgcattatatgtatccattccacatgcatgcatctgtttcaccatctttaatttggatgcttatgcatgcatgcttctttactttgattattgttttttg

SEQ ID NO: 48251 - DNA, 3253 bp, Zea Mays
cccctcccaacggcgcccttcctccccgcacgctacgacggccgagacgaacgcgcggcttcctccccaccaacggcgccctttccaaaagcctcgacccgctgctctcgccgagatcccgcgcgtagcacgcgcggcttccttcccaggctggcgagatgcctccttctacgctcgcgcatgcactatgcccctgtcgttgtccacctcccacgcccacgcatgcacccatcccctcgtcacgcaaaccatagtctcctccgcccccgtgctcgccaccgcgtcgacttcggtggagtccagcgatagggcgagtgggagacgatgccgccctcggttcgcgatgccgcccactcccacacgtcgtcgcgcgaagccggcgctcacttcgggccagatctacctgcccgtgtggtgttgtgcgtacgaccacctcgtgaagatgctgcaacaggcgtacgcgcaggtcgaggagctctccgtcgagcgcgagcacctcgtcaatgagctctagcttctacagagccgcttccacaagcgcaagatctgccaggcctgcctccagaaggacgaggagatcaggaagagagtcgtaaaggctgagacggcgatgcgtcttggcggcaaggagcttcagattcactgctgcgaggctgttccttagccccagcttcaattgttcctcatttagtttattgaaatctgaattatttggagctaatttgtacagtttatacatagagcacccttgaaagccacattcacatgaaagcagtatacacagagcacttcaattgaaagctgctgcattgtacagggaatatggaattctggattcctatatatcgtaactcctttgctgttgcatatgcattccagtttcagtttggagttacaaaacgaattcaattacaggtgtgcttgttcagttatatagggggggaaactgtttgtgccagaagtaatatactgaattttgtagctgcattgttcaccttatatcgttttgctatggtcaaatctcttctcaccattgggcttgtgaatttcatgttccgggtgatgtgtcatgcctagcagctgattatattctcagcgtgcatgtcatctcactttgcctgtgcagcaagtgtactgagtctgattgatgcatctttagttagctgtaaacttacagaggcaatatgggagcggtgatttcactgtttcgcccgaatccatataaaagtgagtcggaccgggccaaaaaacgtgctttgggctgggcttcaggctttctgtatactgatggtgcatcgactgcagaaggatgaagcggagctatgcatgctggttctgaatttatcaatagacgtatatgtttttttgtggggcttcattgtatccataatttcatatctaagcatttatagttagcgggccttctgctaatctttgctacattaagcatttacctaatatcgttggccatactgcctaattattcagtaaaagtgtgcctgtacattatgtcttcaatttgctgctccatacatctacgtcgacgcttatattcagcctgattggaattgttggctgatgcaacgttgctgatgctgttgtagctagactgcatgtaagtactatgctttgtagtacagaatgagcccgatctggtgagtttttttgtttcaactaaataggagctacttaatcaagtaaatggggatttcagattgttgtggtgttcctagaaattataatagatttcctattttatgttataaaatatggtatttcaaagaaaaccttttcaaaccaggaagtataaggaaaggctttgttttggaattgaaatcgcaaggacatattttcaccccaacatgcatagttttttatgttcacatgagaggtagaaactataatattataaaaataataactgaggtcttggaaagctaactttggcatattgctaggttgtaaattcttagatgctggagtcttcttgattcttttaataatttgcccgtgtttattgcagatggatggatttgatcaaacagtgaatgtgaaggttgtaatggcaactaatagggcacatactctagattctactttgttgcggccaggtagacttgacaggaaagttgagttctctcttcctgattggcggtagaagaggcctgtgttccaagtatgtactactaagatgaatttgagtgacgaggctgatttggaagattatgtttgcagactggataagatcagtgatgctgatgttgagttggtttcatggcacagaccaaaaattttatgcatttgttgttttctaacaattgtattgctagggacttttgtcctgcgctggccaaagctgtcaaaactatgaaaaaggcagagaagctgctccttatatatagtaaagccattgtgagattctatttcaaaattcgattattcttctataactttcatgtctaatttctctgaattatgacacttcgttaaacttcctcgcttcaaatgcaaatggatctggtgagaagggtagaccaacagttggagaggaaggtgttctgatgagcatcatcttgttctgcatcatcactaatcaacttgttatgcacagtgtccgatgtgcctgtctcaactcgattgctaaggcatataattgacctaaaaaggcacttcaagcgggtaggaaaattcaaggtcgttctcaagtacttccaagtcggtacggtcgttgagcctgcatctgagttctactcaagtaggctgaaaaatagggaacgcaaggcaacattggttgacgagctgttatcagatcaatctctgaagagctacaggcagctacgtgcccacgtttggcgaggcgccatttccggccaccggccacgtcgccgcgcgcaggagagaagctaggcactacatgatgtcagccgaccaagatttttaaaaaaagatacgaaagcttgctacaaaataaaccggtccagtcacaagctagctagctagccagattaagtcgatgccgcactgcttgtatatgcattggattccatattgttctcttcagatggacatcaaatgttctgttcattaattaaggttaatcagtggcatcctatgtggaatcgtccctgcttacatgcatatatagtgcgtgcgtgcattatatgtatccattccacatgcatgcatctgtttcaccatctttaatttggatgcttatgcatgcatgcttctttactttgattattgttttttg

SEQ ID NO: 48252 - DNA, 3223 bp, Zea Mays
cccctcccaacggcgcccttcctccccgcacgctacgacggccgagacgaacgcgcggcttcctccccaccaacggcgccctttccaaaagcctcgacccgctgctctcgccgagatcccgcgcgtagcacgcgcggcttccttcccaggctggcgagatgcctccttctacgctcgcgcatgcactatgcccctgtcgttgtccacctcccacgcccacgcatgcacccatcccctcgtcacgcaaaccatagtctcctccgcccccgtgctcgccaccgcgtcgacttcggtggagtccagcgatagggcgagtgggagacgatgccgccctcggttcgcgatgccgcccactcccacacgtcgtcgcgcgaagccggcgctcacttcgggccagatctacctgcccgtgtggtgttgtgcgtacgaccacctcgtgaagatgctgcaacaggcgtacgcgcaggtcgaggagctctccgtcgagcgcgagcacctcgtcaatgagctctagcttctacagagccgcttccacaagcgcaagatctgccaggcctgcctccagaaggacgaggagatcaggaagagagtcgtaaaggctgagacggcgatgcgtcttggcggcaaggagcttcagattcactgctgcgaggctgttccttagccccagcttcaattgttcctcatttagtttattgaaatctgaattatttggagctaatttgtacagtttatacatagagcacccttgaaagccacattcacatgaaagcagtatacacagagcacttcaattgaaagctgctgcattgtacagggaatatggaattctggattcctatatatcgtaactcctttgctgttgcatatgcattccagtttcagtttggagttacaaaacgaattcaattacaggtgtgcttgttcagttatatagggggggaaactgtttgtgccagaagtaatatactgaattttgtagctgcattgttcaccttatatcgttttgctatggtcaaatctcttctcaccattgggcttgtgaatttcatgttccgggtgatgtgtcatgcctagcagctgattatattctcagcgtgcatgtcatctcactttgcctgtgcagcaagtgtactgagtctgattgatgcatctttagttagctgtaaacttacagaggcaatatgggagcggtgatttcactgtttcgcccgaatccatataaaagtgagtcggaccgggccaaaaaacgtgctttgggctgggcttcaggctttctgtatactgatggtgcatcgactgcagaaggatgaagcggagctatgcatgctggttctgaatttatcaatagacgtatatgtttttttgtggggcttcattgtatccataatttcatatctaagcatttatagttagcgggccttctgctaatctttgctacattaagcatttacctaatatcgttggccatactgcctaattattcagtaaaagtgtgcctgtacattatgtcttcaatttgctgctccatacatctacgtcgacgcttatattcagcctgattggaattgttggctgatgcaacgttgctgatgctgttgtagctagactgcatgtaagtactatgctttgtagtacagaatgagcccgatctggtgagtttttttgtttcaactaaataggagctacttaatcaagtaaatggggatttcagattgttgtggtgttcctagaaattataatagatttcctattttatgttataaaatatggtatttcaaagaaaaccttttcaaaccaggaagtataaggaaaggctttgttttggaattgaaatcgcaaggacatattttcaccccaacatgcatagttttttatgttcacatgagaggtagaaactataatattataaaaataataactgaggtcttggaaagctaactttggcatattgctaggttgtaaattcttagatgctggagtcttcttgattcttttaataatttgcccgtgtttattgcagatggatggatttgatcaaacagtgaatgtgaaggttgtaatggcaactaatagggcacatactctagattctactttgttgcggccaggtagacttgacaggaaagttgagttctctcttcctgattggcggtagaagaggcctgtgttccaagtatgtactactaagatgaatttgagtgacgaggctgatttggaagattatgtttgcagactggataagatcagtgatgctgatgttgagttggtttcatggcacagaccaaaaattttatgcatttgttgttttctaacaattgtattgctagggacttttgtcctgcgctggccaaagctgtcaaaactatgaaaaaggcagagaagctgctccttatatatagtaaagccattaccaacagttggagaggaaggtgttctgatgagcatcatcttgttctgcatcatcactaatcaacttgttatgcacagtgtccgatgtgcctgtctcaactcgattgctaaggcatataattgacctaaaaaggcacttcaagcgggtaggaaaattcaaggtcgttctcaagtacttccaagtcggtacggtcgttgagcctgcatctgagttctactcaagtaggctgaaaaatagggaacgcaaggcaacattggttgacgagctgttatcagatcaatctctgaagagctacagagtcattcatgttggtgggcgtcttggatgaactacattttcttcaacaaagatggagctcatgcagattgatttagtccctttttgcaatgcagctacgtgcccacgtttggcgaggcgccatttccggccaccggccacgtcgccgcgcgcaggagagaagctaggcactacatgatgtcagccgaccaagatttttaaaaaaagatacgaaagcttgctacaaaataaaccggtccagtcacaagctagctagctagccagattaagtcgatgccgcactgcttgtatatgcattggattccatattgttctcttcagatggacatcaaatgttctgttcattaattaaggttaatcagtggcatcctatgtggaatcgtccctgcttacatgcatatatagtgcgtgcgtgcattatatgtatccattccacatgcatgcatctgtttcaccatctttaatttggatgcttatgcatgcatgcttctttactttgattattgttttttg

SEQ ID NO: 48253 - DNA, 3353 bp, Zea Mays
cccctcccaacggcgcccttcctccccgcacgctacgacggccgagacgaacgcgcggcttcctccccaccaacggcgccctttccaaaagcctcgacccgctgctctcgccgagatcccgcgcgtagcacgcgcggcttccttcccaggctggcgagatgcctccttctacgctcgcgcatgcactatgcccctgtcgttgtccacctcccacgcccacgcatgcacccatcccctcgtcacgcaaaccatagtctcctccgcccccgtgctcgccaccgcgtcgacttcggtggagtccagcgatagggcgaggtcgtaccccgacgactcccccccccccgacgtgtcgtcctagcccgcacgctccgcctctggcaccgttgcacaccacgccatcctcacccttcaactcctaaactgtccagtgggagacgatgccgccctcggttcgcgatgccgcccactcccacacgtcgtcgcgcgaagccggcgctcacttcgggccagatctacctgcccgtgtggtgttgtgcgtacgaccacctcgtgaagatgctgcaacaggcgtacgcgcaggtcgaggagctctccgtcgagcgcgagcacctcgtcaatgagctctagcttctacagagccgcttccacaagcgcaagatctgccaggcctgcctccagaaggacgaggagatcaggaagagagtcgtaaaggctgagacggcgatgcgtcttggcggcaaggagcttcagattcactgctgcgaggctgttccttagccccagcttcaattgttcctcatttagtttattgaaatctgaattatttggagctaatttgtacagtttatacatagagcacccttgaaagccacattcacatgaaagcagtatacacagagcacttcaattgaaagctgctgcattgtacagggaatatggaattctggattcctatatatcgtaactcctttgctgttgcatatgcattccagtttcagtttggagttacaaaacgaattcaattacaggtgtgcttgttcagttatatagggggggaaactgtttgtgccagaagtaatatactgaattttgtagctgcattgttcaccttatatcgttttgctatggtcaaatctcttctcaccattgggcttgtgaatttcatgttccgggtgatgtgtcatgcctagcagctgattatattctcagcgtgcatgtcatctcactttgcctgtgcagcaagtgtactgagtctgattgatgcatctttagttagctgtaaacttacagaggcaatatgggagcggtgatttcactgtttcgcccgaatccatataaaagtgagtcggaccgggccaaaaaacgtgctttgggctgggcttcaggctttctgtatactgatggtgcatcgactgcagaaggatgaagcggagctatgcatgctggttctgaatttatcaatagacgtatatgtttttttgtggggcttcattgtatccataatttcatatctaagcatttatagttagcgggccttctgctaatctttgctacattaagcatttacctaatatcgttggccatactgcctaattattcagtaaaagtgtgcctgtacattatgtcttcaatttgctgctccatacatctacgtcgacgcttatattcagcctgattggaattgttggctgatgcaacgttgctgatgctgttgtagctagactgcatgtaagtactatgctttgtagtacagaatgagcccgatctggtgagtttttttgtttcaactaaataggagctacttaatcaagtaaatggggatttcagattgttgtggtgttcctagaaattataatagatttcctattttatgttataaaatatggtatttcaaagaaaaccttttcaaaccaggaagtataaggaaaggctttgttttggaattgaaatcgcaaggacatattttcaccccaacatgcatagttttttatgttcacatgagaggtagaaactataatattataaaaataataactgaggtcttggaaagctaactttggcatattgctaggttgtaaattcttagatgctggagtcttcttgattcttttaataatttgcccgtgtttattgcagatggatggatttgatcaaacagtgaatgtgaaggttgtaatggcaactaatagggcacatactctagattctactttgttgcggccaggtagacttgacaggaaagttgagttctctcttcctgattggcggtagaagaggcctgtgttccaagtatgtactactaagatgaatttgagtgacgaggctgatttggaagattatgtttgcagactggataagatcagtgatgctgatgttgagttggtttcatggcacagaccaaaaattttatgcatttgttgttttctaacaattgtattgctagggacttttgtcctgcgctggccaaagctgtcaaaactatgaaaaaggcagagaagctgctccttatatatagtaaagccattaccaacagttggagaggaaggtgttctgatgagcatcatcttgttctgcatcatcactaatcaacttgttatgcacagtgtccgatgtgcctgtctcaactcgattgctaaggcatataattgacctaaaaaggcacttcaagcgggtaggaaaattcaaggtcgttctcaagtacttccaagtcggtacggtcgttgagcctgcatctgagttctactcaagtaggctgaaaaatagggaacgcaaggcaacattggttgacgagctgttatcagatcaatctctgaagagctacagagtcattcatgttggtgggcgtcttggatgaactacattttcttcaacaaagatggagctcatgcagattgatttagtccctttttgcaatcgcctttgttgcagcaggcagctacgtgcccacgtttggcgaggcgccatttccggccaccggccacgtcgccgcgcgcaggagagaagctaggcactacatgatgtcagccgaccaagatttttaaaaaaagatacgaaagcttgctacaaaataaaccggtccagtcacaagctagctagctagccagattaagtcgatgccgcactgcttgtatatgcattggattccatattgttctcttcagatggacatcaaatgttctgttcattaattaaggttaatcagtggcatcctatgtggaatcgtccctgcttacatgcatatatagtgcgtgcgtgcattatatgtatccattccacatgcatgcatctgtttcaccatctttaatttggatgcttatgcatgcatgcttctttactttgattattgttttttg

SEQ ID NO: 48254 - DNA, 3369 bp, Zea Mays
cccctcccaacggcgcccttcctccccgcacgctacgacggccgagacgaacgcgcggcttcctccccaccaacggcgccctttccaaaagcctcgacccgctgctctcgccgagatcccgcgcgtagcacgcgcggcttccttcccaggctggcgagatgcctccttctacgctcgcgcatgcactatgcccctgtcgttgtccacctcccacgcccacgcatgcacccatcccctcgtcacgcaaaccatagtctcctccgcccccgtgctcgccaccgcgtcgacttcggtggagtccagcgatagggcgaggtcgtaccccgacgactcccccccccccgacgtgtcgtcctagcccgcacgctccgcctctggcaccgttgcacaccacgccatcctcacccttcaactcctaaactgtccagtgggagacgatgccgccctcggttcgcgatgccgcccactcccacacgtcgtcgcgcgaagccggcgctcacttcgggccagatctacctgcccgtgtggtgttgtgcgtacgaccacctcgtgaagatgctgcaacaggcgtacgcgcaggtcgaggagctctccgtcgagcgcgagcacctcgtcaatgagctctagcttctacagagccgcttccacaagcgcaagatctgccaggcctgcctccagaaggacgaggagatcaggaagagagtcgtaaaggctgagacggcgatgcgtcttggcggcaaggagcttcagattcactgctgcgaggctgttccttagccccagcttcaattgttcctcatttagtttattgaaatctgaattatttggagctaatttgtacagtttatacatagagcacccttgaaagccacattcacatgaaagcagtatacacagagcacttcaattgaaagctgctgcattgtacagggaatatggaattctggattcctatatatcgtaactcctttgctgttgcatatgcattccagtttcagtttggagttacaaaacgaattcaattacaggtgtgcttgttcagttatatagggggggaaactgtttgtgccagaagtaatatactgaattttgtagctgcattgttcaccttatatcgttttgctatggtcaaatctcttctcaccattgggcttgtgaatttcatgttccgggtgatgtgtcatgcctagcagctgattatattctcagcgtgcatgtcatctcactttgcctgtgcagcaagtgtactgagtctgattgatgcatctttagttagctgtaaacttacagaggcaatatgggagcggtgatttcactgtttcgcccgaatccatataaaagtgagtcggaccgggccaaaaaacgtgctttgggctgggcttcaggctttctgtatactgatggtgcatcgactgcagaaggatgaagcggagctatgcatgctggttctgaatttatcaatagacgtatatgtttttttgtggggcttcattgtatccataatttcatatctaagcatttatagttagcgggccttctgctaatctttgctacattaagcatttacctaatatcgttggccatactgcctaattattcagtaaaagtgtgcctgtacattatgtcttcaatttgctgctccatacatctacgtcgacgcttatattcagcctgattggaattgttggctgatgcaacgttgctgatgctgttgtagctagactgcatgtaagtactatgctttgtagtacagaatgagcccgatctggtgagtttttttgtttcaactaaataggagctacttaatcaagtaaatggggatttcagattgttgtggtgttcctagaaattataatagatttcctattttatgttataaaatatggtatttcaaagaaaaccttttcaaaccaggaagtataaggaaaggctttgttttggaattgaaatcgcaaggacatattttcaccccaacatgcatagttttttatgttcacatgagaggtagaaactataatattataaaaataataactgaggtcttggaaagctaactttggcatattgctaggttgtaaattcttagatgctggagtcttcttgattcttttaataatttgcccgtgtttattgcagatggatggatttgatcaaacagtgaatgtgaaggttgtaatggcaactaatagggcacatactctagattctactttgttgcggccaggtagacttgacaggaaagttgagttctctcttcctgattggcggtagaagaggcctgtgttccaagtatgtactactaagatgaatttgagtgacgaggctgatttggaagattatgtttgcagactggataagatcagtgatgctgatgttgagttggtttcatggcacagaccaaaaattttatgcatttgttgttttctaacaattgtattgctagggacttttgtcctgcgctggccaaagctgtcaaaactatgaaaaaggcagagaagctgctccttatatatagtaaagccattgtgagattctatttcaaaattcgattattcttctataactttcatgtctaatttctctgaattatgacacttcgttaaacttcctcgcttcaaatgcaaatggatctggtgagaagggtagaccaacagttggagaggaaggtgttctgatgagcatcatcttgttctgcatcatcactaatcaacttgttatgcacagtgtccgatgtgcctgtctcaactcgattgctaaggcatataattgacctaaaaaggcacttcaagcgggtaggaaaattcaaggtcgttctcaagtacttccaagtcggtacggtcgttgagcctgcatctgagttctactcaagtaggctgaaaaatagggaacgcaaggcaacattggttgacgagctgttatcagatcaatctctgaagagctacagcaggcagctacgtgcccacgtttggcgaggcgccatttccggccaccggccacgtcgccgcgcgcaggagagaagctaggcactacatgatgtcagccgaccaagatttttaaaaaaagatacgaaagcttgctacaaaataaaccggtccagtcacaagctagctagctagccagattaagtcgatgccgcactgcttgtatatgcattggattccatattgttctcttcagatggacatcaaatgttctgttcattaattaaggttaatcagtggcatcctatgtggaatcgtccctgcttacatgcatatatagtgcgtgcgtgcattatatgtatccattccacatgcatgcatctgtttcaccatctttaatttggatgcttatgcatgcatgcttctttactttgattattgttttttg

SEQ ID NO: 48255 - DNA, 1773 bp, Zea Mays
cccctcccaacggcgcccttcctccccgcacgctacgacggccgagacgaacgcgcggcttcctccccaccaacggcgccctttccaaaagcctcgacccgctgctctcgccgagatcccgcgcgtagcacgcgcggcttccttcccaggctggcgagatgcctccttctacgctcgcgcatgcactatgcccctgtcgttgtccacctcccacgcccacgcatgcacccatcccctcgtcacgcaaaccatagtctcctccgcccccgtgctcgccaccgcgtcgacttcggtggagtccagcgatagggcgagtgggagacgatgccgccctcggttcgcgatgccgcccactcccacacgtcgtcgcgcgaagccggcgctcacttcgggccagatctacctgcccgtgtggtgttgtgcgtacgaccacctcgtgaagatgctgcaacaggcgtacgcgcaggtcgaggagctctccgtcgagcgcgagcacctcgtcaatgagctctagcttctacagagccgcttccacaagcgcaagatctgccaggcctgcctccagaagatggatggatttgatcaaacagtgaatgtgaaggttgtaatggcaactaatagggcacatactctagattctactttgttgcggccaggtagacttgacaggaaagttgagttctctcttcctgattggcggtagaagaggcctgtgttccaagtatgtactactaagatgaatttgagtgacgaggctgatttggaagattatgtttgcagactggataagatcagtgatgctgatgttgagttggtttcatggcacagaccaaaaattttatgcatttgttgttttctaacaattgtattgctagggacttttgtcctgcgctggccaaagctgtcaaaactatgaaaaaggcagagaagctgctccttatatatagtaaagccattggtagaccaacagttggagaggaaggtgttctgatgagcatcatcttgttctgcatcatcactaatcaacttgttatgcacagtgtccgatgtgcctgtctcaactcgattgctaaggcatataattgacctaaaaaggcacttcaagcgggtaggaaaattcaaggtcgttctcaagtacttccaagtcggtacggtcgttgagcctgcatctgagttctactcaagtaggctgaaaaatagggaacgcaaggcaacattggttgacgagctgttatcagatcaatctctgaagagctacagagtcattcatgttggtgggcgtcttggatgaactacattttcttcaacaaagatggagctcatgcagattgatttagtccctttttgcaatgcagctacgtgcccacgtttggcgaggcgccatttccggccaccggccacgtcgccgcgcgcaggagagaagctaggcactacatgatgtcagccgaccaagatttttaaaaaaagatacgaaagcttgctacaaaataaaccggtccagtcacaagctagctagctagccagattaagtcgatgccgcactgcttgtatatgcattggattccatattgttctcttcagatggacatcaaatgttctgttcattaattaaggttaatcagtggcatcctatgtggaatcgtccctgcttacatgcatatatagtgcgtgcgtgcattatatgtatccattccacatgcatgcatctgtttcaccatctttaatttggatgcttatgcatgcatgcttctttactttgattattgttttttg

SEQ ID NO: 48256 - DNA, 1768 bp, Zea Mays
cccctcccaacggcgcccttcctccccgcacgctacgacggccgagacgaacgcgcggcttcctccccaccaacggcgccctttccaaaagcctcgacccgctgctctcgccgagatcccgcgcgtagcacgcgcggcttccttcccaggctggcgagatgcctccttctacgctcgcgcatgcactatgcccctgtcgttgtccacctcccacgcccacgcatgcacccatcccctcgtcacgcaaaccatagtctcctccgcccccgtgctcgccaccgcgtcgacttcggtggagtccagcgatagggcgagtgggagacgatgccgccctcggttcgcgatgccgcccactcccacacgtcgtcgcgcgaagccggcgctcacttcgggccagatctacctgcccgtgtggtgttgtgcgtacgaccacctcgtgaagatgctgcaacaggcgtacgcgcaggtcgaggagctctccgtcgagcgcgagcacctcgtcaatgagctctagcttctacagagccgcttccacaagcgcaagatctgccaggcctgcctccagaagatggatggatttgatcaaacagtgaatgtgaaggttgtaatggcaactaatagggcacatactctagattctactttgttgcggccaggtagacttgacaggaaagttgagttctctcttcctgattggcggtagaagaggcctgtgttccaagtatgtactactaagatgaatttgagtgacgaggctgatttggaagattatgtttgcagactggataagatcagtgatgctgatgttgagttggtttcatggcacagaccaaaaattttatgcatttgttgttttctaacaattgtattgctagggacttttgtcctgcgctggccaaagctgtcaaaactatgaaaaaggcagagaagctgctccttatatatagtaaagccattaccaacagttggagaggaaggtgttctgatgagcatcatcttgttctgcatcatcactaatcaacttgttatgcacagtgtccgatgtgcctgtctcaactcgattgctaaggcatataattgacctaaaaaggcacttcaagcgggtaggaaaattcaaggtcgttctcaagtacttccaagtcggtacggtcgttgagcctgcatctgagttctactcaagtaggctgaaaaatagggaacgcaaggcaacattggttgacgagctgttatcagatcaatctctgaagagctacagagtcattcatgttggtgggcgtcttggatgaactacattttcttcaacaaagatggagctcatgcagattgatttagtccctttttgcaatgcagctacgtgcccacgtttggcgaggcgccatttccggccaccggccacgtcgccgcgcgcaggagagaagctaggcactacatgatgtcagccgaccaagatttttaaaaaaagatacgaaagcttgctacaaaataaaccggtccagtcacaagctagctagctagccagattaagtcgatgccgcactgcttgtatatgcattggattccatattgttctcttcagatggacatcaaatgttctgttcattaattaaggttaatcagtggcatcctatgtggaatcgtccctgcttacatgcatatatagtgcgtgcgtgcattatatgtatccattccacatgcatgcatctgtttcaccatctttaatttggatgcttatgcatgcatgcttctttactttgattattgttttttg

SEQ ID NO: 48257 - DNA, 1979 bp, Zea Mays
cccctcccaacggcgcccttcctccccgcacgctacgacggccgagacgaacgcgcggcttcctccccaccaacggcgccctttccaaaagcctcgacccgctgctctcgccgagatcccgcgcgtagcacgcgcggcttccttcccaggctggcgagatgcctccttctacgctcgcgcatgcactatgcccctgtcgttgtccacctcccacgcccacgcatgcacccatcccctcgtcacgcaaaccatagtctcctccgcccccgtgctcgccaccgcgtcgacttcggtggagtccagcgatagggcgaggtcgtaccccgacgactcccccccccccgacgtgtcgtcctagcccgcacgctccgcctctggcaccgttgcacaccacgccatcctcacccttcaactcctaaactgtccagtgggagacgatgccgccctcggttcgcgatgccgcccactcccacacgtcgtcgcgcgaagccggcgctcacttcgggccagatctacctgcccgtgtggtgttgtgcgtacgaccacctcgtgaagatgctgcaacaggcgtacgcgcaggtcgaggagctctccgtcgagcgcgagcacctcgtcaatgagctctagcttctacagagccgcttccacaagcgcaagatctgccaggcctgcctccagaagatggatggatttgatcaaacagtgaatgtgaaggttgtaatggcaactaatagggcacatactctagattctactttgttgcggccaggtagacttgacaggaaagttgagttctctcttcctgattggcggtagaagaggcctgtgttccaagtatgtactactaagatgaatttgagtgacgaggctgatttggaagattatgtttgcagactggataagatcagtgatgctgatgttgagttggtttcatggcacagaccaaaaattttatgcatttgttgttttctaacaattgtattgctagggacttttgtcctgcgctggccaaagctgtcaaaactatgaaaaaggcagagaagctgctccttatatatagtaaagccattaccaacagttggagaggaaggtgttctgatgagcatcatcttgttctgcatcatcactaatcaacttgttatgcacagtgtccgatgtgcctgtctcaactcgattggtattatgttgtgtgtttagtgattctggtttatcctttgggatgcttatgtgataatatgtttgtaatgtgtttttccagctaaggcatataattgacctaaaaaggcacttcaagcgggtaggaaaattcaaggtcgttctcaagtacttccaagtcggtacggtcgttgagcctgcatctgagttctactcaagtaggctgaaaaatagggaacgcaaggcaacattggttgacgagctgttatcagatcaatctctgaagagctacagagtcattcatgttggtgggcgtcttggatgaactacattttcttcaacaaagatggagctcatgcagattgatttagtccctttttgcaatcgcctttgttgcagcaggcagctacgtgcccacgtttggcgaggcgccatttccggccaccggccacgtcgccgcgcgcaggagagaagctaggcactacatgatgtcagccgaccaagatttttaaaaaaagatacgaaagcttgctacaaaataaaccggtccagtcacaagctagctagctagccagattaagtcgatgccgcactgcttgtatatgcattggattccatattgttctcttcagatggacatcaaatgttctgttcattaattaaggttaatcagtggcatcctatgtggaatcgtccctgcttacatgcatatatagtgcgtgcgtgcattatatgtatccattccacatgcatgcatctgtttcaccatctttaatttggatgcttatgcatgcatgcttctttactttgattattgttttttg

SEQ ID NO: 48258 - DNA, 4159 bp, Zea Mays
cccctcccaacggcgcccttcctccccgcacgctacgacggccgagacgaacgcgcggcttcctccccaccaacggcgccctttccaaaagcctcgacccgctgctctcgccgagatcccgcgcgtagcacgcgcggcttccttcccaggctggcgagatgcctccttctacgctcgcgcatgcactatgcccctgtcgttgtccacctcccacgcccacgcatgcacccatcccctcgtcacgcaaaccatagtctcctccgcccccgtgctcgccaccgcgtcgacttcggtggagtccagcgatagggcgaggtcgtaccccgacgactcccccccccccgacgtgtcgtcctagcccgcacgctccgcctctggcaccgttgcacaccacgccatcctcacccttcaactcctaaactgtccagtgggagacgatgccgccctcggttcgcgatgccgcccactcccacacgtcgtcgcgcgaagccggcgctcacttcgggccagatctacctgcccgtgtggtgttgtgcgtacgaccacctcgtgaagatgctgcaacaggcgtacgcgcaggtcgaggagctctccgtcgagcgcgagcacctcgtcaatgagctctagcttctacagagccgcttccacaagcgcaagatctgccaggcctgcctccagaaggacgaggagatcaggaagagagtcgtaaaggctgagacggcgatgcgtcttggcggcaaggagcttcagattcactgctgcgaggctgttccttagccccagcttcaattgttcctcatttagtttattgaaatctgaattatttggagctaatttgtacagtttatacatagagcacccttgaaagccacattcacatgaaagcagtatacacagagcacttcaattgaaagctgctgcattgtacagggaatatggaattctggattcctatatatcgtaactcctttgctgttgcatatgcattccagtttcagtttggagttacaaaacgaattcaattacaggtgtgcttgttcagttatatagggggggaaactgtttgtgccagaagtaatatactgaattttgtagctgcattgttcaccttatatcgttttgctatggtcaaatctcttctcaccattgggcttgtgaatttcatgttccgggtgatgtgtcatgcctagcagctgattatattctcagcgtgcatgtcatctcactttgcctgtgcagcaagtgtactgagtctgattgatgcatctttagttagctgtaaacttacagaggcaatatgggagcggtgatttcactgtttcgcccgaatccatataaaagtgagtcggaccgggccaaaaaacgtgctttgggctgggcttcaggctttctgtatactgatggtgcatcgactgcagaaggatgaagcggagctatgcatgctggttctgaatttatcaatagacgtatatgtttttttgtggggcttcattgtatccataatttcatatctaagcatttatagttagcgggccttctgctaatctttgctacattaagcatttacctaatatcgttggccatactgcctaattattcagtaaaagtgtgcctgtacattatgtcttcaatttgctgctccatacatctacgtcgacgcttatattcagcctgattggaattgttggctgatgcaacgttgctgatgctgttgtagctagactgcatgtaagtactatgctttgtagtacagaatgagcccgatctggtgagtttttttgtttcaactaaataggagctacttaatcaagtaaatggggatttcagattgttgtggtgttcctagaaattataatagatttcctattttatgttataaaatatggtatttcaaagaaaaccttttcaaaccaggaagtataaggaaaggctttgttttggaattgaaatcgcaaggacatattttcaccccaacatgcatagttttttatgttcacatgagaggtagaaactataatattataaaaataataactgaggtcttggaaagctaactttggcatattgctaggttgtaaattcttagatgctggagtcttcttgattcttttaataatttgcccgtgtttattgcagatggatggatttgatcaaacagtgaatgtgaaggttgtaatggcaactaatagggcacatactctagattctactttgttgcggccaggtagacttgacaggaaagttgagttctctcttcctgattggcggtagaagaggcctgtgttccaagtatgtactactaagatgaatttgagtgacgaggctgatttggaagattatgtttgcagactggataagatcagtgatgctgatgttgagttggtttcatggcacagaccaaaaattttatgcatttgttgttttctaacaattgtattgctagggacttttgtcctgcgctggccaaagctgtcaaaactatgaaaaaggcagagaagctgctccttatatatagtaaagccattggtagaccaacagttggagaggaaggtgttctgatgagcatcatcttgttctgcatcatcactaatcaacttgttatgcacagtgtccgatgtgcctgtctcaactcgattgctaaggcatataattgacctaaaaaggcacttcaagcgggtaggaaaattcaaggtcgttctcaagtacttccaagtcggtacggtcgttgagcctgcatctgagttctactcaagtaggctgaaaaatagggaacgcaaggcaacattggttgacgagctgttatcagatcaatctctgaagagctacaggtatgctcatcatacttttgccattttgcatgtgcatcaatggacagtggcttgtttttcagtgcaagattttctataaaaattgcatatggtcttttgcaagatttcctggtgccttgtttcagagtccaaccatcataataattacacggttgtggtgtgtatatctaaatgggtttcactggttacaactaaggtgcatggttttaaagtcggctgactaatcgcgattagtcgcgattagtcggccttatcgcctggcatagcacgatcagcatggacgactcgatcagggcgactaggttacgactaatcgtcctggtcgccgactaatcacgattagtcggccgactaggtgccatgtccgactagcttgtgccaggtttgggcctgtaaaaaaatgtgtcctctgttatatgggctggcggcccactatctcctgtccacagtagaaagaagctctactgccactgtgccgcacagtacaagcacagtagaaagttagaaaccctaaaaccctaagccgccgcctctgcctcctctgccccggtggtcctcagctccggtggtcctcagctccggcgactgtctgctctctgctcccgtgctccgttgcgctcgcctctgctcagctccggcgctcgcctctgctcactgctcagctccagcaaccgtctgcagccagtctgttctgaactctgttcagagttcagtgctcacttcagttgttaatctcactatctgcaccctctgttctgaacttaaccgaaatgagcacctctacagatggtaatctccaagagtcattcatgttggtgggcgtcttggatgaactacattttcttcaacaaagatggagctcatgcagattgatttagtccctttttgcaatcgcctttgttgcagcaggcagctacgtgcccacgtttggcgaggcgccatttccggccaccggccacgtcgccgcgcgcaggagagaagctaggcactacatgatgtcagccgaccaagatttttaaaaaaagatacgaaagcttgctacaaaataaaccggtccagtcacaagctagctagctagccagattaagtcgatgccgcactgcttgtatatgcattggattccatattgttctcttcagatggacatcaaatgttctgttcattaattaaggttaatcagtggcatcctatgtggaatcgtccctgcttacatgcatatatagtgcgtgcgtgcattatatgtatccattccacatgcatgcatctgtttcaccatctttaatttggatgcttatgcatgcatgcttctttactttgattattgttttttg

SEQ ID NO: 48259 - DNA, 2168 bp, Zea Mays
cccctcccaacggcgcccttcctccccgcacgctacgacggccgagacgaacgcgcggcttcctccccaccaacggcgccctttccaaaagcctcgacccgctgctctcgccgagatcccgcgcgtagcacgcgcggcttccttcccaggctggcgagatgcctccttctacgctcgcgcatgcactatgcccctgtcgttgtccacctcccacgcccacgcatgcacccatcccctcgtcacgcaaaccatagtctcctccgcccccgtgctcgccaccgcgtcgacttcggtggagtccagcgatagggcgagtgggagacgatgccgccctcggttcgcgatgccgcccactcccacacgtcgtcgcgcgaagccggcgctcacttcgggccagatctacctgcccgtgtggtgttgtgcgtacgaccacctcgtgaagatgctgcaacaggcgtacgcgcaggtcgaggagctctccgtcgagcgcgagcacctcgtcaatgagctctagcttctacagagccgcttccacaagcgcaagatctgccaggcctgcctccagaaggacgaggagatcaggaagagagtcgtaaaggctgagacggcgatgcgtcttggcggcaaggagcttcagattcactgctgcgaggctgttccttagccccagcttcaattgttcctcatttagtttattgaaatctgaattatttggagctaatttgtacagtttatacatagagcacccttgaaagccacattcacatgaaagcagtatacacagagcacttcaattgaaagctgctgcattgtacagggaatatggaattctggattcctatatatcatggatggatttgatcaaacagtgaatgtgaaggttgtaatggcaactaatagggcacatactctagattctactttgttgcggccaggtagacttgacaggaaagttgagttctctcttcctgattggcggtagaagaggcctgtgttccaagtatgtactactaagatgaatttgagtgacgaggctgatttggaagattatgtttgcagactggataagatcagtgatgctgatgttgagttggtttcatggcacagaccaaaaattttatgcatttgttgttttctaacaattgtattgctagggacttttgtcctgcgctggccaaagctgtcaaaactatgaaaaaggcagagaagctgctccttatatatagtaaagccattgtgagattctatttcaaaattcgattattcttctataactttcatgtctaatttctctgaattatgacacttcgttaaacttcctcgcttcaaatgcaaatggatctggtgagaagggtagaccaacagttggagaggaaggtgttctgatgagcatcatcttgttctgcatcatcactaatcaacttgttatgcacagtgtccgatgtgcctgtctcaactcgattgctaaggcatataattgacctaaaaaggcacttcaagcgggtaggaaaattcaaggtcgttctcaagtacttccaagtcggtacggtcgttgagcctgcatctgagttctactcaagtaggctgaaaaatagggaacgcaaggcaacattggttgacgagctgttatcagatcaatctctgaagagctacagagtcattcatgttggtgggcgtcttggatgaactacattttcttcaacaaagatggagctcatgcagattgatttagtccctttttgcaatgcagctacgtgcccacgtttggcgaggcgccatttccggccaccggccacgtcgccgcgcgcaggagagaagctaggcactacatgatgtcagccgaccaagatttttaaaaaaagatacgaaagcttgctacaaaataaaccggtccagtcacaagctagctagctagccagattaagtcgatgccgcactgcttgtatatgcattggattccatattgttctcttcagatggacatcaaatgttctgttcattaattaaggttaatcagtggcatcctatgtggaatcgtccctgcttacatgcatatatagtgcgtgcgtgcattatatgtatccattccacatgcatgcatctgtttcaccatctttaatttggatgcttatgcatgcatgcttctttactttgattattgttttttg

SEQ ID NO: 48260 - DNA, 3228 bp, Zea Mays
cccctcccaacggcgcccttcctccccgcacgctacgacggccgagacgaacgcgcggcttcctccccaccaacggcgccctttccaaaagcctcgacccgctgctctcgccgagatcccgcgcgtagcacgcgcggcttccttcccaggctggcgagatgcctccttctacgctcgcgcatgcactatgcccctgtcgttgtccacctcccacgcccacgcatgcacccatcccctcgtcacgcaaaccatagtctcctccgcccccgtgctcgccaccgcgtcgacttcggtggagtccagcgatagggcgagtgggagacgatgccgccctcggttcgcgatgccgcccactcccacacgtcgtcgcgcgaagccggcgctcacttcgggccagatctacctgcccgtgtggtgttgtgcgtacgaccacctcgtgaagatgctgcaacaggcgtacgcgcaggtcgaggagctctccgtcgagcgcgagcacctcgtcaatgagctctagcttctacagagccgcttccacaagcgcaagatctgccaggcctgcctccagaaggacgaggagatcaggaagagagtcgtaaaggctgagacggcgatgcgtcttggcggcaaggagcttcagattcactgctgcgaggctgttccttagccccagcttcaattgttcctcatttagtttattgaaatctgaattatttggagctaatttgtacagtttatacatagagcacccttgaaagccacattcacatgaaagcagtatacacagagcacttcaattgaaagctgctgcattgtacagggaatatggaattctggattcctatatatcgtaactcctttgctgttgcatatgcattccagtttcagtttggagttacaaaacgaattcaattacaggtgtgcttgttcagttatatagggggggaaactgtttgtgccagaagtaatatactgaattttgtagctgcattgttcaccttatatcgttttgctatggtcaaatctcttctcaccattgggcttgtgaatttcatgttccgggtgatgtgtcatgcctagcagctgattatattctcagcgtgcatgtcatctcactttgcctgtgcagcaagtgtactgagtctgattgatgcatctttagttagctgtaaacttacagaggcaatatgggagcggtgatttcactgtttcgcccgaatccatataaaagtgagtcggaccgggccaaaaaacgtgctttgggctgggcttcaggctttctgtatactgatggtgcatcgactgcagaaggatgaagcggagctatgcatgctggttctgaatttatcaatagacgtatatgtttttttgtggggcttcattgtatccataatttcatatctaagcatttatagttagcgggccttctgctaatctttgctacattaagcatttacctaatatcgttggccatactgcctaattattcagtaaaagtgtgcctgtacattatgtcttcaatttgctgctccatacatctacgtcgacgcttatattcagcctgattggaattgttggctgatgcaacgttgctgatgctgttgtagctagactgcatgtaagtactatgctttgtagtacagaatgagcccgatctggtgagtttttttgtttcaactaaataggagctacttaatcaagtaaatggggatttcagattgttgtggtgttcctagaaattataatagatttcctattttatgttataaaatatggtatttcaaagaaaaccttttcaaaccaggaagtataaggaaaggctttgttttggaattgaaatcgcaaggacatattttcaccccaacatgcatagttttttatgttcacatgagaggtagaaactataatattataaaaataataactgaggtcttggaaagctaactttggcatattgctaggttgtaaattcttagatgctggagtcttcttgattcttttaataatttgcccgtgtttattgcagatggatggatttgatcaaacagtgaatgtgaaggttgtaatggcaactaatagggcacatactctagattctactttgttgcggccaggtagacttgacaggaaagttgagttctctcttcctgattggcggtagaagaggcctgtgttccaagtatgtactactaagatgaatttgagtgacgaggctgatttggaagattatgtttgcagactggataagatcagtgatgctgatgttgagttggtttcatggcacagaccaaaaattttatgcatttgttgttttctaacaattgtattgctagggacttttgtcctgcgctggccaaagctgtcaaaactatgaaaaaggcagagaagctgctccttatatatagtaaagccattggtagaccaacagttggagaggaaggtgttctgatgagcatcatcttgttctgcatcatcactaatcaacttgttatgcacagtgtccgatgtgcctgtctcaactcgattgctaaggcatataattgacctaaaaaggcacttcaagcgggtaggaaaattcaaggtcgttctcaagtacttccaagtcggtacggtcgttgagcctgcatctgagttctactcaagtaggctgaaaaatagggaacgcaaggcaacattggttgacgagctgttatcagatcaatctctgaagagctacagagtcattcatgttggtgggcgtcttggatgaactacattttcttcaacaaagatggagctcatgcagattgatttagtccctttttgcaatgcagctacgtgcccacgtttggcgaggcgccatttccggccaccggccacgtcgccgcgcgcaggagagaagctaggcactacatgatgtcagccgaccaagatttttaaaaaaagatacgaaagcttgctacaaaataaaccggtccagtcacaagctagctagctagccagattaagtcgatgccgcactgcttgtatatgcattggattccatattgttctcttcagatggacatcaaatgttctgttcattaattaaggttaatcagtggcatcctatgtggaatcgtccctgcttacatgcatatatagtgcgtgcgtgcattatatgtatccattccacatgcatgcatctgtttcaccatctttaatttggatgcttatgcatgcatgcttctttactttgattattgttttttg

SEQ ID NO: 48261 - DNA, 2591 bp, Zea Mays
cccctcccaacggcgcccttcctccccgcacgctacgacggccgagacgaacgcgcggcttcctccccaccaacggcgccctttccaaaagcctcgacccgctgctctcgccgagatcccgcgcgtagcacgcgcggcttccttcccaggctggcgagatgcctccttctacgctcgcgcatgcactatgcccctgtcgttgtccacctcccacgcccacgcatgcacccatcccctcgtcacgcaaaccatagtctcctccgcccccgtgctcgccaccgcgtcgacttcggtggagtccagcgatagggcgagtgggagacgatgccgccctcggttcgcgatgccgcccactcccacacgtcgtcgcgcgaagccggcgctcacttcgggccagatctacctgcccgtgtggtgttgtgcgtacgaccacctcgtgaagatgctgcaacaggcgtacgcgcaggtcgaggagctctccgtcgagcgcgagcacctcgtcaatgagctctagcttctacagagccgcttccacaagcgcaagatctgccaggcctgcctccagaagatggatggatttgatcaaacagtgaatgtgaaggttgtaatggcaactaatagggcacatactctagattctactttgttgcggccaggtagacttgacaggaaagttgagttctctcttcctgattggcggtagaagaggcctgtgttccaagtatgtactactaagatgaatttgagtgacgaggctgatttggaagattatgtttgcagactggataagatcagtgatgctgatgttgagttggtttcatggcacagaccaaaaattttatgcatttgttgttttctaacaattgtattgctagggacttttgtcctgcgctggccaaagctgtcaaaactatgaaaaaggcagagaagctgctccttatatatagtaaagccattggtagaccaacagttggagaggaaggtgttctgatgagcatcatcttgttctgcatcatcactaatcaacttgttatgcacagtgtccgatgtgcctgtctcaactcgattgctaaggcatataattgacctaaaaaggcacttcaagcgggtaggaaaattcaaggtcgttctcaagtacttccaagtcggtacggtcgttgagcctgcatctgagttctactcaagtaggctgaaaaatagggaacgcaaggcaacattggttgacgagctgttatcagatcaatctctgaagagctacaggtatgctcatcatacttttgccattttgcatgtgcatcaatggacagtggcttgtttttcagtgcaagattttctataaaaattgcatatggtcttttgcaagatttcctggtgccttgtttcagagtccaaccatcataataattacacggttgtggtgtgtatatctaaatgggtttcactggttacaactaaggtgcatggttttaaagtcggctgactaatcgcgattagtcgcgattagtcggccttatcgcctggcatagcacgatcagcatggacgactcgatcagggcgactaggttacgactaatcgtcctggtcgccgactaatcacgattagtcggccgactaggtgccatgtccgactagcttgtgccaggtttgggcctgtaaaaaaatgtgtcctctgttatatgggctggcggcccactatctcctgtccacagtagaaagaagctctactgccactgtgccgcacagtacaagcacagtagaaagttagaaaccctaaaaccctaagccgccgcctctgcctcctctgccccggtggtcctcagctccggtggtcctcagctccggcgactgtctgctctctgctcccgtgctccgttgcgctcgcctctgctcagctccggcgctcgcctctgctcactgctcagctccagcaaccgtctgcagccagtctgttctgaactctgttcagagttcagtgctcacttcagttgttaatctcactatctgcaccctctgttctgaacttaaccgaaatgagcacctctacagatggtaatctccaagagtcattcatgttggtgggcgtcttggatgaactacattttcttcaacaaagatggagctcatgcagattgatttagtccctttttgcaatcgcctttgttgcagcaggcagctacgtgcccacgtttggcgaggcgccatttccggccaccggccacgtcgccgcgcgcaggagagaagctaggcactacatgatgtcagccgaccaagatttttaaaaaaagatacgaaagcttgctacaaaataaaccggtccagtcacaagctagctagctagccagattaagtcgatgccgcactgcttgtatatgcattggattccatattgttctcttcagatggacatcaaatgttctgttcattaattaaggttaatcagtggcatcctatgtggaatcgtccctgcttacatgcatatatagtgcgtgcgtgcattatatgtatccattccacatgcatgcatctgtttcaccatctttaatttggatgcttatgcatgcatgcttctttactttgattattgttttttg

SEQ ID NO: 48262 - DNA, 2103 bp, Zea Mays
cccctcccaacggcgcccttcctccccgcacgctacgacggccgagacgaacgcgcggcttcctccccaccaacggcgccctttccaaaagcctcgacccgctgctctcgccgagatcccgcgcgtagcacgcgcggcttccttcccaggctggcgagatgcctccttctacgctcgcgcatgcactatgcccctgtcgttgtccacctcccacgcccacgcatgcacccatcccctcgtcacgcaaaccatagtctcctccgcccccgtgctcgccaccgcgtcgacttcggtggagtccagcgatagggcgaggtcgtaccccgacgactcccccccccccgacgtgtcgtcctagcccgcacgctccgcctctggcaccgttgcacaccacgccatcctcacccttcaactcctaaactgtccagtgggagacgatgccgccctcggttcgcgatgccgcccactcccacacgtcgtcgcgcgaagccggcgctcacttcgggccagatctacctgcccgtgtggtgttgtgcgtacgaccacctcgtgaagatgctgcaacaggcgtacgcgcaggtcgaggagctctccgtcgagcgcgagcacctcgtcaatgagctctagcttctacagagccgcttccacaagcgcaagatctgccaggcctgcctccagaaggacgaggagatcaggaagagagtcgtaaaggctgagacggcgatgcgtcttggcggcaaggagcttcagattcactgctgcgagatggatggatttgatcaaacagtgaatgtgaaggttgtaatggcaactaatagggcacatactctagattctactttgttgcggccaggtagacttgacaggaaagttgagttctctcttcctgattggcggtagaagaggcctgtgttccaagtatgtactactaagatgaatttgagtgacgaggctgatttggaagattatgtttgcagactggataagatcagtgatgctgatgttgagttggtttcatggcacagaccaaaaattttatgcatttgttgttttctaacaattgtattgctagggacttttgtcctgcgctggccaaagctgtcaaaactatgaaaaaggcagagaagctgctccttatatatagtaaagccattgtgagattctatttcaaaattcgattattcttctataactttcatgtctaatttctctgaattatgacacttcgttaaacttcctcgcttcaaatgcaaatggatctggtgagaagggtagaccaacagttggagaggaaggtgttctgatgagcatcatcttgttctgcatcatcactaatcaacttgttatgcacagtgtccgatgtgcctgtctcaactcgattgctaaggcatataattgacctaaaaaggcacttcaagcgggtaggaaaattcaaggtcgttctcaagtacttccaagtcggtacggtcgttgagcctgcatctgagttctactcaagtaggctgaaaaatagggaacgcaaggcaacattggttgacgagctgttatcagatcaatctctgaagagctacagagtcattcatgttggtgggcgtcttggatgaactacattttcttcaacaaagatggagctcatgcagattgatttagtccctttttgcaatcgcctttgttgcagcaggcagctacgtgcccacgtttggcgaggcgccatttccggccaccggccacgtcgccgcgcgcaggagagaagctaggcactacatgatgtcagccgaccaagatttttaaaaaaagatacgaaagcttgctacaaaataaaccggtccagtcacaagctagctagctagccagattaagtcgatgccgcactgcttgtatatgcattggattccatattgttctcttcagatggacatcaaatgttctgttcattaattaaggttaatcagtggcatcctatgtggaatcgtccctgcttacatgcatatatagtgcgtgcgtgcattatatgtatccattccacatgcatgcatctgtttcaccatctttaatttggatgcttatgcatgcatgcttctttactttgattattgttttttg

SEQ ID NO: 48263 - DNA, 1903 bp, Zea Mays
cccctcccaacggcgcccttcctccccgcacgctacgacggccgagacgaacgcgcggcttcctccccaccaacggcgccctttccaaaagcctcgacccgctgctctcgccgagatcccgcgcgtagcacgcgcggcttccttcccaggctggcgagatgcctccttctacgctcgcgcatgcactatgcccctgtcgttgtccacctcccacgcccacgcatgcacccatcccctcgtcacgcaaaccatagtctcctccgcccccgtgctcgccaccgcgtcgacttcggtggagtccagcgatagggcgaggtcgtaccccgacgactcccccccccccgacgtgtcgtcctagcccgcacgctccgcctctggcaccgttgcacaccacgccatcctcacccttcaactcctaaactgtccagtgggagacgatgccgccctcggttcgcgatgccgcccactcccacacgtcgtcgcgcgaagccggcgctcacttcgggccagatctacctgcccgtgtggtgttgtgcgtacgaccacctcgtgaagatgctgcaacaggcgtacgcgcaggtcgaggagctctccgtcgagcgcgagcacctcgtcaatgagctctagcttctacagagccgcttccacaagcgcaagatctgccaggcctgcctccagaagatggatggatttgatcaaacagtgaatgtgaaggttgtaatggcaactaatagggcacatactctagattctactttgttgcggccaggtagacttgacaggaaagttgagttctctcttcctgattggcggtagaagaggcctgtgttccaagtatgtactactaagatgaatttgagtgacgaggctgatttggaagattatgtttgcagactggataagatcagtgatgctgatgttgagttggtttcatggcacagaccaaaaattttatgcatttgttgttttctaacaattgtattgctagggacttttgtcctgcgctggccaaagctgtcaaaactatgaaaaaggcagagaagctgctccttatatatagtaaagccattggtagaccaacagttggagaggaaggtgttctgatgagcatcatcttgttctgcatcatcactaatcaacttgttatgcacagtgtccgatgtgcctgtctcaactcgattgctaaggcatataattgacctaaaaaggcacttcaagcgggtaggaaaattcaaggtcgttctcaagtacttccaagtcggtacggtcgttgagcctgcatctgagttctactcaagtaggctgaaaaatagggaacgcaaggcaacattggttgacgagctgttatcagatcaatctctgaagagctacagagtcattcatgttggtgggcgtcttggatgaactacattttcttcaacaaagatggagctcatgcagattgatttagtccctttttgcaatcgcctttgttgcagcaggcagctacgtgcccacgtttggcgaggcgccatttccggccaccggccacgtcgccgcgcgcaggagagaagctaggcactacatgatgtcagccgaccaagatttttaaaaaaagatacgaaagcttgctacaaaataaaccggtccagtcacaagctagctagctagccagattaagtcgatgccgcactgcttgtatatgcattggattccatattgttctcttcagatggacatcaaatgttctgttcattaattaaggttaatcagtggcatcctatgtggaatcgtccctgcttacatgcatatatagtgcgtgcgtgcattatatgtatccattccacatgcatgcatctgtttcaccatctttaatttggatgcttatgcatgcatgcttctttactttgattattgttttttg

SEQ ID NO: 48264 - DNA, 2968 bp, Zea Mays
aaaagagtccattcacaggaccaccccatgggcatcagccatgcccatgagccccatcagttcgctgttcatgcatctccaccccaccacaacctccgccccaccccaccccactgctgcagctttttaaggacaaaccaaatccgctgcccctgccctgcatcgcagttcgctgcaacttttgctcacaggacacaggcacagctttgatgagcagcggccaaaacagaaagagcgattcgatcgtttcctgctccactaccactagctagtctgccgccgcacgccgtgccgcgcgagctacgactgccggcgccggaggcaggagaggaaggtgctgctgctccccctgccgcccgcgtcctgtgactgagatccatccagctcggaggaggaggaagaggaggcgctcctggtcctggcttctagacgttgtaacccagatcttgacgcagctgcccaagtagtttactcatctagaggagaggaggggttggatccttgacccgatttggtgggggctttgccactgggatagggggacagtttggcctgctggatctttatcgccagttgttggtcctgtcctttccgttgggctgggacgcattcacatgccagtggctgccggtttggtacttactcgacggattggttaagctctgtctgtggggttgttgtgctgctccttctttcatcttattttgtggtgattggtgggcggaggaggaagagctaggaagattgtctctcttattcttcttgcgtcatttttcggtgcggcaagatgaagtatatgaagcttggatcaaagcctgatgtctttcagacagagggcagcaatatcaggtttgttgcaacagaactggcaacagacattgttatatccgttggggatgccaagttttatcttcataagttccctcttctatcaaagagttcactcctgcaaaggttagttgcttcaagcaatgatgagaaaaatgatgaagtggatatctctgacatccctggtggaccttcagcatttgaaatatgtgctaagttctgctatggcgtgattgtaacactcaatgcatataacgtcctcgctgcccgctgtgcagctgagtacctagaaatgtttgagagcatcgacaaaggaaacctcatatacaagatcgatgtgtttctgacatcaagcgtatttcgcacctggaaggactcgatcatagttttacagagcacaaagtcactgcaaccttggtgtgaaaatctgaaggtaatcaaccactgcattgactgtatcgcgtcgaaggcgtcaattgatccatcagaggttgaatggtcatacacttacaacagaaaaaagctcccatctgagaatggtatcgattcacattggaacggtgtcaggaagcaacctatggtccctagtgactggtgggttgaggacctttgtgagctcgaagtggatttgtacaagcgtgtgatcatgaccatcaaggcaaagggaagcacaccagctgctgtcattggagaagcattgagggcctacgcataccgacggctgcttggctcccttgaagatgctgtgagcaatggagtcgattgcacaaaacgccgtgcagctcttgatgccattgtatttctgttgccagctgaggaaggctcggtgtcatgtggttttcttcttaagctgctaggggctgcatgtttgcttgaatctggggagtcccatcgcgttaacttgatcaagagaataggcacgcagttggatggtgcttcagttccagaccttcttataccgctaaatactaatgaagacaatatatccagcatagatctgatcatggcaatagtggaagagttcatgtcacggaatggtgatagtggtacggagaaatttcaagacgatgaaggaatcgtggacatcgagaagtcgacatctgtttccagcgcgtcaaagcttgcagttgcaaagctgatcgatggatatcttgccgagatcgccaaagatcccaaccttcctcttccaaagttgatcgcactcgccgaaatggtgtcttctctaccccggccaacgcatgacgggctctatcgtgccattgacatgtatctgaaggagcaccccagcctatcaaagagcgagaagaagaaactgtgcgggctgatggactgcaagcagctgtcgcaggacgcgtgcatgcacgccgtgcagaacgagcgtctccccctacgcgtggtcgtgcagagagaacggcaactccattggcagctccaggtcagccgcgacgacgatgacgacggaggaagaggagagtggggtcccgacgtcgagcgacatcaactctctgaggtcgatgaggctggccaacaacagcggtgggagcgagaggagcagcggcagcagtgacgtgaacaacaagagcagcgacgacaggagcgccgccgccacggggaaggcgaaggggacgatgctgatgccgaagaagatgctgagcaagctctggtccgggaaaacgaacgccggcgagagcagcagctcggacacgtcggatagccctgggtccgccaacccggaggaggcgaagtccacgcagtcgcggatcacatggcgctcggtatcctagtcgcgcgcgcgcggcgggggttcagcggggtcacaagctcacagccttagttttgttcttggtcttgattttgccttcgcctagcgagtacagcagtagcgatctcataacatatggagttactgctactggtttcacttgtcatgtcgccgatgacgttttctttttggcatgggattgcttgtagctggagtggagtaggtttggtcattggtgatgtttccagcgaagttccatgggatatttattatgtgacctttttttcatggtaggaatacaaagaaagtagtacagtccgttataattgatgtattttttgcaggcaaaaataatcatagtgttttagtttgcttctt

SEQ ID NO: 48265 - DNA, 1217 bp, Zea Mays
caacctccgccccaccccaccccactgctgcagctttttaaggacaaaccaaatccgctgcccctgccctgcatcgcagttcgctgcaacttttgctcacaggacacaggcacagctttgatgagcagcggccaaaacagaaagagcgattcgatcgtttcctgctccactaccactagctagtctgccgccgcacgccgtgccgcgcgagctacgactgccggcgccggaggcaggagaggaaggtttgttgcaacagaactggcaacagacattgttatatccgttggggatgccaagttttatcttcataagttccctcttctatcaaagagttcactcctgcaaaggttagttgcttcaagcaatgatgagaaaaatgatgaagtggatatctctgacatccctggtggaccttcagcatttgaaatatgtgctaagttctgctatggcgtgattgtaacactcaatgcatataacgtcctcgctgcccgctgtgcagctgagtacctagaaatgtttgagagcatcgacaaaggaaacctcatatacaagatcgatgtgtttctgacatcaagcgtatttcgcacctggaaggactcgatcatagttttacagagcacaaagtcactgcaaccttggtgtgaaaatctgaaggtaatcaaccactgcattgactgtatcgcgtcgaaggcgaaggggacgatgctgatgccgaagaagatgctgagcaagctctggtccgggaaaacgaacgccggcgagagcagcagctcggacacgtcggatagccctgggtccgccaacccggaggaggcgaagtccacgcagtcgcggatcacatggcgctcggtatcctagtcgcgcgcgcgcggcgggggttcagcggggtcacaagctcacagccttagttttgttcttggtcttgattttgccttcgcctagcgagtacagcagtagcgatctcataacatatggagttactgctactggtttcacttgtcatgtcgccgatgacgttttctttttggcatgggattgcttgtagctggagtggagtaggtttggtcattggtgatgtttccagcgaagttccatgggatatttattatgtgacctttttttcatggtaggaatacaaagaaagtagtacagtccgttataattgatgtattttttgcaggcaaaaataatcatagtgttttagtttgcttctt

SEQ ID NO: 48266 - DNA, 2341 bp, Zea Mays
ctgaaccgcgcaacttactaccagcatgttagtgtatagtctttctattttctttcttctctctcctcagtctgttcttcctactcccgatccattcgcagagggcagcagccacctcctctccccgcggccgagctcgcgcctcgcccgccgcctgaactcgtcttgcctgcggccgatctcccccctccgttcgccgcgccgcaacccggagaggagaccgcgctcggtcgagcaccccctggggcagcgtcctcgcgaccagctccggcgcggcgtccgccctcagcagcccgggtgtccccgggaacgtctccggcgcggccggcacacagctcgacaggcttttcagttcagtgcagtgtaccaagattctctgttaatttgtgtatgagatcagttaactgataaagacatgtgaagaaccagtgatcagtaatctgtacgcttcagattgtagtatccttgagatggatggaagagaatcaggcttatggtaaatcctggtgaatattcatgggaggtcagcaagttctggcctgactaagactagtaaaaatacggtgcttcatctcagatcatcaatgctgatgccatcggtgtgaatcaagccaacaagggcatgatactctctatgttctattatggttatgttttatcacagattcctggtggatgggcagcacagagaataggaggtagacgtgtcctgctactgtcatttgtattgtggtcaatgatatgtggtttaattccacttgatcccaacagagtaaccattctggtcctttctcgcctattcgttggtgtagcacaaggtttcatatttcctgccattcacactgtcctggcacaatgggtgccgccgcaggagcgctctcgctcagtatctcttactacctcagggatgtatcttggtgcagcctgtggcatgcttttcttcccaagtctggtgaagcacatgggaccccagtcagttttttttgttgaagcagtgttgggagcagcatggtctgtaatatggctgaaattttccagtgacccaccccgtactgatcttccaaaggtatcaatgccaaaagtgccatctcgagacatgattaaggcacaagcaggaggggttgtggcacctcgcacggtaaagatcccgtggcgaaggataatattcagcctacctgtttgggcaatagttgtgaacaacttcacgttccactatgccctctatgttcttatgaactggctccctacctattttgagctaggccttaagcttagcctccaggatatgggttcctcaaagatgcttccctatttcaacatgttcattttctccaatatcggcggtgtggttgctgatcacttgattacaaggaggattctatctgttaccaagacaaggaagcttctgaacaccatcgggttcatcgtctcagcgtttgcactcatggcccttcctttgttcagcacaccgtcaggcactgtaatgtgttcagcgatatccctcggttttcttgctctaggaagagcagggtttgccgtgaaccatatggatgttgctccgaagtttgcagggatagtgatgggagtctcaaacacggcggggacactggctggaatcgtcggtgtcggcctcacgggcaatattctggaggcggcaaaggcttctaacaaggatctaacggactcggaaacctggaaaacagtcttcttcgttccagcatacctttgtattttcagttccgtcatttttttgatcttttcgacaggcgaaaagatcttcgaataaagggtggctattactttttttgccaattcttttcttacttacggtgaggcaggattgtgaaacgggtatcttacatgtatctgtagcatttgttacaaaattttcagattttagactgcatcacatacacgatcagaggctatgtcaggagatcttgcattttcgttatgatgaagactcggttcattggcagtcacactcacactccaatgcagctaacagaatttgcttctctcccaggttaacttcttggttttggtacatagtcccaccacaaagtttgtcaagttcccttacctttgccatgcaatgtaaacatatatggtgccaatgagaataaacggcattgctattttcttatctgcatggcccttgttgaggcaaattcacttccttcgagtctctcaaccatttttctggatcttttttttagttgtggtcaactggttatatagttggtctttccagcgttgacaggatttatgatttttttgttgctcttcaacgagacaaggcttaacattcatagatatgactccattattactggtcttt

SEQ ID NO: 48267 - DNA, 2188 bp, Zea Mays
ctgaaccgcgcaacttactaccagcatgttagtgtatagtctttctattttctttcttctctctcctcagtctgttcttcctactcccgatccattcgcagagggcagcagccacctcctctccccgcggccgagctcgcgcctcgcccgccgcctgaactcgtcttgcctgcggccgatctcccccctccgttcgccgcgccgcaacccggagaggagaccgcgctcggtcgagcaccccctggggcagcgtcctcgcgaccagctccggcgcggcgtccgccctcagcagcccgggtgtccccgggaacgtctccggcgcggccggcacacagctcgacaggcttttcagttcagtgcagtgtaccaagattctctgttaatttgtgtatgagatcagttaactgataaagacatgtgaagaaccagtgatcagtaatctgtacgcttcagattgtagtatccttgagatggatggaagagaatcaggcttatggtaaatcctggtgaatattcatgggaggtcagcaagttctggcctgactaagactagtaaaaatacggtgcttcatctcagatcatcaatggtgagaatgaggttcccgaaacgttatataatagtattgttgacattcatctgcacaaatgtttgctacattgagcgtgtgggtttctcaattacctatactgttgcagctgatgccatcggtgtgaatcaagccaacaagggcatgatactctctatgttctattatggttatgttttatcacagattcctggtggatgggcagcacagagaataggaggtagacgtgtcctgctactgtcatttgtattgtggtcaatgatatgtggtttaattccacttgatcccaacagagtaaccattctggtcctttctcgcctattcgttggtgtagcacaaggtttcatatttcctgccattcacactgtcctggcacaatgggtgccgccgcaggagcgctctcgctcagtatctcttactacctcagggatgtatcttggtgcagcctgtggcatgcttttcttcccaagtctggtgaagcacatgggaccccagtcagttttttttgttgaagcagtgttgggagcagcatggtctgtaatatggctgaaattttccagtgacccaccccgtactgatcttccaaaggtatcaatgccaaaagtgccatctcgagacatgattaaggcacaagcaggaggggttgtggcacctcgcacggtaaagatcccgtggcgaaggataatattcagcctacctgtttgggcaatagttgtgaacaacttcacgttccactatgccctctatgttcttatgaactggctccctacctattttgagctaggccttaagcttagcctccaggatatgggttcctcaaagatgcttccctatttcaacatgttcattttctccaatatcggcggtgtggttgctgatcacttgattacaaggaggattctatctgttaccaagacaaggaagcttctgaacaccatcgggttcatcgtctcagcgtttgcactcatggcccttcctttgttcagcacaccgtcaggcactgtaatgtgttcagcgatatccctcggttttcttgctctaggaagagcagggtttgccgtgaaccatatggatgttgctccgaagtttgcagggatagtgatgggagtctcaaacacggcggggacactggctggaatcgtcggtgtcggcctcacgggcaatattctggaggcggcaaaggcttctaacaaggatctaacggactcggaaacctggaaaacagtcttcttcgttccagcatacctttgtattttcagttccgtcatttttttgatcttttcgacaggcgaaaagatcttcgaataaagggtggctattactttttttgccaattcttttcttacttacggtgaggcaggattgtgaaacgggtatcttacatgtatctgtagcatttgttacaaaattttcagattttagactgcatcacatacacgatcagaggctatgtcaggagatcttgcattttcgttatgatgaagactcggttcattggcagtcacactcacactccaatgcagctaacagaatttgcttctctcccagagaaggtacttgtgtaccgtagaggatcaacagaggatacaacaactccaggt

SEQ ID NO: 48268 - DNA, 2131 bp, Zea Mays
tctcggccacaacactgcgcgctccgcagacgcccaccaagcttccgctattcgccaaaaggtccccttctgccctccgccctatctatccatggaaaggcggcacggcttcttcgcggcgctgcgggaggaggtggcgcgcgggctgtcgccggcgcgggcgcgccgcaagccggacgccacggacctggccgccgcgctcagcttcaccggagtggcaggcgccggcgagatgctggcgccgctcatggaggggcccgatccggagcccagcgacgacggggacggcagcggccgccgaggtgccgcgcgcgggaggaaggaaggctggggccactgggtgcgcgtgcagttcgcgcgggccccgtcctcggcggtcgcgctgcgcagcgacatcaggatgctcctcggcgttatggctgcgccgctcgcgccggtccgcgtctgcgccgccgagccactcccgcacctcagcgtcaaggacactcccatcgaaacctcgtccgcgcagtacatcctgcagcagtacctcgcggcttccggagggcacaagctcctggcctccctgcgcagcacctacgccatgggcaaggtacgcatggtggccaccgagttcgagaccgccggccgtctcactaagaaccgcagcgctggacgcggcggcgagcctggccgcttcgtgctgtggcagatggcccctgagatgtggtacatcgagctggctgtccgcgggagcaaggtgcacgcgggatgcaacggcaagctcgtgtggcggcacacaccatggctcggtgcccattctgccaagggccctgttcgtccgcttcgccgtgcccttcagggcctggatccgctgacggcggcaagcatgtttgctcgtgcgcggtgcatcggcgagaggaaggtgaacggggaggattgcttcatcctgaagctgagcacggatcctgagatcctcaaggcacgcagcgagggccatgcagagattatcaggcacgtcacgttcgggtacttcagccagaggactggtcttcttgtccacattgaggattcacatctgacccgaattcagtcggccgcgggaggggacgcggtctactgggagaccaccatcagctcgtccatggaggactaccgcccagtggacggtatagtggtggcgcattctgggcgctcggccgtgaccctgttccggtttggtgaggttgccatgagccacaccaagacccggatggaggaggtgtggagcattgaagaggtagcattcaacgttcctgggctgtccatggactgtttcatcccgcccaccgacatcaagtctggatctgttggcgaggccatggagcttgctcatggcgagagaagccgggccggtcctcctccccctcccccaggctgccgcgctaaagttgccgcgctggggaaggcagaagaaggtaaagtggcatggggcggtggaaccgtactcgagaatcaaaactgatccgcagactgtccataaacttggttctcacagccgcgcggctgctgaccctgtttggagtctagtgtaggagagaaacaaacgagtgaaggctgagagaggatttggaagtttggtaaatccaaatgcctcctctgtataggaagaagcatgggggcattcacatggtcttgcatatgattgaagcggatctgtgtgaaacatcctctctctctctctctctctgatcccatccagagagacatggtatggtagtagcgaggaagaagggtttcctcaccagcaaggcaggtgttttggccgtcatggctgggcatccgattggcggcgttcagtgtgtttggcttgctgacggattgagccgaagctaacctctcagtgaagagagagagagagagagagagagagagagagagagagagagagagagagagagagagtagaacatctgaatggtttttacttgtgttttagtactgggtagaacctgttagatgtttgttagtaattagcagtgtttttatttagcaagttgttttttttgttcctgaacctcctttgcatctctctatattttaatcatgagatgaaggatgtactgttattaaacagatggtggatgtaatctaatccaagacatcttttttg

SEQ ID NO: 48269 - DNA, 474 bp, Zea Mays
accaaccaccgtggccccgtcaaatttgccattcctgtctcggttccctcttcccggcgcaccagcctacctcgccgacgccaggccgccaggccgccggagacatgaaccagcccgtgcagaagaacaccctctacgtcggtgggctggcggaggaggtggacgagaaaatcctgcacgccgcgttcgtgcccttcggtgaggtcaaggacgtcaagacgccgctcgaccagtccacgcagaagcaccgctccttcggtttcgtcaccttcctggagcgcgaggacgccgccgctgccatggacaacatggacggcgccgagctcttcggccgcgtgcttaccgtcaactacgccttccccgagcgcatcaagggaggggagcagggatgggctgcccagccaagctgctgtatcaaatatagacaccatttttctgcgatctagagactcatgatggattggcgtatgttca

SEQ ID NO: 48270 - DNA, 897 bp, Zea Mays
accaaccaccgtggccccgtcaaatttgccattcctgtctcggttccctcttcccggcgcaccagcctacctcgccgacgccaggccgccaggccgccggagacatgaaccagcccgtgcagaagaacaccctctacgtcggtgggctggcggaggaggtggacgagaaaatcctgcacgccgcgttcgtgcccttcggtgaggtcaaggacgtcaagacgccgctcgaccagtccacgcagaagcaccgctccttcggtttcgtcaccttcctggagcgcgaggacgccgccgctgccatggacaacatggacggcgccgagctcttcggccgcgtgcttaccgtcaactacgccttccccgagcgcatcaagggaggggagcagggatgggctgcccagccaatctgggccgatgcggacacttggttcgagaggcagcagagaagctgcacagggagaaactggccgctgaaagggaaggcgagaaagaagaagatcccatggctgccgcagaggctcaggctgtgaaacaaagttcttaagaaccggatattaactcataactcatgtgctacgttgctgcctgtttgtcagatatgactaaacgaatcttgtgaatgctgtttgttttgctgaaagaaccctatttctcacctgacgtgggattcttattggtttcccttttccctgtctgtcttagtatatatatgcacactggcgcaaagaacaattcttgtattatctgcgacactcatacagaagacctggagatgcacgcagcatttaccaaactggactagtggagcaggagatgcgttctgatcgtggccacacagtcaagcagagcttactaaaatgttgtggttcccaacgtgtgttgtttgggcttactcaa

SEQ ID NO: 48271 - DNA, 1054 bp, Zea Mays
accaaccaccgtggccccgtcaaatttgccattcctgtctcggttccctcttcccggcgcaccagcctacctcgccgacgccaggccgccaggccgccggagacatgaaccagcccgtgcagaagaacaccctctacgtcggtaagcccaccatctcttcctcttccaagcgcgcgcactctcttgtccaatcccccaccttcttggcggcgcgcgtcacctgctcgacgaaattcctcggtgggctggcggaggaggtggacgagaaaatcctgcacgccgcgttcgtgcccttcggtgaggtcaaggacgtcaagacgccgctcgaccagtccacgcagaagcaccgctccttcggtttcgtcaccttcctggagcgcgaggacgccgccgctgccatggacaacatggacggcgccgagctcttcggccgcgtgcttaccgtcaactacgccttccccgagcgcatcaagggaggggagcagggatgggctgcccagccaatctgggccgatgcggacacttggttcgagaggcagcagcaggaagaggagatgcagcggctgcaggcagagcaccgcgcagcgatgcaggcagcagagaagctgcacagggagaaactggccgctgaaagggaaggcgagaaagaagaagatcccatggctgccgcagaggctcaggctgtgaaacaaagttcttaagaaccggatattaactcataactcatgtgctacgttgctgcctgtttgtcagatatgactaaacgaatcttgtgaatgctgtttgttttgctgaaagaaccctatttctcacctgacgtgggattcttattggtttcccttttccctgtctgtcttagtatatatatgcacactggcgcaaagaacaattcttgtattatctgcgacactcatacagaagacctggagatgcacgcagcatttaccaaactggactagtggagcaggagatgcgttctgatcgtggccacacagtcaagcagagcttactaaaatgttgtggttcccaacgtgtgttgtttgggcttactcaa

SEQ ID NO: 48272 - DNA, 1543 bp, Zea Mays
ggccattcgcctctcctatataacgaccacttcctcccaccgcttcttcccacgcctcccaacctcctctgcttccgagatctctccccacctcccggtccgctagcagatagcgggggccagagagatcgagatccggaggcgctagcgccacccatcagcgtctgcggcaatggcgggcacggtgacggtcccggggtcgtcgaaaccctccacgccgctgctcaaggacgagctcgacatcgtgatcccgacgatccgcaacctcgacttcctcgagatgtggaggcccttcttccagccctaccacctcatcatcgtgcaggacggcgacccgaccaagaccatcaaggtccccgagggcttcgactacgagctctacaaccgcaacgacatcaaccgcatcctcgggcccaaggcctcctgcatatccttcaaggactccgcctgccgctgcttcggctacatggtctccaagaagaagttgccaaggacccatcaggcaaggatatcaatgctcttgagcagcacatcaagaacctcctcagcccgtccacaccgttcttcttcaacaccctgtacgacccctaccgtgagggtgctgactttgtgcgtggataccccttcagcctcagggagggtgcccacactgctgtctcccacggcctgtggctgaacatccctgactatgatgcacccacccagctggtcaagcctaaggagaggaacgaaaggtacgttgatgctgtcatgacaatccccaagggaaccttgttccccatgtgcggcatgaaccttgccttcgacagggatctcattggccctgccatgtacttcggtctcatgggtgatggccagcccattggtcgctacgacgacatgtgggccggatggtgtgtgaaggtcatctgcgaccacttgagcctgggagtcaagactggcttgccatacatctggcacagcaaggctagcaaccccttcgttaacttgaagaaggaatacaagggcatcttctggcaggaggacatcatccccttcttccagaacgtgaccattcccaaggattgcgacaccgtccagaagtgctacatctacctctctggacaggtgaaggagaagcttggcaagatcgacccctactttgccaagctcggtgacgccatggtcacctggatcgaggcctgggatgagctgaacccggctggccccgcggctgggaaagacaaggccaagtagatgggagtccctgggggtgcattcacttccctgctgaagtgaaaagaaagtatgattgggtccagcctaggctcccccatagatatagctctttttgagagggaagagggattaattcagcagcaggttctttttataaattctttgttgttatgaagcaggcggtacttttgtagttgatgaaggggatttgtcgccactgtcatttacataattcggataataatttatattgtgtaatcttgagaatcaaagcactgtttgtgttatagcatgtctatgaatgcgcactgttgctttttccccc

SEQ ID NO: 48273 - DNA, 1404 bp, Zea Mays
cttcctcccaccgcttcttcccacgcctcccaacctcctctgcttccgagatctctccccacctcccggtccgctagcagatagcgggggccagagagatcgagatccggaggcgctagcgccacccatcagcgtctgcggcaatggcgggcacggtgacggtcccggggtcgtcgaaaccctccacgccgctgctcaaggacgagctcgacaaccgcaacgacatcaaccgcatcctcgggcccaaggcctcctgcatatccttcaaggactccgcctgccgctgcttcggctacatggtctccaagaagaagtacatctacaccatcgacgacgactgcttcgttgccaaggacccatcaggcaaggatatcaatgctcttgagcagcacatcaagaacctcctcagcccgtccacaccgttcttcttcaacaccctgtacgacccctaccgtgagggtgctgactttgtgcgtggataccccttcagcctcagggagggtgcccacactgctgtctcccacggcctgtggctgaacatccctgactatgatgcacccacccagctggtcaagcctaaggagaggaacgaaaggtacgttgatgctgtcatgacaatccccaagggaaccttgttccccatgtgcggcatgaaccttgccttcgacagggatctcattggccctgccatgtacttcggtctcatgggtgatggccagcccattggtcgctacgacgacatgtgggccggatggtgtgtgaaggtcatctgcgaccacttgagcctgggagtcaagactggcttgccatacatctggcacagcaaggctagcaaccccttcgttaacttgaagaaggaatacaagggcatcttctggcaggaggacatcatccccttcttccagaacgtgaccattcccaaggattgcgacaccgtccagaagtgctacatctacctctctggacaggtgaaggagaagcttggcaagatcgacccctactttgccaagctcggtgacgccatggtcacctggatcgaggcctgggatgagctgaacccggctggccccgcggctgggaaagacaaggccaagtagatgggagtccctgggggtgcattcacttccctgctgaagtgaaaagaaagtatgattgggtccagcctaggctcccccatagatatagctctttttgagagggaagagggattaattcagcagcaggttctttttataaattctttgttgttatgaagcaggcggtacttttgtagttgatgaaggggatttgtcgccactgtcatttacataattcggataataatttatattgtgtaatcttgagaatcaaagcactgtttgtgttatagcatgtctatgaatgcgcactgttgctttttccccc

SEQ ID NO: 48274 - DNA, 2511 bp, Zea Mays
caaaaaatcaccagaaataaaataaataaaaatcccacagaagaaaaaaaacaccccgaaaattctccctcgctctctctcagtctctctctccgtgagggaggaagttgggcttcgttctcgagtactcttcgttctcaggcggcccccggctgcttctgctggtcgccgcccagctccagttattagagaaataagggccagcctggttgcccgaggctgacccagcacctgcgatggaggagaaggctgtcacaaatggagcggcagctgctgatgttgctgctcctgataataaggataacaccaaggaagaggttagcaagagcaaggagccagtagcgaataaggatgctgaagagcagaacaaaggctcggaaaatggtgctgagggccattcaggtggagatgtcaatatggcagaggctgagatcactgaggaaggtggtggtggtgatgctggtgcggcaaagcaggtggattctggagatgtcaaaacggatgccgatacaaaggaagatgccaatgcgagaacagaagaaggtgaagatgccaagatgactgaggctgacgtaggaagtacagaggtcaaagataaagaagagaaggaagatgaagttgagaacacaaatgagcaggatgaatcgaaggagcaagagaaaggtgcttcggctgagcaagaggaaaacgaaggaaaagaaacggatgctgatgagaaccaagaagaagaggaagcagaagaaaagggttctgctgataagaaagatgaagctgaagctgaaggtgacaagaagacggaagagaataaggagactccgaagaacaagaaagcaaggagtgccagggatagaagccagggaaaagataaggagcaggatggatccaaatccaaggaagccaaaagtttgctgaacactccaagcccatatggtaccaatcgccctcaacgtgagaggaaaatagtggagaggttggttgaggtgattgataaagagccaaacaagaatttcgtggttgagaagggacaggggactcctctgaaggatataccaagtgtggcacacagaatatcaaggaagaagccttctgatcttaaatttcttcacagtattctttttgggaggaaaggcaaggctgtcgattttaaaggacatatactccaattctctggatttgtttggcatgagagtgatcagagagccaaggcaaaagagaagcttgataagtgtgtaaaagacactctgctggacctctgttggacccttggtattccaactccgaaagcaaacattagaaaggaagatattgtgtcaaagctgttggacttcattgctgaacctcactctgcagctgaatcttggggctctgatgatcagggatcaaattctaaaaaacgcaagagaggaggtgaaagtgcaagtaagacgcctgatggcacacctagtaggtcgaggaagaaatttgtcgatgacggtacttctagtaaaaggcagaataaagcgctccagtatgatactgaggaggatgaatccatgaagtctgacagtgaggaaaacatagatgaagattcagatgaagctgctgacaaacaggaagttgactatggatctgggaaagaaaaggcagggaagaagttatcggaggtaaaagaatcttcaggtaaaaagaagtcaaacacagggagtggccacaaatcaggtcctccaaataaaattataaaaaatctggtaaaaaaagtatcatccaagattcacgaggaaaaagaaagccccaatggtagtgccaaggttttttcgagaaagaagaaacccacagcagaaaaggagatcaaagagaaaaagtcgtcaggaaaaaaggtgacaaaaggtaaaggagaatcagctgaagcagttcttcccagcaaggacgatctgaggaagaccattactgaaatcctcaagaaagttgacttcaacacggcaactttcagtgacattctgaagaagctcgacaatcactacaaaatggatctgaccccaaagaaagaagccatcaaagttatgatccaagacgagttgaccaagctatcagaggaggatgaagaaggagagggagacgaagacgccgggaagaaacagcagcagcctcaggcgcaggagatcgaggcatgagggatccgcggaaccccgtagctgtagtagccactgttaattatcctgtacttagtgcgtatgtgtcgcatgtacaggcatcctttgttgatttcagccaccaacttgagaacctcaccccctgattgtgtatgctaaaagacatgatgtgtaggcagcctccacaccttttagctgactgatcggagagttactcttaggcaacaacttgtgtttctagatttgcaaatggtgtctgaaagactgaaactctgcattcgctgtggcagggcgtgtacttaattgttcgtgataggtctgaataacacatggatggaccctagttgttcgtgttgccttgagcttttactcgatccgtttc

SEQ ID NO: 48275 - DNA, 2543 bp, Zea Mays
caaaaaatcaccagaaataaaataaataaaaatcccacagaagaaaaaaaacaccccgaaaattctccctcgctctctctcagtctctctctccgtgagggaggaagttgggcttcgttctcgagtactcttcgttctcaggcggcccccggctgcttctgctggtcgccgcccagctccaggtttcctcactagggttaccattttaacacagttattagagaaataagggccagcctggttgcccgaggctgacccagcacctgcgatggaggagaaggctgtcacaaatggagcggcagctgctgatgttgctgctcctgataataaggataacaccaaggaagaggttagcaagagcaaggagccagtagcgaataaggatgctgaagagcagaacaaaggctcggaaaatggtgctgagggccattcaggtggagatgtcaatatggcagaggctgagatcactgaggaaggtggtggtggtgatgctggtgcggcaaagcaggtggattctggagatgtcaaaacggatgccgatacaaaggaagatgccaatgcgagaacagaagaaggtgaagatgccaagatgactgaggctgacgtaggaagtacagaggtcaaagataaagaagagaaggaagatgaagttgagaacacaaatgagcaggatgaatcgaaggagcaagagaaaggtgcttcggctgagcaagaggaaaacgaaggaaaagaaacggatgctgatgagaaccaagaagaagaggaagcagaagaaaagggttctgctgataagaaagatgaagctgaagctgaaggtgacaagaagacggaagagaataaggagactccgaagaacaagaaagcaaggagtgccagggatagaagccagggaaaagataaggagcaggatggatccaaatccaaggaagccaaaagtttgctgaacactccaagcccatatggtaccaatcgccctcaacgtgagaggaaaatagtggagaggttggttgaggtgattgataaagagccaaacaagaatttcgtggttgagaaggggactcctctgaaggatataccaagtgtggcacacagaatatcaaggaagaagccttctgatcttaaatttcttcacagtattctttttgggaggaaaggcaaggctgtcgattttaaaggacatatactccaattctctggatttgtttggcatgagagtgatgaaaagcagagagccaaggcaaaagagaagcttgataagtgtgtaaaagacactctgctggacctctgttggacccttggtattccaactccgaaagcaaacattagaaaggaagatattgtgtcaaagctgttggacttcattgctgaacctcactctgcagctgaatcttggggctctgatgatcagggatcaaattctaaaaaacgcaagagaggaggtgaaagtgcaagtaagacgcctgatggcacacctagtaggtcgaggaagaaatttgtcgatgacggtacttctagtaaaaggcagaataaagcgctccagtatgatactgaggaggatgaatccatgaagtctgacagtgaggaaaacatagatgaagattcagatgaagctgctgacaaacaggaagttgactatggatctgggaaagaaaaggcagggaagaagttatcggaggtaaaagaatcttcaggtaaaaagaagtcaaacacagggagtggccacaaatcaggtcctccaaataaaattataaaaaatctggtaaaaaaagtatcatccaagattcacgaggaaaaagaaagccccaatggtagtgccaaggttttttcgagaaagaagaaacccacagcagaaaaggagatcaaagagaaaaagtcgtcaggaaaaaaggtgacaaaaggtaaaggagaatcagctgaagcagttcttcccagcaaggacgatctgaggaagaccattactgaaatcctcaagaaagttgacttcaacacggcaactttcagtgacattctgaagaagctcgacaatcactacaaaatggatctgaccccaaagaaagaagccatcaaagttatgatccaagacgagttgaccaagctatcagaggaggatgaagaaggagagggagacgaagacgccgggaagaaacagcagcagcctcaggcgcaggagatcgaggcatgagggatccgcggaaccccgtagctgtagtagccactgttaattatcctgtacttagtgcgtatgtgtcgcatgtacaggcatcctttgttgatttcagccaccaacttgagaacctcaccccctgattgtgtatgctaaaagacatgatgtgtaggcagcctccacaccttttagctgactgatcggagagttactcttaggcaacaacttgtgtttctagatttgcaaatggtgtctgaaagactgaaactctgcattcgctgtggcagggcgtgtacttaattgttcgtgataggtctgaataacacatggatggaccctagttgttcgtgttgccttgagcttttactcgatccgtttc

SEQ ID NO: 48276 - DNA, 2406 bp, Zea Mays
cagaggaagctcagtttggggtttctagggttttgggacgagcacagggaaggcgtcgctcttctgctcggttattagagaaataagggccagcctggttgcccgaggctgacccagcacctgcgatggaggagaaggctgtcacaaatggagcggcagctgctgatgttgctgctcctgataataaggataacaccaaggaagaggttagcaagagcaaggagccagtagcgaataaggatgctgaagagcagaacaaaggctcggaaaatggtgctgagggccattcaggtggagatgtcaatatggcagaggctgagatcactgaggaaggtggtggtggtgatgctggtgcggcaaagcaggtggattctggagatgtcaaaacggatgccgatacaaaggaagatgccaatgcgagaacagaagaaggtgaagatgccaagatgactgaggctgacgtaggaagtacagaggtcaaagataaagaagagaaggaagatgaagttgagaacacaaatgagcaggatgaatcgaaggagcaagagaaaggtgcttcggctgagcaagaggaaaacgaaggaaaagaaacggatgctgatgagaaccaagaagaagaggaagcagaagaaaagggttctgctgataagaaagatgaagctgaagctgaaggtgacaagaagacggaagagaataaggagactccgaagaacaagaaagcaaggagtgccagggatagaagccagggaaaagataaggagcaggatggatccaaatccaaggaagccaaaagtttgctgaacactccaagcccatatggtaccaatcgccctcaacgtgagaggaaaatagtggagaggttggttgaggtgattgataaagagccaaacaagaatttcgtggttgagaagggacaggggactcctctgaaggatataccaagtgtggcacacagaatatcaaggaagaagccttctgatcttaaatttcttcacagtattctttttgggaggaaaggcaaggctgtcgattttaaaggacatatactccaattctctggatttgtttggcatgagagtgatgaaaagcagagagccaaggcaaaagagaagcttgataagtgtgtaaaagacactctgctggacctctgttggacccttggtattccaactccgaaagcaaacattagaaaggaagatattgtgtcaaagctgttggacttcattgctgaacctcactctgcagctgaatcttggggctctgatgatcagggatcaaattctaaaaaacgcaagagaggaggtgaaagtgcaagtaagacgcctgatggcacacctagtaggtcgaggaagaaatttgtcgatgacggtacttctagtaaaaggcagaataaagcgctccagtatgatactgaggaggatgaatccatgaagtctgacagtgaggaaaacatagatgaagattcagatgaagctgctgacaaacaggaagttgactatggatctgggaaagaaaaggcagggaagaagttatcggaggtaaaagaatcttcaggtaaaaagaagtcaaacacagggagtggccacaaatcaggtcctccaaataaaattataaaaaatctggtaaaaaaagtatcatccaagattcacgaggaaaaagaaagccccaatggtagtgccaaggttttttcgagaaagaagaaacccacagcagaaaaggagatcaaagagaaaaagtcgtcaggaaaaaaggtgacaaaaggtaaaggagaatcagctgaagcagttcttcccagcaaggacgatctgaggaagaccattactgaaatcctcaagaaagttgacttcaacacggcaactttcagtgacattctgaagaagctcgacaatcactacaaaatggatctgaccccaaagaaagaagccatcaaagttatgatccaagacgagttgaccaagctatcagaggaggatgaagaaggagagggagacgaagacgccgggaagaaacagcagcagcctcaggcgcaggagatcgaggcatgagggatccgcggaaccccgtagctgtagtagccactgttaattatcctgtacttagtgcgtatgtgtcgcatgtacaggcatcctttgttgatttcagccaccaacttgagaacctcaccccctgattgtgtatgctaaaagacatgatgtgtaggcagcctccacaccttttagctgactgatcggagagttactcttaggcaacaacttgtgtttctagatttgcaaatggtgtctgaaagactgaaactctgcattcgctgtggcagggcgtgtacttaattgttcgtgataggtctgaataacacatggatggaccctagttgttcgtgttgccttgagcttttactcgatccgtttc

SEQ ID NO: 48277 - DNA, 1418 bp, Zea Mays
attgcgtgtcaggattgtatatagagtagcaagagctgtcgattttaaaggacatatactccaattctctggatttgtttggcatgagagtgatgaaaagcagagagccaaggcaaaagagaagcttgataagtgtgtaaaagacactctgctggacctctgttggacccttggtattccaactccgaaagcaaacattagaaaggaagatattgtgtcaaagctgttggacttcattgctgaacctcactctgcagctgaatcttggggctctgatgatcagggatcaaattctaaaaaacgcaagagaggaggtgaaagtgcaagtaagacgcctgatggcacacctagtaggtcgaggaagaaatttgtcgatgacggtacttctagtaaaaggcagaataaagcgctccagtatgatactgaggaggatgaatccatgaagtctgacagtgaggaaaacatagatgaagattcagatgaagctgctgacaaacaggaagttgactatggatctgggaaagaaaaggcagggaagaagttatcggaggtaaaagaatcttcaggtaaaaagaagtcaaacacagggagtggccacaaatcaggtcctccaaataaaattataaaaaatctggtaaaaaaagtatcatccaagattcacgaggaaaaagaaagccccaatggtagtgccaaggttttttcgagaaagaagaaacccacagcagaaaaggagatcaaagagaaaaagtcgtcaggaaaaaaggtgacaaaaggtaaaggagaatcagctgaagcagttcttcccagcaaggacgatctgaggaagaccattactgaaatcctcaagaaagttgacttcaacacggcaactttcagtgacattctgaagaagctcgacaatcactacaaaatggatctgaccccaaagaaagaagccatcaaagttatgatccaagacgagttgaccaagctatcagaggaggatgaagaaggagagggagacgaagacgccgggaagaaacagcagcagcctcaggcgcaggagatcgaggcatgagggatccgcggaaccccgtagctgtagtagccactgttaattatcctgtacttagtgcgtatgtgtcgcatgtacaggcatcctttgttgatttcagccaccaacttgagaacctcaccccctgattgtgtatgctaaaagacatgatgtgtaggcagcctccacaccttttagctgactgatcggagagttactcttaggcaacaacttgtgtttctagatttgcaaatggtgtctgaaagactgaaactctgcattcgctgtggcagggcgtgtacttaattgttcgtgataggtctgaataacacatggatggaccctagttgttcgtgttgccttgagcttttactcgatccgtttc

SEQ ID NO: 48278 - DNA, 2963 bp, Zea Mays
cctcccagtcaccgcaggttgaccaccgaacagcgcggttggattacgcggtcccaagacccaagctttctgtctggctttctgtctggggtcggcccgcttcgctccatgggctcatttgagcagcggagccctttttaggtctatccagtatcgacgcccttctaaaaaacctaactccctctctccttgaattcactgcggccgaagtcgctgccctgccgactcccgaccgactctccacctcagccctcagggccgccggctccttcctccggtcctcccctctcctccgcctcgacaagcgtcggcgagatggtgaagaggagcaagaagagcaagagcaagcgagtcacgctgcggcagaagcacaaggtgcagcgcaaggtgaaggagcaccaccgcaagaagcgcaaggaggccaagaaggcgggcaaggccggccagcggaggaaggtcgagaaggaccccgggatccccaacgagtggcccttcaaggagcaggagctcaaggcgctcgaggcccgacgcgcgcaggcgctccaggagctcgagctcaagaagcaggcgcgcaaggagaggaagaggaaggcaggattgcttgaggacgaggacattgctagtttggcatctgcagcttccgcacagggcagtgagtttgcagcaaaggagaatgctcctttattagtggcaaagatcaacgatcattcagagaggtctttctacaaggagcttgttaaagtaattgaagcttccgatgtgattgtggaggttcttgatgcaagggatccgctgggcacccgttgcattgacatggaaaagatggttaggaaggctgatccaagtaaacggattgtactacttctcaacaagatagatcttgttcccaaggaggcggcagagaaatggcttacatatctaagagaagaattgccaacagttgcttttaagtgcaatacccaggagcagaggaccaagctgggatggaaatcttcaaaattagataaaacaagcaacatcccacaaagcagtgattgtcttggtgccgagaatctaatcaaattgcttaagaattattccagaagccatgagctgaaactggcaattacggtgggtattgttggacttcctaatgttggcaagagcagtctgatcaacagcctgaagaggtcccgagtggtcaatgtcggttctactccagggattactagatcaatgcaagaagttcaattagacaagaaggtaaagttgttggattgtcctggtgttgttatgctcaaatcttccaacagtggtgtgtctgtagcccttcgaaactgcaaaaaggttgagaaaatagaagatccagtcgctcctgttaaggagatcctaagtatttgcccacatgagaagttgctgtctctatacaaggttccaaactttggttcagttgatgatttccttcagaaagtagcaactgtacgtgggaaattgaaaaagggtggtgtagtggatgttgaagctgcagcgagaattgtgcttcatgactggaatgaaggtaaaataccatattttacactgccgcctaaaagagatgctggggaggactcagatgcagtgattatatccgaggatgggaaagaatttaatatcgatgatatttacaaagctgaatcttcatatattggtggtttgaagtccattgaggagttccatcatattgagattcctcctaatgctccaccggcgatcgatgaagagatgctagaggatggtggcaagaaaccaagcgaagccatccaggaaagccgggacagggaggagcaaatgcccgacgtgaaggactcaggaggaagcaaggcagccagcgccagcacgcagaacgacaagttgtacaccgccgagggcgtactcgaccctcgcaagagcaaagcagagaagaaacggcgcaaggcgagcaggcccagcgcgctgaacgacatggacgcggactacgatttcaaggtggattatcggatggaggacggtgggagcgagggtgcacacgcggatgatgaagatggcggagatggatccgaggataatgaaccaatgaccggtgtcgatgatgcatgaattgtcatgtcgagtgccactttgccagaaatgatttgtcccaatgggggttgggaaattaacccacgacagttttgtgcttagtttgtttcttcaatgaaagatgacagttgcgttttacctgtcacagtacctacttttcgttgcaatcttcagaacaacctgatggaagagtacagaccacacaactaagtcttcggttattcacgtagactttgttcatttattactataccatatacattaaaaaatgagactaaataaaccacctcgacatggaaaaattacaactctggtgcgttcagtggtgcacgcaaatttttaatcggaacttccattgagaaccgaataatgcaggtgtctcgtgatgcttttgttctcagggattaatgtttaccgttcgggctagtttggaaactcaaatccccttcgagattagagaggaaattagttcatttccacatcaatcccatccaattctaaaaggatccttcaggtatttcgaaatgccattatgtaattgattgaaaagtactacaattcttgttaccgtgcgtacatttcagattgcaagcaccaagcattccaccacttggctgaacaacaaatcaatgcaaagtgatcaatcaccatgtcgcgaaaaggaaccatcagacagcataacaaacgaacacaaaaccagttaaccgataccggtctgtttcatataacttgtacgcttcaccacagtttcactcagcaaatggacgcggaacgccagaactctctacgctatctgcgtctgggatagcaagtaggatgaaggccaaagggattaaatggcaggcccatatactgcggtgacatgaactgtggtacgaatggacttc

SEQ ID NO: 48279 - DNA, 2960 bp, Zea Mays
cctcccagtcaccgcaggttgaccaccgaacagcgcggttggattacgcggtcccaagacccaagctttctgtctggctttctgtctggggtcggcccgcttcgctccatgggctcatttgagcagcggagccctttttaggtctatccagtatcgacgcccttctaaaaaacctaactccctctctccttgaattcactgcggccgaagtcgctgccctgccgactcccgaccgactctccacctcagccctcagggccgccggctccttcctccggtcctcccctctcctccgcctcgacaagcgtcggcgagatggtgaagaggagcaagaagagcaagagcaagcgagtcacgctgcggcagaagcacaaggtgcagcgcaaggtgaaggagcaccaccgcaagaagcgcaaggaggccaagaaggcgggcaaggccggccagcggaggaaggtcgagaaggaccccgggatccccaacgagtggcccttcaaggagcaggagctcaaggcgctcgaggcccgacgcgcgcaggcgctccaggagctcgagctcaagaagcaggcgcgcaaggagagggctcagaagaggaaggcaggattgcttgaggacgaggacattgctagtttggcatctgcagcttccgcacagggcagtgagtttgcagcaaaggagaatgctcctttattagtggcaaagatcaacgagaggtctttctacaaggagcttgttaaagtaattgaagcttccgatgtgattgtggaggttcttgatgcaagggatccgctgggcacccgttgcattgacatggaaaagatggttaggaaggctgatccaagtaaacggattgtactacttctcaacaagatagatcttgttcccaaggaggcggcagagaaatggcttacatatctaagagaagaattgccaacagttgcttttaagtgcaatacccaggagcagaggaccaagctgggatggaaatcttcaaaattagataaaacaagcaacatcccacaaagcagtgattgtcttggtgccgagaatctaatcaaattgcttaagaattattccagaagccatgagctgaaactggcaattacggtgggtattgttggacttcctaatgttggcaagagcagtctgatcaacagcctgaagaggtcccgagtggtcaatgtcggttctactccagggattactagatcaatgcaagaagttcaattagacaagaaggtaaagttgttggattgtcctggtgttgttatgctcaaatcttccaacagtggtgtgtctgtagcccttcgaaactgcaaaaaggttgagaaaatagaagatccagtcgctcctgttaaggagatcctaagtatttgcccacatgagaagttgctgtctctatacaaggttccaaactttggttcagttgatgatttccttcagaaagtagcaactgtacgtgggaaattgaaaaagggtggtgtagtggatgttgaagctgcagcgagaattgtgcttcatgactggaatgaaggtaaaataccatattttacactgccgcctaaaagagatgctggggaggactcagatgcagtgattatatccgaggatgggaaagaatttaatatcgatgatatttacaaagctgaatcttcatatattggtggtttgaagtccattgaggagttccatcatattgagattcctcctaatgctccaccggcgatcgatgaagagatgctagaggatggtggcaagaaaccaagcgaagccatccaggaaagccgggacagggaggagcaaatgcccgacgtgaaggactcaggaggaagcaaggcagccagcgccagcacgcagaacgacaagttgtacaccgccgagggcgtactcgaccctcgcaagagcaaagcagagaagaaacggcgcaaggcgagcaggcccagcgcgctgaacgacatggacgcggactacgatttcaaggtggattatcggatggaggacggtgggagcgagggtgcacacgcggatgatgaagatggcggagatggatccgaggataatgaaccaatgaccggtgtcgatgatgcatgaattgtcatgtcgagtgccactttgccagaaatgatttgtcccaatgggggttgggaaattaacccacgacagttttgtgcttagtttgtttcttcaatgaaagatgacagttgcgttttacctgtcacagtacctacttttcgttgcaatcttcagaacaacctgatggaagagtacagaccacacaactaagtcttcggttattcacgtagactttgttcatttattactataccatatacattaaaaaatgagactaaataaaccacctcgacatggaaaaattacaactctggtgcgttcagtggtgcacgcaaatttttaatcggaacttccattgagaaccgaataatgcaggtgtctcgtgatgcttttgttctcagggattaatgtttaccgttcgggctagtttggaaactcaaatccccttcgagattagagaggaaattagttcatttccacatcaatcccatccaattctaaaaggatccttcaggtatttcgaaatgccattatgtaattgattgaaaagtactacaattcttgttaccgtgcgtacatttcagattgcaagcaccaagcattccaccacttggctgaacaacaaatcaatgcaaagtgatcaatcaccatgtcgcgaaaaggaaccatcagacagcataacaaacgaacacaaaaccagttaaccgataccggtctgtttcatataacttgtacgcttcaccacagtttcactcagcaaatggacgcggaacgccagaactctctacgctatctgcgtctgggatagcaagtaggatgaaggccaaagggattaaatggcaggcccatatactgcggtgacatgaactgtggtacgaatggacttc

SEQ ID NO: 48280 - DNA, 2897 bp, Zea Mays
cctcccagtcaccgcaggttgaccaccgaacagcgcggttggattacgcggtcccaagacccaagctttctgtctggctttctgtctggggtcggcccgcttcgctccatgggctcatttgagcagcggagccctttttaggtctatccagtatcgacgcccttctaaaaaacctaactccctctctccttgaattcactgcggccgaagtcgctgccctgccgactcccgaccgactctccacctcagccctcagggccgccggctccttcctccggtcctcccctctcctccgcctcgacaagcgtcggcgagatggtgaagaggagcaagaagagcaagagcaagcgagtcacgctgcggcagaagcacaaggtgcagcgcaaggtgaaggagcaccaccgcaagaagcgcaaggaggccaagaaggcgggcaaggccggccagcggaggaaggtcgagaaggaccccgggatccccaacgagtggcccttcaaggagcaggagctcaaggcgctcgaggcccgacgcgcgcaggcgctccaggagctcgagctcaagaagcaggcgcgcaaggagagggctcagaagaggaaggcaggattgcttgaggacgaggacattgctagtttggcatctgcagcttccgcacagggcagtgagtttgcagcaaaggagaatgctcctttattagtggcaaagatcaacgatcattcagagaggtctttctacaaggagcttgttaaagtaattgaagcttccgatgtgattgtggaggttcttgatgcaagggatccgctgggcacccgttgcattgacatggaaaagatggttaggaaggctgatccaagtaaacggattgtactacttctcaacaagatagatcttgttcccaaggaggcggcagagaaatggcttacatatctaagagaagaattgccaacagttgcttttaagtgcaatacccaggagcagaggaccaagctgggatggaaatcttcaaaattagataaaacaagcaacatcccacaaagcagtgattgtcttggtgccgagaatctaatcaaattgcttaagaattattccagaagccatgagctgaaactggcaattacggtgggtattgttggacttcctaatgttggcaagagcagtctgatcaacagcctgaagaggtcccgagtggtcaatgtcggttctactccagggattactagatcaatgcaagaagttcaattagacaagaaggtaaagttgttggattgtcctggtgttgttatgctcaaatcttccaacagtggtgtgtctgtagcccttcgaaactgcaaaaaggttgagaaaatagaagatccagtcgctcctgttgatgatttccttcagaaagtagcaactgtacgtgggaaattgaaaaagggtggtgtagtggatgttgaagctgcagcgagaattgtgcttcatgactggaatgaaggtaaaataccatattttacactgccgcctaaaagagatgctggggaggactcagatgcagtgattatatccgaggatgggaaagaatttaatatcgatgatatttacaaagctgaatcttcatatattggtggtttgaagtccattgaggagttccatcatattgagattcctcctaatgctccaccggcgatcgatgaagagatgctagaggatggtggcaagaaaccaagcgaagccatccaggaaagccgggacagggaggagcaaatgcccgacgtgaaggactcaggaggaagcaaggcagccagcgccagcacgcagaacgacaagttgtacaccgccgagggcgtactcgaccctcgcaagagcaaagcagagaagaaacggcgcaaggcgagcaggcccagcgcgctgaacgacatggacgcggactacgatttcaaggtggattatcggatggaggacggtgggagcgagggtgcacacgcggatgatgaagatggcggagatggatccgaggataatgaaccaatgaccggtgtcgatgatgcatgaattgtcatgtcgagtgccactttgccagaaatgatttgtcccaatgggggttgggaaattaacccacgacagttttgtgcttagtttgtttcttcaatgaaagatgacagttgcgttttacctgtcacagtacctacttttcgttgcaatcttcagaacaacctgatggaagagtacagaccacacaactaagtcttcggttattcacgtagactttgttcatttattactataccatatacattaaaaaatgagactaaataaaccacctcgacatggaaaaattacaactctggtgcgttcagtggtgcacgcaaatttttaatcggaacttccattgagaaccgaataatgcaggtgtctcgtgatgcttttgttctcagggattaatgtttaccgttcgggctagtttggaaactcaaatccccttcgagattagagaggaaattagttcatttccacatcaatcccatccaattctaaaaggatccttcaggtatttcgaaatgccattatgtaattgattgaaaagtactacaattcttgttaccgtgcgtacatttcagattgcaagcaccaagcattccaccacttggctgaacaacaaatcaatgcaaagtgatcaatcaccatgtcgcgaaaaggaaccatcagacagcataacaaacgaacacaaaaccagttaaccgataccggtctgtttcatataacttgtacgcttcaccacagtttcactcagcaaatggacgcggaacgccagaactctctacgctatctgcgtctgggatagcaagtaggatgaaggccaaagggattaaatggcaggcccatatactgcggtgacatgaactgtggtacgaatggacttc

SEQ ID NO: 48281 - DNA, 2854 bp, Zea Mays
cctcccagtcaccgcaggttgaccaccgaacagcgcggttggattacgcggtcccaagacccaagctttctgtctggctttctgtctggggtcggcccgcttcgctccatgggctcatttgagcagcggagccctttttaggtctatccagtatcgacgcccttctaaaaaacctaactccctctctccttgaattcactgcggccgaagtcgctgccctgccgactcccgaccgactctccacctcagccctcagggccgccggctccttcctccggtcctcccctctcctccgcctcgacaagcgtcggcgagatggtgaagaggagcaagaagagcaagagcaagcgagtcacgctgcggcagaagcacaaggtgcagcgcaaggtgaaggagcaccaccgcaagaagcgcaaggaggccaagaaggcgggcaaggccggccagcggaggaaggtcgagaaggaccccgggatccccaacgagtggcccttcaaggagcaggagctcaaggcgctcgaggcccgacgcgcgcaggcgctccaggagctcgagctcaagaagcaggcgcgcaaggagagggctcagaagaggaaggcaggattgcttgaggacgaggacattgctagtttggcatctgcagcttccgcacagggcagtgagtttgcagcaaaggagaatgctcctttattagtggcaaagatcaacgatcattcagagaggtctttctacaaggagcttgttaaagtaattgaagcttccgatgtgattgtggaggttcttgatgcaagggatccgctgggcacccgttgcattgacatggaaaagatggttaggaaggctgatccaagtaaacggattgtactacttctcaacaagatagatcttgttcccaaggaggcggcagagaaatggcttacatatctaagagaagaattgccaacagttgcttttaagtgcaatacccaggagcagaggaccaagctgggatggaaatcttcaaaattagataaaacaagcaacatcccacaaagcagtgattgtcttggtgccgagaatctaatcaaattgcttaagaattattccagaagccatgagctgaaactggcaattacggtgggtattgttggacttcctaatgttggcaagagcagtctgatcaacagcctgaagaggtcccgagtggtcaatgtcggttctactccagggattactagatcaatgcaagaagttcaattagacaagaagttaaggagatcctaagtatttgcccacatgagaagttgctgtctctatacaaggttccaaactttggttcagttgatgatttccttcagaaagtagcaactgtacgtgggaaattgaaaaagggtggtgtagtggatgttgaagctgcagcgagaattgtgcttcatgactggaatgaaggtaaaataccatattttacactgccgcctaaaagagatgctggggaggactcagatgcagtgattatatccgaggatgggaaagaatttaatatcgatgatatttacaaagctgaatcttcatatattggtggtttgaagtccattgaggagttccatcatattgagattcctcctaatgctccaccggcgatcgatgaagagatgctagaggatggtggcaagaaaccaagcgaagccatccaggaaagccgggacagggaggagcaaatgcccgacgtgaaggactcaggaggaagcaaggcagccagcgccagcacgcagaacgacaagttgtacaccgccgagggcgtactcgaccctcgcaagagcaaagcagagaagaaacggcgcaaggcgagcaggcccagcgcgctgaacgacatggacgcggactacgatttcaaggtggattatcggatggaggacggtgggagcgagggtgcacacgcggatgatgaagatggcggagatggatccgaggataatgaaccaatgaccggtgtcgatgatgcatgaattgtcatgtcgagtgccactttgccagaaatgatttgtcccaatgggggttgggaaattaacccacgacagttttgtgcttagtttgtttcttcaatgaaagatgacagttgcgttttacctgtcacagtacctacttttcgttgcaatcttcagaacaacctgatggaagagtacagaccacacaactaagtcttcggttattcacgtagactttgttcatttattactataccatatacattaaaaaatgagactaaataaaccacctcgacatggaaaaattacaactctggtgcgttcagtggtgcacgcaaatttttaatcggaacttccattgagaaccgaataatgcaggtgtctcgtgatgcttttgttctcagggattaatgtttaccgttcgggctagtttggaaactcaaatccccttcgagattagagaggaaattagttcatttccacatcaatcccatccaattctaaaaggatccttcaggtatttcgaaatgccattatgtaattgattgaaaagtactacaattcttgttaccgtgcgtacatttcagattgcaagcaccaagcattccaccacttggctgaacaacaaatcaatgcaaagtgatcaatcaccatgtcgcgaaaaggaaccatcagacagcataacaaacgaacacaaaaccagttaaccgataccggtctgtttcatataacttgtacgcttcaccacagtttcactcagcaaatggacgcggaacgccagaactctctacgctatctgcgtctgggatagcaagtaggatgaaggccaaagggattaaatggcaggcccatatactgcggtgacatgaactgtggtacgaatggacttc

SEQ ID NO: 48282 - DNA, 2935 bp, Zea Mays
cctcccagtcaccgcaggttgaccaccgaacagcgcggttggattacgcggtcccaagacccaagctttctgtctggctttctgtctggggtcggcccgcttcgctccatgggctcatttgagcagcggagccctttttaggtctatccagtatcgacgcccttctaaaaaacctaactccctctctccttgaattcactgcggccgaagtcgctgccctgccgactcccgaccgactctccacctcagccctcagggccgccggctccttcctccggtcctcccctctcctccgcctcgacaagcgtcggcgagatggtgaagaggagcaagaagagcaagagcaagcgagtcacgctgcggcagaagcacaaggtgcagcgcaaggtgaaggagcaccaccgcaagaagcgcaaggaggccaagaaggcgggcaaggccggccagcggaggaaggtcgagaaggaccccgggatccccaacgagtggcccttcaaggagcaggagctcaaggcgctcgaggcccgacgcgcgcaggcgctccaggagctcgagctcaagaagcaggcgcgcaaggagagggctcagaagaggaaggcaggattgcttgaggacgaggacattgctagtttggcatctgcagcttccgcacagggcagtgagtttgcagcaaaggagaatgctcctttattagtggcaaagatcaacgatcattcagagaggtctttctacaaggagcttgttaaagtaattgaagcttccgatgtgattgtggaggttcttgatgcaagggatccgctgggcacccgttgcattgacatggaaaagatggttaggaaggctgatccaagtaaacggattgtactacttctcaacaagatagatcttgttcccaaggaggcggcagagaaatggcttacatatctaagagaagaattgccaacagttgcttttaagtgcaatacccaggagcagaggaccaagctgggatggaaatcttcaaaattagataaaacaagcaacatcccacaaagcagtgattgtcttggtgccgagaatctaatcaaattgcttaagaattattccagaagccatgagctgaaactggcaattacggtgggtattgttggacttcctaatgttggcaagagcagtctgatcaacagcctgaagaggtcccgagtggtcaatgtcggttctactccagggattactagatcaatgcaagaagttcaattagacaagaaggtaaagttgttggattgtcctggtgttgttatgctcaaatcttccaacagtggtgtgtctgtagcccttcgaaactgcaaaaaggttgagaaaatagaagatccagtcgctcctgttaaggagatcctaagtatttgcccacatgagaagttgctgtctctatacaaggttccaaactttggttcagttgatgatttccttcagaaagtagcaactgtacgtgggaaattgaaaaagggtggtgtagtggatgttgaagctgcagcgagaattgtgcttcatgactggaatgaagagatgctggggaggactcagatgcagtgattatatccgaggatgggaaagaatttaatatcgatgatatttacaaagctgaatcttcatatattggtggtttgaagtccattgaggagttccatcatattgagattcctcctaatgctccaccggcgatcgatgaagagatgctagaggatggtggcaagaaaccaagcgaagccatccaggaaagccgggacagggaggagcaaatgcccgacgtgaaggactcaggaggaagcaaggcagccagcgccagcacgcagaacgacaagttgtacaccgccgagggcgtactcgaccctcgcaagagcaaagcagagaagaaacggcgcaaggcgagcaggcccagcgcgctgaacgacatggacgcggactacgatttcaaggtggattatcggatggaggacggtgggagcgagggtgcacacgcggatgatgaagatggcggagatggatccgaggataatgaaccaatgaccggtgtcgatgatgcatgaattgtcatgtcgagtgccactttgccagaaatgatttgtcccaatgggggttgggaaattaacccacgacagttttgtgcttagtttgtttcttcaatgaaagatgacagttgcgttttacctgtcacagtacctacttttcgttgcaatcttcagaacaacctgatggaagagtacagaccacacaactaagtcttcggttattcacgtagactttgttcatttattactataccatatacattaaaaaatgagactaaataaaccacctcgacatggaaaaattacaactctggtgcgttcagtggtgcacgcaaatttttaatcggaacttccattgagaaccgaataatgcaggtgtctcgtgatgcttttgttctcagggattaatgtttaccgttcgggctagtttggaaactcaaatccccttcgagattagagaggaaattagttcatttccacatcaatcccatccaattctaaaaggatccttcaggtatttcgaaatgccattatgtaattgattgaaaagtactacaattcttgttaccgtgcgtacatttcagattgcaagcaccaagcattccaccacttggctgaacaacaaatcaatgcaaagtgatcaatcaccatgtcgcgaaaaggaaccatcagacagcataacaaacgaacacaaaaccagttaaccgataccggtctgtttcatataacttgtacgcttcaccacagtttcactcagcaaatggacgcggaacgccagaactctctacgctatctgcgtctgggatagcaagtaggatgaaggccaaagggattaaatggcaggcccatatactgcggtgacatgaactgtggtacgaatggacttc

SEQ ID NO: 48283 - DNA, 2916 bp, Zea Mays
cctcccagtcaccgcaggttgaccaccgaacagcgcggttggattacgcggtcccaagacccaagctttctgtctggctttctgtctggggtcggcccgcttcgctccatgggctcatttgagcagcggagccctttttaggtctatccagtatcgacgcccttctaaaaaacctaactccctctctccttgaattcactgcggccgaagtcgctgccctgccgactcccgaccgactctccacctcagccctcagggccgccggctccttcctccggtcctcccctctcctccgcctcgacaagcgtcggcgagatggtgaagaggagcaagaagagcaagagcaagcgagtcacgctgcggcagaagcacaaggtgcagcgcaaggtgaaggagcaccaccgcaagaagcgcaaggaggccaagaaggcgggcaaggccggccagcggaggaaggtcgagaaggaccccgggatccccaacgagtggcccttcaaggagcaggagctcaaggcgctcgaggcccgacgcgcgcaggcgctccaggagctcgagctcaagaagcaggcgcgcaaggagagggctcagaagaggaaggcaggattgcttgaggacgaggacattgctagtttggcatctgcagcttccgcacagggcagtgagtttgcagcaaaggagaatgctcctttattagtggcaaagatcaacgatcattcagagaggtctttctacaaggagcttgttaaagtaattgaagcttccgatgtgattgtggaggttcttgatgcaagggatccgctgggcacccgttgcattgacatggaaaagatggttaggaaggctgatccaagtaaacggattgtactacttctcaacaagatagatcttgttcccaaggaggcggcagagaaatggcttacatatctaagagaagaattgccaacagttgcttttaagtgcaatacccaggagcagaggaccaagctgggatggaaatcttcaaaattagataaaacaagcaacatcccacaaagcagtgattgtcttggtgccgagaatctaatcaaattgcttaagaattattccagaagccatgagctgaaactggcaattacggtgggtattgttggacttcctaatgttggcaagagcagtctgatcaacagcctgaagaggtcccgagtggtcaatgtcggttctactccagggattactagatcaatgcaagaagttcaattagacaagaaggtaaagttgttggattgtcctggtgttgttatgctcaaatcttccaacagtggtgtgtctgtagcccttcgaaactgcaaaaaggttgagaaaatagaagatccagtcgctcctggttccaaactttggttcagttgatgatttccttcagaaagtagcaactgtacgtgggaaattgaaaaagggtggtgtagtggatgttgaagctgcagcgagaattgtgcttcatgactggaatgaaggtaaaataccatattttacactgccgcctaaaagagatgctggggaggactcagatgcagtgattatatccgaggatgggaaagaatttaatatcgatgatatttacaaagctgaatcttcatatattggtggtttgaagtccattgaggagttccatcatattgagattcctcctaatgctccaccggcgatcgatgaagagatgctagaggatggtggcaagaaaccaagcgaagccatccaggaaagccgggacagggaggagcaaatgcccgacgtgaaggactcaggaggaagcaaggcagccagcgccagcacgcagaacgacaagttgtacaccgccgagggcgtactcgaccctcgcaagagcaaagcagagaagaaacggcgcaaggcgagcaggcccagcgcgctgaacgacatggacgcggactacgatttcaaggtggattatcggatggaggacggtgggagcgagggtgcacacgcggatgatgaagatggcggagatggatccgaggataatgaaccaatgaccggtgtcgatgatgcatgaattgtcatgtcgagtgccactttgccagaaatgatttgtcccaatgggggttgggaaattaacccacgacagttttgtgcttagtttgtttcttcaatgaaagatgacagttgcgttttacctgtcacagtacctacttttcgttgcaatcttcagaacaacctgatggaagagtacagaccacacaactaagtcttcggttattcacgtagactttgttcatttattactataccatatacattaaaaaatgagactaaataaaccacctcgacatggaaaaattacaactctggtgcgttcagtggtgcacgcaaatttttaatcggaacttccattgagaaccgaataatgcaggtgtctcgtgatgcttttgttctcagggattaatgtttaccgttcgggctagtttggaaactcaaatccccttcgagattagagaggaaattagttcatttccacatcaatcccatccaattctaaaaggatccttcaggtatttcgaaatgccattatgtaattgattgaaaagtactacaattcttgttaccgtgcgtacatttcagattgcaagcaccaagcattccaccacttggctgaacaacaaatcaatgcaaagtgatcaatcaccatgtcgcgaaaaggaaccatcagacagcataacaaacgaacacaaaaccagttaaccgataccggtctgtttcatataacttgtacgcttcaccacagtttcactcagcaaatggacgcggaacgccagaactctctacgctatctgcgtctgggatagcaagtaggatgaaggccaaagggattaaatggcaggcccatatactgcggtgacatgaactgtggtacgaatggacttc

SEQ ID NO: 48284 - DNA, 2061 bp, Zea Mays
atcaatttatgctgttgtttcttccacttattgcagttcctgttatgtgctatatcagtgaaccctggataaatttggcggcggcggctgctgctgctagtggaaagcctcagaaggcatctgctgctgacgatgatgacatggatcccactcaatactacgagaataggctcaagactcttgattcactcaaggccgcaggtgtaaacccctatccacataagtttccggttggcatctctgtagtggaatacattgagaagtacaagaccttgaacaatggggagaagcttacagatgcgacagaatgtttagctgggaggatcatgaacaagagaacatcatcatctaagctattcttttatgatctttatggtggcggcatgaaggttcaagtgatggctgatgccaggacctcagagttggatgaagcagaattctctaagtaccactcgagtgtgaagcgaggtgatattgttggcatatgtggttatccaggaaaaagcaaccgtggggagcttagcctgttcccgaagaaatttgtcgtgctctctccatgtcttcatatgatgcctcgacagaaaggtgaaggaagttcggtgcctgtatcgtggactccaggaatgggtaggaatatcgaaaattatgttttgagggatcaggaaactcggtatcgtcagagatatcttgatataatggtaaaccatgaagtgaggcatatcttcaagacacgatctaaagttgtctcatttatccggaagtttcttgatgaccgcgaatttttggaggtggagactccgatgatgaacatgattgctggtggagcagctgcaaggccttttattacacaccacaatgaattaaacatgaggctttttatgcgcattgctcctgaattatatctgaaggaattggttgttggtggattggaccgtgtttatgaaattggaaaacaattcaggaatgaaggaattgatttaacacacaatcctgaattcacaacttgtgagttttatatggcttatgccgattataatgatttgatggagcttactgaaaccatgttgtcagggatggttaaggagctgacaggtggctataagataaaatatcatgcaaatggagttacgaactcaccaatagaaattgatttcacacctcccttcagaaggattgatatgattaaagatttggaggctatggccaatctcaatataccaaaagatctagcaagtgatgaagcgaatcgttacttgatagaagcatgtgctaagtatgatgtgaaatgtccacctccccaaacgacatcacggttgcttgacaagttagttgggcatttcttggaggagacatgtgtgaatccaacatttatcatcaatcatccagagataatgagtccattggcaaagtggcataggtctcgacctggattgactgagaggtttgagctatttgttaacaaacatgaggtgtgcaatgcatacacagagttaaacgatcctgttgtgcagagacaacggtttgaggagcaactaaaggatcgtcaatctggtgatgatgaagctatggccttggacgaaacattctgtgctgcccttgagtatggtctaccaccaacaggtggttggggcttgggaattgatcgcctcacgatgttgcttacagattctcagaacattaagttcttctatttccggctatgaagcctcaagagtagctatccgcatagccaaaagcaacaaaatggcctcagccaaaggccacaaaaggttcaaagcaaacataggcgctggagggtatatcttagctcttggatctgtattgaacgatacatccttttgcccctgtgctcgggagctttccatttttttcattattttttgtaaactaccgcgtatttgctggcagcaggttattaaccagaaactgtaacgtcacagaaagttcagtttaacttcgaatggagttttttggaggttgcaaatactctgggtctgggtctatccaatgtgtacgctcaagcctcaaaggcccaccctaaattgttgaaaaagcatgtgc

SEQ ID NO: 48285 - DNA, 929 bp, Zea Mays
aaagatttgtttagataagtatttgagttgctataaatatacaattgtctccgtggtctggttccctttcctcgagtttcctattttcgtctcctccccacagcagcccggcgaaaaccctagtaagcaaaccaccggagcagcggcgcttgcgcgggcggagccatggcggacgacgattacaacgaaattgacatggggtatgaggatgagcccccagaaccggagattgaggaaggagctgaagaagagcctgagaacaacgaagatgcccctgatgacgtcataggtggtgagggtgaagataaggaacaggaaaagaccaagcgtgaacgcaaaacaacaaaatacatgacgaagtacgaacgtgcgcgcatcctgggtacacgagccttgcagataagcatgaatgctccagtcatggttgagcttgagggtgaaactgaccctcttgaggagctgagagcgcgcaagatacccttcacgatcagacggtacttacctgatggaagctatgaagactggggagtagacgagctcattgtggaggactcctggaaacgccaggttggtggagactgaagacgcggatctacttggcatggaaagggtatgtggtgcagtgggtctttcctgtagttacaagtcttcgttgccactatgagtggatactgtagcgaatgaaccaagacgaaatgatgctatgttaacttaacgtctgtggttgccttgaactctggaaccgtaatgctagcatggttgttggttgcgctatgcttgtttttgtttgtttcagtttcagacatgcagttgcagcgtagccaaatgcgtgctttgtgtgcctaatatctgacactggatgtgatcagtgttgtttatgccaatggttgagagctgtgctccgatgattcatgaaccgattgctcttc

SEQ ID NO: 48286 - DNA, 933 bp, Zea Mays
aaagatttgtttagataagtatttgagttgctataaatatacaattgtctccgtggtctggttccctttcctcgagtttcctattttcgtctcctccccacagcagcccggcgaaaaccctagtaagcaaaccaccggagcagcggcgcttgcgcgggcggagccatggcggacgacgattacaacgaaattgacatggggtatgaggatgagcccccagaaccggagattgaggaaggagctgaagaagagcctgagaacaacgaagatgcccctgatgacgtcataggtggtgagggtgaagataaggaacaggaaaagaccaagcgtgaacgcaaaacaacaaaatacatgacgaagtacgaacgtgcgcgcatcctgggtacacgagccttgcagataagcatgaatgctccagtcatggttgagcttgagggtgaaactgaccctcttgagattgcaatgaaggagctgagagcgcgcaagatacccttcacgatcagacggtacttacctgatggaagactggggagtagacgagctcattgtggaggactcctggaaacgccaggttggtggagactgaagacgcggatctacttggcatggaaagggtatgtggtgcagtgggtctttcctgtagttacaagtcttcgttgccactatgagtggatactgtagcgaatgaaccaagacgaaatgatgctatgttaacttaacgtctgtggttgccttgaactctggaaccgtaatgctagcatggttgttggttgcgctatgcttgtttttgtttgtttcagtttcagacatgcagttgcagcgtagccaaatgcgtgctttgtgtgcctaatatctgacactggatgtgatcagtgttgtttatgccaatggttgagagctgtgctccgatgattcatgaaccgattgctcttc

SEQ ID NO: 48287 - DNA, 865 bp, Zea Mays
tataaatatacaattgtctccgtggtctggttccctttcctcgagtttcctattttcgtctcctccccacagcagcccggcgaaaaccctagtaagcaaaccaccggagcagcggcgcttgcgcgggcggagccatggcggacgacgattacaacgaaattgacatggggtatgaggatgagcccccagaaccggagattgaggaaggagctgaagaagagcctgagaacaacgaagatgcccctgatgacgtcataggtggtgagggtgaagataaggaacaggaaaagaccaagcgtgaacgcaaaacaacaaaatacatgacgaacatgaatgctccagtcatggttgagcttgagggtgaaactgaccctcttgagattgcaatgaaggagctgagagcgcgcaagatacccttcacgatcagacggtacttacctgatggaagctatgaagactggggagtagacgagctcattgtggaggactcctggaaacgccaggttggtggagactgaagacgcggatctacttggcatggaaagggtatgtggtgcagtgggtctttcctgtagttacaagtcttcgttgccactatgagtggatactgtagcgaatgaaccaagacgaaatgatgctatgttaacttaacgtctgtggttgccttgaactctggaaccgtaatgctagcatggttgttggttgcgctatgcttgtttttgtttgtttcagtttcagacatgcagttgcagcgtagccaaatgcgtgctttgtgtgcctaatatctgacactggatgtgatcagtgttgtttatgccaatggttgagagctgtgctccgatgattcatgaaccgattgctcttc

SEQ ID NO: 48288 - DNA, 1970 bp, Zea Mays
ctctgctctgctccggcgaagtgtagtgtagtgtagcactaggcgacgacaacaacaagcaagggtggctagagattaaatggatggatgcatgcttgccgcaatagaatagattaaaatagtaccgagtgattgcattctgtttcggatctgaagataggaggggcaaaaaagctattattttaattactcgccgctttccttcccgatgcagggaggtgcttgctgctgatttgagtccgaaagcagataagccacatgctgcatccacagacggccttgggacccttgctaaatggattggaaaacaagaaaaaatcaagcagcaagatacccagagagttccgtgcaagtacacctcatgatgcgcgcatccccgctataagagggccctttgctcaatcactgagcaggcacgcactcactcactcaagagccacgcacgcgcactgacagacacagtcagagggagatcagggaagagaggggaggggaggagaggaggaagaagaagaagcagcagcagctgcagctgcagggcagcaggcatggagcctcatcacgcaaacaaggccaaagctcagcgcgacgaagcactccaagttcatctcctgcaagctctacatttccgaatcccgcaacgctacggccgtggacgcagtggagcgtgcgagcaagagtgacccccaggtggtcgtcgtcagccagttcggggaccatcactacaaccgtttccgctacacgcttgtctcctacatcgtcgtcgtcgacggcggcggatcgtcggcggctggagaggcgacagtagtacatagcccgatcaggaaggtgttgctggcaatgatcgaggccgcgttctcaagcatagacctggaatcacagtcgggagcgcatccgaggatcggcgtagtcgacgacctgtccttccaccccgtgggccaagcgacgatcgaggacgccgcttctctggctaggcaggtagcgtctgacattgcctgcatcgcagcagtcccagtgttcctgtacgcagcagcccacccggcggggaagtcggtgggcgcggtccggcgtgagctcggctactaccgcccaaactacaggggcaaccagtggtcaggcagcgtgctccccaacgtcctgccggtgaagcctgacgtcggtccggcccacgtcgtctcgcacaagagaggcgctacgacggtgggtgtcacgccttggatcgagaactacaatgtccccgtgctgtgtaaggacgtcgccaccgtcaggaggatcacccgtggtgtcactggacggagcggaggccttcccacggtgcaggctctcgcgctcttccatggagatgactgcaccgagattgcgtgcttgctggatccagatcatgccagcgcctatcaagttcagaccgtcgtggaacagattgcaggagaccagggacttgaggttgagcagggatactacactgacataaccaaggacgaagcgctcgataagtatctcaagattgcttgcgctgacgactgatgagcttgtagaaataaatacatggggtaaatgtaaactcatgtttgtagcactgatgctgctgctggagcattattttttttgcccgtgtaaattcaaatttgcatctgaaaacttgagtttggatctgagctcttttcagagaagaaaacaaatgcatcatcagttttattctgaagaatgttaccgttttcctccagatggatgaagagatgagatccatgccgcaacgacttcctcttttcccaaatgttgaagaactctgaacacaggctaagaaacctcttttcccaaattttgaagaacttattatttgctggtattaggggaaaaaagatctttgcgagtgggtatgagtacaacccttgacaatgcacacgaccaaccctgccagacaacatatcaggatacgcattagtttagcatcttgtattacaataatgaag

SEQ ID NO: 48289 - DNA, 4704 bp, Zea Mays
ctctgctctgctccggcgaagtgtagtgtagtgtagcactaggcgacgacaacaacaagcaagggtggctagagattaaatggatggatgcatgcttgccgcaatagaatagattaaaatagtaccgagtgattgcattctgtttcggatctgaagataggaggggcaaaaaagctattattttaattactcgccgctttccttcccgatgcagggaggtgcttgctgctgatttgagtccgaaagcagataagccacatgctgcatccacagacggccttgggacccttgctaaatggattggaaaacaagaaaaaatcaagcagcaagatacccagagagttccgtgcaagtacacctcatgatgcgcgcatccccgctataagagggccctttgctcaatcactgagcaggcacgcactcactcactcaagagccacgcacgcgcactgacagacacagtcagagggagatcagggaagagaggggaggggaggagaggaggaagaagaagaagcagcagcagctgcagctgcagggcagcaggcatggagcctcatcacgcaaacaaggccaaagctcagcgcgacgaagcactccaagttcatctcctgcaagctctacatttccgaatcccgcaacgctacggccgtggacgcagtggagcgtgcgagcaagagtgacccccaggtggtcgtcgtcagccagttcggggaccatcactacaaccgtttccgctacacgcttgtctcctacatcgtcgtcgtcgacggcggcggatcgtcggcggctggagaggcgacagtagtacatagcccgatcaggaaggtgttgctggcaatgatcgaggccgcgttctcaagcatagacctggaatcacagtcgggagcgcatccgaggatcggcgtagtcgacgacctgtccttccaccccgtgggccaagcgacgatcgaggacgccgcttctctggctaggcaggtagcgtctgacattgcctgcatcgcagcagtcccagtgttcctgtacgcagcagcccacccggcggggaagtcggtgggcgcggtccggcgtgagctcggctactaccgcccaaactacaggggcaaccagtggtcaggcagcgtgctccccaacgtcctgccggtgaagcctgacgtcggtccggcccacgtcgtctcgcacaagagaggcgctacgacggtgggtgtcacgccttggatcgagaactacaatgtccccgtgctgtgtaaggacgtcgccaccgtcaggaggatcacccgtggtgtcactggacggagcggaggccttcccacggtgcaggctctcgcgctcttccatggagatgactgcaccgagattgcgtgcttgctggatccagatcatgccagcgcctatcaagttcagaccgtcgtggaacagattgcaggagaccagggacttgaggttgagcagggatactacactgacataaccaaggacgaagcgctcgataagtatctcaagattgcttgcgctgacgactgatgagcttgtagaaataaatacatggggtaaatgtaaactcatgtttgtagcactgatgctgctgctggagcattattttttttgcccgtgtaaattcaaatttgcatctgaaaacttgagtttggatctgagctcttttcagagaagaaaacaaatgcatcatcagttttattctgaagaatgttaccgttttcctccagatggatgaagagatgagatccatgccgcaacgacttcctcttttcccaaatgttgaagaactctgaacacaggctaagaaacctcttttcccaaattttgaagaacttattatttgctggtattaggggaaaaaagatctttgcgagtgggtatgagtacaacccttgacaatgtaagtatatatttttttcctaaaaggttgagtgagatcatcattacaattttattatttgtattagggctcaaatactggtaagaaaaattctgaagatttacagtacaccaacgctactctacatatgtatgttgatctacagacacttcaaactatgaacaaaacacacgccgtgctatatatacacacacggttcgtcaaaatgctgccctcgcagcactgcgtgctgcttcccgcctcatctccgcttccttcccacttcctcggaagtagaggtaaacacgctgcagtaggtgttggcaaaacttaacagttcagaaccaattgaaggtgtcaagagatgaataggagagcaacatatttagtaacttcacacctgaatgacacacatgcttagcaaagactctaggcagaacagtgcaaagccaatgaagtagaagatctgcaggtcaaaatagtttattaacacgcaatcgagttaccgtcgtgtccagaaaaaaacatgtcatgcgaggcatagatttgttttcgatgtttgtaatcattttcatttgtctttgcgggggaaaaaatagatactatgctgtggcattttactggattcagactcaccccgacaatcacgctgtcgcctatcaaactgattgctgggaaaatcccgctgcacgatgagtagacagacatgtgaaagaaaaattacattaaaatccagattcggaacttttttaagaaaaaaatgaaatatgttgaaacaatgatggaactgtaaaaaaatgtataacttacgtcaacgatttccccacgaagagaatcgaaggagaaacagctgcgtacacgcagaaggcgatgtgaacctgtgtgggggtcggcgtgagatgcgtagtagggcttatcggcaacacatcctaatcctaatacagtaatgttaccgggagctcaccaagtagaataggaaaaaccatccaaatttaagagcgctctcgttcctgtaaacacatgcacggtatagtggataataattttacggggagctcaccaagtagagatataataactgtaatattcatagggaggaaacgatttaatctattgcatttacctcatggcacggtatagtggccggtaccaaaggtagtaggcgccggggcatccaagaatgaagtatatgattgcgagaaaccatattttaggacctgcatcatatcaaggagcaaaatagcacgcattttttttagacaacaacggggtcatagatcgccctggcctctgcattacaagatgcacatggccgtgaaccatacacgtcggttatgatcgagcgcatgattagaatttagaaagagcaatgttttaatgttttatcgacatacctgacccttttgcccaggcagccgtaacgcagattatgttccaaaacaggcacacgaccaaccctgccagacaacatatcaggatacgcattagtttagcatcttgtattacaataatgaaggtaccattgttgcgtggagacgacatgaagcacaaggctatgcccgatcgcagggaaaaaacgataaaggataaaagaaacttattacctaagagtgacgcgaatgcgacatacagtgtactttgcagatggacaggtatctcgttgccaatatcgttatggatgatggggaaaaacggtggccagtttttctcttccaacacaacgccagctgcaagaggagatggataacgatgctcgtattattatcattaacgaaagggagtcctcgtgaatgacgccaaaagatagcaaagcgacgtcggatgatgacactctgaaactccacctcgtgctgcggcgtcttctcgcctttttatttcctacatacgcagcagaggctaggtttaacagagaaatcaacaaactggaggccatacacaagggaacgttaataaggacctgaacatacgtatgaagccgcagcggggtatgtcagtatatggttagcctattaccaggtctccaacagctcccatattctatcttacatcccatcctttattttaaattttactttttccaaataaatattatcatctacagtaccgtgtcatctatcttacacgacacgacagtctaaaccggcaacaagatattactcgaatccttccatcggaagtttgagaataaatttgaattttcagaaggcagccgattacaacgcactagaatatgtgtgttaaaggccactttccctatcaggttggtgcgtacagttggagggaaaaaaattgaagatacaaattaaaactaatcgtctccttggccgagctcagatcccctgcacgatcatgattatgtagaaattccgacacgattcaattcaattgcattgatatagagtctgtgtgatcgggtgtagtctctgcaagatgatatcaatctaatctcttgtctttctctatcattccttggctttccccccttcttttttttgaaggatactgttctttgtcatcgcaagcgagcttggcagaaggtttgatgacgaagcaggagcatcaactcgaaatatgaaaaaagcaactccggatgaacgaagcgaacaaggagatacgcagaagcaatcaatcaaagcagggggaaaggaagagccggacggagctcatcgccggcgcgagctgggcctgggctgggcagggcaggcaggattaccgcgaaagggttgacctcggccgcggctgcgccctcctcgaaggggttgtcgtacgtcgatctccccgccatggacctttccttccctcctgccggttccttgctctgctccgct

SEQ ID NO: 48290 - DNA, 5159 bp, Zea Mays
ctgctccggcgaagtgtagtgtagtgtagcactaggcgacgacaacaacaagcaagggtggctagagattaaatggatggatgcatgcttgccgcaatagaatagattaaaatagtaccgagtgattgcattctgtttcggatctgaagataggaggggcaaaaaagctattattttaattactcgccgctttccttcccgatgcagggaggtgcttgctgctgatttgagtccgaaagcagataagccacatgctgcatccacagacggccttgggacccttgctaaatggattggaaaacaagaaaaaatcaagcagcaagatacccagagagttccgtgcaagtacacctcatgatgcgcgcatccccgctataagagggccctttgctcaatcactgagcaggcacgcactcactcactcaagagccacgcacgcgcactgacagacacagtcagagggagatcagggaagagaggggaggggaggagaggaggaagaagaagaagcagcagcagctgcagctgcagggcagcaggcatggagcctcatcacgcaaacaaggtacgccttaacctcctcctcctactcctagttcaagatggtttcgagctgcaaaaaaagcatggcagtacgaatcgaccgaaagcctattttatccaagacctagctaactcgcaaaacaaaaagaaagaaatctgctgggttcagaaatttccgttacgacgatgatgatgtagggttcctgcattgctgtcgttaggctttttttttatccagatggatgcgccgtgggtttcctgcagcgcagcatgtagactagaggtcatcagaccatgccacaaaacacacagactagtttgtttgttttctgcacatatatgaacagcagctctgtcgaaccacaggaactgaatcgaaaccaatcgaacatagaaagcccggttctcaaaaaattcaacctttctgagatagaagagactaacctgagtttttaatcttgtccattcatccgccaaagccaaggccaaagctcagcgcgacgaagcactccaagttcatctcctgcaagctctacatttccgaatcccgcaacgctacggccgtggacgcagtggagcgtgcgagcaagagtgacccccaggtggtcgtcgtcagccagttcggggaccatcactacaaccgtttccgctacacgcttgtctcctacatcgtcgtcgtcgacggcggcggatcgtcggcggctggagaggcgacagtagtacatagcccgatcaggaaggtgttgctggcaatgatcgaggccgcgttctcaagcatagacctggaatcacagtcgggagcgcatccgaggatcggcgtagtcgacgacctgtccttccaccccgtgggccaagcgacgatcgaggacgccgcttctctggctaggcaggtagcgtctgacattgcctgcatcgcagcagtcccagtgttcctgtacgcagcagcccacccggcggggaagtcggtgggcgcggtccggcgtgagctcggctactaccgcccaaactacaggggcaaccagtggtcaggcagcgtgctccccaacgtcctgccggtgaagcctgacgtcggtccggcccacgtcgtctcgcacaagagaggcgctacgacggtgggtgtcacgccttggatcgagaactacaatgtccccgtgctgtgtaaggacgtcgccaccgtcaggaggatcacccgtggtgtcactggacggagcggaggccttcccacggtgcaggctctcgcgctcttccatggagatgactgcaccgagattgcgtgcttgctggatccagatcatgccagcgcctatcaagttcagaccgtcgtggaacagattgcaggagaccagggacttgaggttgagcagggatactacactgacataaccaaggacgaagcgctcgataagtatctcaagattgcttgcgctgacgactgatgagcttgtagaaataaatacatggggtaaatgtaaactcatgtttgtagcactgatgctgctgctggagcattattttttttgcccgtgtaaattcaaatttgcatctgaaaacttgagtttggatctgagctcttttcagagaagaaaacaaatgcatcatcagttttattctgaagaatgttaccgttttcctccagatggatgaagagatgagatccatgccgcaacgacttcctcttttcccaaatgttgaagaactctgaacacaggctaagaaacctcttttcccaaattttgaagaacttattatttgctggtattaggggaaaaaagatctttgcgagtgggtatgagtacaacccttgacaatgtaagtatatatttttttcctaaaaggttgagtgagatcatcattacaattttattatttgtattagggctcaaatactggtaagaaaaattctgaagatttacagtacaccaacgctactctacatatgtatgttgatctacagacacttcaaactatgaacaaaacacacgccgtgctatatatacacacacggttcgtcaaaatgctgccctcgcagcactgcgtgctgcttcccgcctcatctccgcttccttcccacttcctcggaagtagaggtaaacacgctgcagtaggtgttggcaaaacttaacagttcagaaccaattgaaggtgtcaagagatgaataggagagcaacatatttagtaacttcacacctgaatgacacacatgcttagcaaagactctaggcagaacagtgcaaagccaatgaagtagaagatctgcaggtcaaaatagtttattaacacgcaatcgagttaccgtcgtgtccagaaaaaaacatgtcatgcgaggcatagatttgttttcgatgtttgtaatcattttcatttgtctttgcgggggaaaaaatagatactatgctgtggcattttactggattcagactcaccccgacaatcacgctgtcgcctatcaaactgattgctgggaaaatcccgctgcacgatgagtagacagacatgtgaaagaaaaattacattaaaatccagattcggaacttttttaagaaaaaaatgaaatatgttgaaacaatgatggaactgtaaaaaaatgtataacttacgtcaacgatttccccacgaagagaatcgaaggagaaacagctgcgtacacgcagaaggcgatgtgaacctgtgtgggggtcggcgtgagatgcgtagtagggcttatcggcaacacatcctaatcctaatacagtaatgttaccgggagctcaccaagtagaataggaaaaaccatccaaatttaagagcgctctcgttcctgtaaacacatgcacggtatagtggataataattttacggggagctcaccaagtagagatataataactgtaatattcatagggaggaaacgatttaatctattgcatttacctcatggcacggtatagtggccggtaccaaaggtagtaggcgccggggcatccaagaatgaagtatatgattgcgagaaaccatattttaggacctgcatcatatcaaggagcaaaatagcacgcattttttttagacaacaacggggtcatagatcgccctggcctctgcattacaagatgcacatggccgtgaaccatacacgtcggttatgatcgagcgcatgattagaatttagaaagagcaatgttttaatgttttatcgacatacctgacccttttgcccaggcagccgtaacgcagattatgttccaaaacaggcacacgaccaaccctgccagacaacatatcaggatacgcattagtttagcatcttgtattacaataatgaaggtaccattgttgcgtggagacgacatgaagcacaaggctatgcccgatcgcagggaaaaaacgataaaggataaaagaaacttattacctaagagtgacgcgaatgcgacatacagtgtactttgcagatggacaggtatctcgttgccaatatcgttatggatgatggggaaaaacggtggccagtttttctcttccaacacaacgccagctgcaagaggagatggataacgatgctcgtattattatcattaacgaaagggagtcctcgtgaatgacgccaaaagatagcaaagcgacgtcggatgatgacactctgaaactccacctcgtgctgcggcgtcttctcgcctttttatttcctacatacgcagcagaggctaggtttaacagagaaatcaacaaactggaggccatacacaagggaacgttaataaggacctgaacatacgtatgaagccgcagcggggtatgtcagtatatggttagcctattaccaggtctccaacagctcccatattctatcttacatcccatcctttattttaaattttactttttccaaataaatattatcatctacagtaccgtgtcatctatcttacacgacacgacagtctaaaccggcaacaagatattactcgaatccttccatcggaagtttgagaataaatttgaattttcagaaggcagccgattacaacgcactagaatatgtgtgttaaaggccactttccctatcaggttggtgcgtacagttggagggaaaaaaattgaagatacaaattaaaactaatcgtctccttggccgagctcagatcccctgcacgatcatgattatgtagaaattccgacacgattcaattcaattgcattgatatagagtctgtgtgatcgggtgtagtctctgcaagatgatatcaatctaatctcttgtctttctctatcattccttggctttccccccttcttttttttgaaggatactgttctttgtcatcgcaagcgagcttggcagaaggtttgatgacgaagcaggagcatcaactcgaaatatgaaaaaagcaactccggatgaacgaagcgaacaaggagatacgcagaagcaatcaatcaaagcagggggaaaggaagagccggacggagctcatcgccggcgcgagctgggcctgggctgggcagggcaggcaggattaccgcgaaagggttgacctcggccgcggctgcgccctcctcgaaggggttgtcgtacgtcgatctccccgccatggacctttccttccctcctgccggttccttgctctgctccgct

SEQ ID NO: 48291 - DNA, 4617 bp, Zea Mays
cactaggcgacgacaacaacaagcaagggtggctagagattaaatggatggatgcatgcttgccgcaatagaatagattaaaatagtaccgagtgattgcattctgtttcggatctgaagataggaggggcaaaaaagctattattttaattactcgccgctttccttcccgatgcagggaggtgcttgctgctgatttgagtccgaaagcagataagccacatgctgcatccacagacggccttgggacccttgctaaatggattggaaaacaagaaaaaatcaagcagcaagatacccagagagttccgtgcaagtacacctcatgatgcgcgcatccccgctataagagggccctttgctcaatcactgagcaggcacgcactcactcactcaagagccacgcacgcgcactgacagacacagtcagagggagatcagggaagagaggggaggggaggagaggaggaagaagaagaagcagcagcagctgcagctgcagggcagcaggcatggagcctcatcacgcaaacaaggtacgccttaacctcctcctcctactcctagttcaagatggtttcgagctgcaaaaaaagcatggcagtacgaatcgaccgaaagcctattttatccaagacctagctaactcgcaaaacaaaaagaaagaaatctgctgggttcagaaatttccgttacgacgatgatgatgtagggttcctgcattgctgtcgttaggctttttttttatccagatggatgcgccgtgggtttcctgcagcgcagcatgtagactagaggtcatcagaccatgccacaaaacacacagactagtttgtttgttttctgcacatatatgaacagcagctctgtcgaaccacaggaactgaatcgaaaccaatcgaacatagaaagcccggttctcaaaaaattcaacctttctgagatagaagagactaacctgagtttttaatcttgtccattcatccgccaaagccaaggccaaagctcagcgcgacgaagcactccaagttcatctcctgcaagctctacatttccgaatcccgcaacgctacggccgtggacgcagtggagcgtgcgagcaagagtgacccccaggtggtcgtcgtcagccagttcggggaccatcactacaaccgtttccgctacacgcttgtctcctacatcgtcgtcgtcgacggcggcggatcgtcggcggctggagaggcgacagtagtacatagcccgatcaggaaggtgttgctggcaatgatcgaggccgcgttctcaagcatagacctggaatcacagtcgggagcgcatccgaggatcggcgtagtcgacgacctgtccttccaccccgtgggccaagcgacgatcgaggacgccgcttctctggctaggcaggtagcgtctgacattgcctgcatcgcagcagtcccagtgttcctgtacgcagcagcccacccggcggggaagtcggtgggcgcggtccggcgtgagctcggctactaccgcccaaactacaggggcaaccagtggtcaggcagcgtgctccccaacgtcctgccggtgaagcctgacgtcggtccggcccacgtcgtctcgcacaagagaggcgctacgacggtgggtgtcacgccttggatcgagaactacaatgtccccgtgctgtgtaaggacgtcgccaccgtcaggaggatcacccgtggtgtcactggacggagcggaggccttcccacggtgcaggctctcgcgctcttccatggagatgactgcaccgagattgcgtgcttgctggatccagatcatgccagcgcctatcaagttcagaccgtcgtggaacagattgcaggagaccagggacttgaggttgagcagggatactacactgacataaccaaggacgaagcgctcgataagtatctcaagattgcttgcgctgacgactgatgagcttgtagaaataaatacatggggtaaatgtaaactcatgtttgtagcactgatgctgctgctggagcattattttttttgcccgtgtaaattcaaatttgcatctgaaaacttgagtttggatctgagctcttttcagagaagaaaacaaatgcatcatcagttttattctgaagaatgttaccgttttcctccagatggatgaagagatgagatccatgccgcaacgacttcctcttttcccaaatgttgaagaactctgaacacaggctaagaaacctcttttcccaaattttgaagaacttattatttgctggtattaggggaaaaaagatctttgcgagtgggtatgagtacaacccttgacaatgtaagtatatatttttttcctaaaaggttgagtgagatcatcattacaattttattatttgtattagggctcaaatactggtaagaaaaattctgaagatttacagtacaccaacgctactctacatatgtatgttgatctacagacacttcaaactatgaacaaaacacacgccgtgctatatatacacacacggttcgtcaaaatgctgccctcgcagcactgcgtgctgcttcccgcctcatctccgcttccttcccacttcctcggaagtagaggtaaacacgctgcagtaggtgttggcaaaacttaacagttcagaaccaattgaaggtgtcaagagatgaataggagagcaacatatttagtaacttcacacctgaatgacacacatgcttagcaaagactctaggcagaacagtgcaaagccaatgaagtagaagatctgcaggtcaaaatagtttattaacacgcaatcgagttaccgtcgtgtccagaaaaaaacatgtcatgcgaggcatagatttgttttcgatgtttgtaatcattttcatttgtctttgcgggggaaaaaatagatactatgctgtggcattttactggattcagactcaccccgacaatcacgctgtcgcctatcaaactgattgctgggaaaatcccgctgcacgatgagtagacagacatgtgaaagaaaaattacattaaaatccagattcggaacttttttaagaaaaaaatgaaatatgttgaaacaatgatggaactgtaaaaaaatgtataacttacgtcaacgatttccccacgaagagaatcgaaggagaaacagctgcgtacacgcagaaggcgatgtgaacctgtgtgggggtcggcgtgagatgcgtagtagggcttatcggcaacacatcctaatcctaatacagtaatgttaccgggagctcaccaagtagaataggaaaaaccatccaaatttaagagcgctctcgttcctgtaaacacatgcacggtatagtggataataattttacggggagctcaccaagtagagatataataactgtaatattcatagggaggaaacgatttaatctattgcatttacctcatggcacggtatagtggccggtaccaaaggtagtaggcgccggggcatccaagaatgaagtatatgattgcgagaaaccatattttaggacctgcatcatatcaaggagcaaaatagcacgcattttttttagacaacaacggggtcatagatcgccctggcctctgcattacaagatgcacatggccgtgaaccatacacgtcggttatgatcgagcgcatgattagaatttagaaagagcaatgttttaatgttttatcgacatacctgacccttttgcccaggcagccgtaacgcagattatgttccaaaacaggcacacgaccaaccctgccagacaacatatcaggatacgcattagtttagcatcttgtattacaataatgaaggtaccattgttgcgtggagacgacatgaagcacaaggctatgcccgatcgcagggaaaaaacgataaaggataaaagaaacttattacctaagagtgacgcgaatgcgacatacagtgtactttgcagatggacaggtatctcgttgccaatatcgttatggatgatggggaaaaacggtggccagtttttctcttccaacacaacgccagctgcaagaggagatggataacgatgctcgtattattatcattaacgaaagggagtcctcgtgaatgacgccaaaagatagcaaagcgacgtcggatgatgacactctgaaactccacctcgtgctgcggcgtcttctcgcctttttatttcctacatacgcagcagaggctaggtttaacagagaaatcaacaaactggaggccatacacaagggaacgttaataaggacctgaacatacgtatgaagccgcagcggggatactgttctttgtcatcgcaagcgagcttggcagaaggtttgatgacgaagcaggagcatcaactcgaaatatgaaaaaagcaactccggatgaacgaagcgaacaaggagatacgcagaagcaatcaatcaaagcagggggaaaggaagagccggacggagctcatcgccggcgcgagctgggcctgggctgggcagggcaggcaggattaccgcgaaagggttgacctcggccgcggctgcgccctcctcgaaggggttgtcgtacgtcgatctccccgccatggacctttccttccctcctgccggttccttgctctgctccgct

SEQ ID NO: 48292 - DNA, 4577 bp, Zea Mays
aatagattaaaatagtaccgagtgattgcattctgtttcggatctgaagataggaggggcaaaaaagctattattttaattactcgccgctttccttcccgatgcagggaggtgcttgctgctgatttgagtccgaaagcagataagccacatgctgcatccacagacggccttgggacccttgctaaatggattggaaaacaagaaaaaatcaagcagcaagatacccagagagttccgtgcaagtacacctcatgatgcgcgcatccccgctataagagggccctttgctcaatcactgagcaggcacgcactcactcactcaagagccacgcacgcgcactgacagacacagtcagagggagatcagggaagagaggggaggggaggagaggaggaagaagaagaagcagcagcagctgcagctgcagggcagcaggcatggagcctcatcacgcaaacaaggtacgccttaacctcctcctcctactcctagttcaagatggtttcgagctgcaaaaaaagcatggcagtacgaatcgaccgaaagcctattttatccaagacctagctaactcgcaaaacaaaaagaaagaaatctgctgggttcagaaatttccgttacgacgatgatgatgtagggttcctgcattgctgtcgttaggctttttttttatccagatggatgcgccgtgggtttcctgcagcgcagcatgtagactagaggtcatcagaccatgccacaaaacacacagactagtttgtttgttttctgcacatatatgaacagcagctctgtcgaaccacaggaactgaatcgaaaccaatcgaacatagaaagcccggttctcaaaaaattcaacctttctgagatagaagagactaacctgagtttttaatcttgtccattcatccgccaaagccaaggccaaagctcagcgcgacgaagcactccaagttcatctcctgcaagctctacatttccgaatcccgcaacgctacggccgtggacgcagtggagcgtgcgagcaagagtgacccccaggtggtcgtcgtcagccagttcggggaccatcactacaaccgtttccgctacacgcttgtctcctacatcgtcgtcgtcgacggcggcggatcgtcggcggctggagaggcgacagtagtacatagcccgatcaggaaggtgttgctggcaatgatcgaggccgcgttctcaagcatagacctggaatcacagtcgggagcgcatccgaggatcggcgtagtcgacgacctgtccttccaccccgtgggccaagcgacgatcgaggacgccgcttctctggctaggcaggtagcgtctgacattgcctgcatcgcagcagtcccagtgttcctgtacgcagcagcccacccggcggggaagtcggtgggcgcggtccggcgtgagctcggctactaccgcccaaactacaggggcaaccagtggtcaggcagcgtgctccccaacgtcctgccggtgaagcctgacgtcggtccggcccacgtcgtctcgcacaagagaggcgctacgacggtgggtgtcacgccttggatcgagaactacaatgtccccgtgctgtgtaaggacgtcgccaccgtcaggaggatcacccgtggtgtcactggacggagcggaggccttcccacggtgcaggctctcgcgctcttccatggagatgactgcaccgagattgcgtgcttgctggatccagatcatgccagcgcctatcaagttcagaccgtcgtggaacagattgcaggagaccagggacttgaggttgagcagggatactacactgacataaccaaggacgaagcgctcgataagtatctcaagattgcttgcgctgacgactgatgagcttgtagaaataaatacatggggtaaatgtaaactcatgtttgtagcactgatgctgctgctggagcattattttttttgcccgtgtaaattcaaatttgcatctgaaaacttgagtttggatctgagctcttttcagagaagaaaacaaatgcatcatcagttttattctgaagaatgttaccgttttcctccagatggatgaagagatgagatccatgccgcaacgacttcctcttttcccaaatgttgaagaactctgaacacaggctaagaaacctcttttcccaaattttgaagaacttattatttgctggtattaggggaaaaaagatctttgcgagtgggtatgagtacaacccttgacaatgtaagtatatatttttttcctaaaaggttgagtgagatcatcattacaattttattatttgtattagggctcaaatactggtaagaaaaattctgaagatttacagtacaccaacgctactctacatatgtatgttgatctacagacacttcaaactatgaacaaaacacacgccgtgctatatatacacacacggttcgtcaaaatgctgccctcgcagcactgcgtgctgcttcccgcctcatctccgcttccttcccacttcctcggaagtagaggtaaacacgctgcagtaggtgttggcaaaacttaacagttcagaaccaattgaaggtgtcaagagatgaataggagagcaacatatttagtaacttcacacctgaatgacacacatgcttagcaaagactctaggcagaacagtgcaaagccaatgaagtagaagatctgcaggtcaaaatagtttattaacacgcaatcgagttaccgtcgtgtccagaaaaaaacatgtcatgcgaggcatagatttgttttcgatgtttgtaatcattttcatttgtctttgcgggggaaaaaatagatactatgctgtggcattttactggattcagactcaccccgacaatcacgctgtcgcctatcaaactgattgctgggaaaatcccgctgcacgatgagtagacagacatgtgaaagaaaaattacattaaaatccagattcggaacttttttaagaaaaaaatgaaatatgttgaaacaatgatggaactgtaaaaaaatgtataacttacgtcaacgatttccccacgaagagaatcgaaggagaaacagctgcgtacacgcagaaggcgatgtgaacctgtgtgggggtcggcgtgagatgcgtagtagggcttatcggcaacacatcctaatcctaatacagtaatgttaccgggagctcaccaagtagaataggaaaaaccatccaaatttaagagcgctctcgttcctgtaaacacatgcacggtatagtggataataattttacggggagctcaccaagtagagatataataactgtaatattcatagggaggaaacgatttaatctattgcatttacctcatggcacggtatagtggccggtaccaaaggtagtaggcgccggggcatccaagaatgaagtatatgattgcgagaaaccatattttaggacctgcatcatatcaaggagcaaaatagcacgcattttttttagacaacaacggggtcatagatcgccctggcctctgcattacaagatgcacatggccgtgaaccatacacgtcggttatgatcgagcgcatgattagaatttagaaagagcaatgttttaatgttttatcgacatacctgacccttttgcccaggcagccgtaacgcagattatgttccaaaacaggcacacgaccaaccctgccagacaacatatcaggatacgcattagtttagcatcttgtattacaataatgaaggtaccattgttgcgtggagacgacatgaagcacaaggctatgcccgatcgcagggaaaaaacgataaaggataaaagaaacttattacctaagagtgacgcgaatgcgacatacagtgtactttgcagatggacaggtatctcgttgccaatatcgttatggatgatggggaaaaacggtggccagtttttctcttccaacacaacgccagctgcaagaggagatggataacgatgctcgtattattatcattaacgaaagggagtcctcgtgaatgacgccaaaagatagcaaagcgacgtcggatgatgacactctgaaactccacctcgtgctgcggcgtcttctcgcctttttatttcctacatacgcagcagaggctaggtttaacagagaaatcaacaaactggaggccatacacaagggaacgttaataaggacctgaacatacgtatgaagccgcagcggggtatgtcagtatatggttagcctattaccaggatactgttctttgtcatcgcaagcgagcttggcagaaggtttgatgacgaagcaggagcatcaactcgaaatatgaaaaaagcaactccggatgaacgaagcgaacaaggagatacgcagaagcaatcaatcaaagcagggggaaaggaagagccggacggagctcatcgccggcgcgagctgggcctgggctgggcagggcaggcaggattaccgcgaaagggttgacctcggccgcggctgcgccctcctcgaaggggttgtcgtacgtcgatctccccgccatggacctttccttccctcctgccggttccttgctctgctccgct

SEQ ID NO: 48293 - DNA, 2680 bp, Zea Mays
acctcctcctcctactcctagttcaagatggtttcgagctgcaaaaaaagcatggcagtacgaatcgaccgaaagcctattttatccaagacctagctaactcgcaaaacaaaaagaaagaaatctgctgggttcagaaatttccgttacgacgatgatgatgtagggttcctgcattgctgtcgttaggctttttttttatccagatggatgcgccgtgggtttcctgcagcgcagcatgtagactagaggtcatcagaccatgccacaaaacacacagactagtttgtttgttttctgcacatatatgaacagcagctctgtcgaaccacaggaactgaatcgaaaccaatcgaacatagaaagcccggttctcaaaaaattcaacctttctgagatagaagagactaacctgagtttttaatcttgtccattcatccgccaaagccaaggccaaagctcagcgcgacgaagcactccaagttcatctcctgcaagctctacatttccgaatcccgcaacgctacggccgtggacgcagtggagcgtgcgagcaagagtgacccccaggtggtcgtcgtcagccagttcggggaccatcactacaaccgtttccgctacacgcttgtctcctacatcgtcgtcgtcgacggcggcggatcgtcggcggctggagaggcgacagtagtacatagcccgatcaggaaggtgttgctggcaatgatcgaggccgcgttctcaagcatagacctggaatcacagtcgggagcgcatccgaggatcggcgtagtcgacgacctgtccttccaccccgtgggccaagcgacgatcgaggacgccgcttctctggctaggcaggtagcgtctgacattgcctgcatcgcagcagtcccagtgttcctgtacgcagcagcccacccggcggggaagtcggtgggcgcggtccggcgtgagctcggctactaccgcccaaactacaggggcaaccagtggtcaggcagcgtgctccccaacgtcctgccggtgaagcctgacgtcggtccggcccacgtcgtctcgcacaagagaggcgctacgacggtgggtgtcacgccttggatcgagaactacaatgtccccgtgctgtgtaaggacgtcgccaccgtcaggaggatcacccgtggtgtcactggacggagcggaggccttcccacggtgcaggctctcgcgctcttccatggagatgactgcaccgagattgcgtgcttgctggatccagatcatgccagcgcctatcaagttcagaccgtcgtggaacagattgcaggagaccagggacttgaggttgagcagggatactacactgacataaccaaggacgaagcgctcgataagtatctcaagattgcttgcgctgacgactgatgagcttgtagaaataaatacatggggtaaatgtaaactcatgtttgtagcactgatgctgctgctggagcattattttttttgcccgtgtaaattcaaatttgcatctgaaaacttgagtttggatctgagctcttttcagagaagaaaacaaatgcatcatcagttttattctgaagaatgttaccgttttcctccagatggatgaagagatgagatccatgccgcaacgacttcctcttttcccaaatgttgaagaactctgaacacaggctaagaaacctcttttcccaaattttgaagaacttattatttgctggtattaggggaaaaaagatctttgcgagtgggtatgagtacaacccttgacaatgcacacgaccaaccctgccagacaacatatcaggatacgcattagtttagcatcttgtattacaataatgaaggtaccattgttgcgtggagacgacatgaagcacaaggctatgcccgatcgcagggaaaaaacgataaaggataaaagaaacttattacctaagagtgacgcgaatgcgacatacagtgtactttgcagatggacaggtatctcgttgccaatatcgttatggatgatggggaaaaacggtggccagtttttctcttccaacacaacgccagctgcaagaggagatggataacgatgctcgtattattatcattaacgaaagggagtcctcgtgaatgacgccaaaagatagcaaagcgacgtcggatgatgacactctgaaactccacctcgtgctgcggcgtcttctcgcctttttatttcctacatacgcagcagaggctaggtttaacagagaaatcaacaaactggaggccatacacaagggaacgttaataaggacctgaacatacgtatgaagccgcagcggggtatgtcagtatatggttagcctattaccaggatactgttctttgtcatcgcaagcgagcttggcagaaggtttgatgacgaagcaggagcatcaactcgaaatatgaaaaaagcaactccggatgaacgaagcgaacaaggagatacgcagaagcaatcaatcaaagcagggggaaaggaagagccggacggagctcatcgccggcgcgagctgggcctgggctgggcagggcaggcaggattaccgcgaaagggttgacctcggccgcggctgcgccctcctcgaaggggttgtcgtacgtcgatctccccgccatggacctttccttccctcctgccggttccttgctctgctccgct

SEQ ID NO: 48294 - DNA, 3158 bp, Zea Mays
cctcctcctactcctagttcaagatggtttcgagctgcaaaaaaagcatggcagtacgaatcgaccgaaagcctattttatccaagacctagctaactcgcaaaacaaaaagaaagaaatctgctgggttcagaaatttccgttacgacgatgatgatgtagggttcctgcattgctgtcgttaggctttttttttatccagatggatgcgccgtgggtttcctgcagcgcagcatgtagactagaggtcatcagaccatgccacaaaacacacagactagtttgtttgttttctgcacatatatgaacagcagctctgtcgaaccacaggaactgaatcgaaaccaatcgaacatagaaagcccggttctcaaaaaattcaacctttctgagatagaagagactaacctgagtttttaatcttgtccattcatccgccaaagccaaggccaaagctcagcgcgacgaagcactccaagttcatctcctgcaagctctacatttccgaatcccgcaacgctacggccgtggacgcagtggagcgtgcgagcaagagtgacccccaggtggtcgtcgtcagccagttcggggaccatcactacaaccgtttccgctacacgcttgtctcctacatcgtcgtcgtcgacggcggcggatcgtcggcggctggagaggcgacagtagtacatagcccgatcaggaaggtgttgctggcaatgatcgaggccgcgttctcaagcatagacctggaatcacagtcgggagcgcatccgaggatcggcgtagtcgacgacctgtccttccaccccgtgggccaagcgacgatcgaggacgccgcttctctggctaggcaggtagcgtctgacattgcctgcatcgcagcagtcccagtgttcctgtacgcagcagcccacccggcggggaagtcggtgggcgcggtccggcgtgagctcggctactaccgcccaaactacaggggcaaccagtggtcaggcagcgtgctccccaacgtcctgccggtgaagcctgacgtcggtccggcccacgtcgtctcgcacaagagaggcgctacgacggtgggtgtcacgccttggatcgagaactacaatgtccccgtgctgtgtaaggacgtcgccaccgtcaggaggatcacccgtggtgtcactggacggagcggaggccttcccacggtgcaggctctcgcgctcttccatggagatgactgcaccgagattgcgtgcttgctggatccagatcatgccagcgcctatcaagttcagaccgtcgtggaacagattgcaggagaccagggacttgaggttgagcagggatactacactgacataaccaaggacgaagcgctcgataagtatctcaagattgcttgcgctgacgactgatgagcttgtagaaataaatacatggggtaaatgtaaactcatgtttgtagcactgatgctgctgctggagcattattttttttgcccgtgtaaattcaaatttgcatctgaaaacttgagtttggatctgagctcttttcagagaagaaaacaaatgcatcatcagttttattctgaagaatgttaccgttttcctccagatggatgaagagatgagatccatgccgcaacgacttcctcttttcccaaatgttgaagaactctgaacacaggctaagaaacctcttttcccaaattttgaagaacttattatttgctggtattaggggaaaaaagatctttgcgagtgggtatgagtacaacccttgacaatgcacacgaccaaccctgccagacaacatatcaggatacgcattagtttagcatcttgtattacaataatgaaggtaccattgttgcgtggagacgacatgaagcacaaggctatgcccgatcgcagggaaaaaacgataaaggataaaagaaacttattacctaagagtgacgcgaatgcgacatacagtgtactttgcagatggacaggtatctcgttgccaatatcgttatggatgatggggaaaaacggtggccagtttttctcttccaacacaacgccagctgcaagaggagatggataacgatgctcgtattattatcattaacgaaagggagtcctcgtgaatgacgccaaaagatagcaaagcgacgtcggatgatgacactctgaaactccacctcgtgctgcggcgtcttctcgcctttttatttcctacatacgcagcagaggctaggtttaacagagaaatcaacaaactggaggccatacacaagggaacgttaataaggacctgaacatacgtatgaagccgcagcggggtatgtcagtatatggttagcctattaccaggtctccaacagctcccatattctatcttacatcccatcctttattttaaattttactttttccaaataaatattatcatctacagtaccgtgtcatctatcttacacgacacgacagtctaaaccggcaacaagatattactcgaatccttccatcggaagtttgagaataaatttgaattttcagaaggcagccgattacaacgcactagaatatgtgtgttaaaggccactttccctatcaggttggtgcgtacagttggagggaaaaaaattgaagatacaaattaaaactaatcgtctccttggccgagctcagatcccctgcacgatcatgattatgtagaaattccgacacgattcaattcaattgcattgatatagagtctgtgtgatcgggtgtagtctctgcaagatgatatcaatctaatctcttgtctttctctatcattccttggctttccccccttcttttttttgaaggatactgttctttgtcatcgcaagcgagcttggcagaaggtttgatgacgaagcaggagcatcaactcgaaatatgaaaaaagcaactccggatgaacgaagcgaacaaggagatacgcagaagcaatcaatcaaagcagggggaaaggaagagccggacggagctcatcgccggcgcgagctgggcctgggctgggcagggcaggcaggattaccgcgaaagggttgacctcggccgcggctgcgccctcctcgaaggggttgtcgtacgtcgatctccccgccatggacctttccttccctcctgccggttccttgctctgctccgct

SEQ ID NO: 48295 - DNA, 2600 bp, Zea Mays
cctcctcctactcctagttcaagatggtttcgagctgcaaaaaaagcatggcagtacgaatcgaccgaaagcctattttatccaagacctagctaactcgcaaaacaaaaagaaagaaatctgctgggttcagaaatttccgttacgacgatgatgatgtagggttcctgcattgctgtcgttaggctttttttttatccagatggatgcgccgtgggtttcctgcagcgcagcatgtagactagaggtcatcagaccatgccacaaaacacacagactagtttgtttgttttctgcacatatatgaacagcagctctgtcgaaccacaggaactgaatcgaaaccaatcgaacatagaaagcccggttctcaaaaaattcaacctttctgagatagaagagactaacctgagtttttaatcttgtccattcatccgccaaagccaaggccaaagctcagcgcgacgaagcactccaagttcatctcctgcaagctctacatttccgaatcccgcaacgctacggccgtggacgcagtggagcgtgcgagcaagagtgacccccaggtggtcgtcgtcagccagttcggggaccatcactacaaccgtttccgctacacgcttgtctcctacatcgtcgtcgtcgacggcggcggatcgtcggcggctggagaggcgacagtagtacatagcccgatcaggaaggtgttgctggcaatgatcgaggccgcgttctcaagcatagacctggaatcacagtcgggagcgcatccgaggatcggcgtagtcgacgacctgtccttccaccccgtgggccaagcgacgatcgaggacgccgcttctctggctaggcaggtagcgtctgacattgcctgcatcgcagcagtcccagtgttcctgtacgcagcagcccacccggcggggaagtcggtgggcgcggtccggcgtgagctcggctactaccgcccaaactacaggggcaaccagtggtcaggcagcgtgctccccaacgtcctgccggtgaagcctgacgtcggtccggcccacgtcgtctcgcacaagagaggcgctacgacggtgggtgtcacgccttggatcgagaactacaatgtccccgtgctgtgtaaggacgtcgccaccgtcaggaggatcacccgtggtgtcactggacggagcggaggccttcccacggtgcaggctctcgcgctcttccatggagatgactgcaccgagattgcgtgcttgctggatccagatcatgccagcgcctatcaagttcagaccgtcgtggaacagattgcaggagaccagggacttgaggttgagcagggatactacactgacataaccaaggacgaagcgctcgataagtatctcaagattgcttgcgctgacgactgatgagcttgtagaaataaatacatggggtaaatgtaaactcatgtttgtagcactgatgctgctgctggagcattattttttttgcccgtgtaaattcaaatttgcatctgaaaacttgagtttggatctgagctcttttcagagaagaaaacaaatgcatcatcagttttattctgaagaatgttaccgttttcctccagatggatgaagagatgagatccatgccgcaacgacttcctcttttcccaaatgttgaagaactctgaacacaggctaagaaacctcttttcccaaattttgaagaacttattatttgctggtattaggggaaaaaagatctttgcgagtgggtatgagtacaacccttgacaatgcacacgaccaaccctgccagacaacatatcaggatacgcattagtttagcatcttgtattacaataatgaaggtaccattgttgcgtggagacgacatgaagcacaaggctatgcccgatcgcagggaaaaaacgataaaggataaaagaaacttattacctaagagtgacgcgaatgcgacatacagtgtactttgcagatggacaggtatctcgttgccaatatcgttatggatgatggggaaaaacggtggccagtttttctcttccaacacaacgccagctgcaagaggagatggataacgatgctcgtattattatcattaacgaaagggagtcctcgtgaatgacgccaaaagatagcaaagcgacgtcggatgatgacactctgaaactccacctcgtgctgcggcgtcttctcgcctttttatttcctacatacgcagcagaggctaggtttaacagagaaatcaacaaactggaggccatacacaaggatactgttctttgtcatcgcaagcgagcttggcagaaggtttgatgacgaagcaggagcatcaactcgaaatatgaaaaaagcaactccggatgaacgaagcgaacaaggagatacgcagaagcaatcaatcaaagcagggggaaaggaagagccggacggagctcatcgccggcgcgagctgggcctgggctgggcagggcaggcaggattaccgcgaaagggttgacctcggccgcggctgcgccctcctcgaaggggttgtcgtacgtcgatctccccgccatggacctttccttccctcctgccggttccttgctctgctccgct

SEQ ID NO: 48296 - DNA, 2465 bp, Zea Mays
cctactcctagttcaagatggtttcgagctgcaaaaaaagcatggcagtacgaatcgaccgaaagcctattttatccaagacctagctaactcgcaaaacaaaaagaaagaaatctgctgggttcagaaatttccgttacgacgatgatgatgtagggttcctgcattgctgtcgttaggctttttttttatccagatggatgcgccgtgggtttcctgcagcgcagcatgtagactagaggtcatcagaccatgccacaaaacacacagactagtttgtttgttttctgcacatatatgaacagcagctctgtcgaaccacaggaactgaatcgaaaccaatcgaacatagaaagcccggttctcaaaaaattcaacctttctgagatagaagagactaacctgagtttttaatcttgtccattcatccgccaaagccaaggccaaagctcagcgcgacgaagcactccaagttcatctcctgcaagctctacatttccgaatcccgcaacgctacggccgtggacgcagtggagcgtgcgagcaagagtgacccccaggtggtcgtcgtcagccagttcggggaccatcactacaaccgtttccgctacacgcttgtctcctacatcgtcgtcgtcgacggcggcggatcgtcggcggctggagaggcgacagtagtacatagcccgatcaggaaggtgttgctggcaatgatcgaggccgcgttctcaagcatagacctggaatcacagtcgggagcgcatccgaggatcggcgtagtcgacgacctgtccttccaccccgtgggccaagcgacgatcgaggacgccgcttctctggctaggcaggtagcgtctgacattgcctgcatcgcagcagtcccagtgttcctgtacgcagcagcccacccggcggggaagtcggtgggcgcggtccggcgtgagctcggctactaccgcccaaactacaggggcaaccagtggtcaggcagcgtgctccccaacgtcctgccggtgaagcctgacgtcggtccggcccacgtcgtctcgcacaagagaggcgctacgacggtgggtgtcacgccttggatcgagaactacaatgtccccgtgctgtgtaaggacgtcgccaccgtcaggaggatcacccgtggtgtcactggacggagcggaggccttcccacggtgcaggctctcgcgctcttccatggagatgactgcaccgagattgcgtgcttgctggatccagatcatgccagcgcctatcaagttcagaccgtcgtggaacagattgcaggagaccagggacttgaggttgagcagggatactacactgacataaccaaggacgaagcgctcgataagtatctcaagattgcttgcgctgacgactgatgagcttgtagaaataaatacatgggatggatgaagagatgagatccatgccgcaacgacttcctcttttcccaaatgttgaagaactctgaacacaggctaagaaacctcttttcccaaattttgaagaacttattatttgctggtattaggggaaaaaagatctttgcgagtgggtatgagtacaacccttgacaatgcacacgaccaaccctgccagacaacatatcaggatacgcattagtttagcatcttgtattacaataatgaaggtaccattgttgcgtggagacgacatgaagcacaaggctatgcccgatcgcagggaaaaaacgataaaggataaaagaaacttattacctaagagtgacgcgaatgcgacatacagtgtactttgcagatggacaggtatctcgttgccaatatcgttatggatgatggggaaaaacggtggccagtttttctcttccaacacaacgccagctgcaagaggagatggataacgatgctcgtattattatcattaacgaaagggagtcctcgtgaatgacgccaaaagatagcaaagcgacgtcggatgatgacactctgaaactccacctcgtgctgcggcgtcttctcgcctttttatttcctacatacgcagcagaggctaggtttaacagagaaatcaacaaactggaggccatacacaagggaacgttaataaggacctgaacatacgtatgaagccgcagcggggatactgttctttgtcatcgcaagcgagcttggcagaaggtttgatgacgaagcaggagcatcaactcgaaatatgaaaaaagcaactccggatgaacgaagcgaacaaggagatacgcagaagcaatcaatcaaagcagggggaaaggaagagccggacggagctcatcgccggcgcgagctgggcctgggctgggcagggcaggcaggattaccgcgaaagggttgacctcggccgcggctgcgccctcctcgaaggggttgtcgtacgtcgatctccccgccatggacctttccttccctcctgccggttccttgctctgctccgct

SEQ ID NO: 48297 - DNA, 256 bp, Zea Mays
atcaaaacttgtttataccactatatgattcacagtaaccaaatcactctcacactcataaccttcaccaaatccatcaaataaattgcacccagacttaacacaccattaaaaccaacgatttaaattgttttatctctctcccttgctcattcaaattcaatggatattattatttagataatctctcgtcccttatctcccttctctttccagcgaccccgccacccctagcctctcgtctccgccgccctct

SEQ ID NO: 48298 - DNA, 1789 bp, Zea Mays
ttagaaccgaacttctctcttgctacaggtttatttttaatttcaaacacatgtaggatagaaaataggtatatgtaattaattatttacctgtcgtacctccaaacatgaatcctagcagatgagtcccctctcggagatccaatctctcgtcgcagggagaggggacagcggcccggcagcagccgtccaagcgaggcccagcagcagggccagtagtagtgagtggggcgatatcggcccgcggctgctgggagttagtgcagtgatggcgccagctcgatatatcagtcagtggccggcgaattggctccagtttaatgagccgagagcaagagcaggagcaggactgcaggtgcaggtgcacagtgtggtggctggctgcatcgagaggagagaggggagggaggaatcgaggtggttgaccccgagattaataggccttcaattcacgatccgattccctccacctcacgacgaacatgcatatgcagctgcagttgcattgcattcaactgatcgctgagcgccacccggcccattgaccaggacctcctcccatccgcccagctagcgccatttctttgctagccacgccattccactctccgtctcctttccgctgctgcttcgcactgccgggtgccggcggcgggtgtgtggcacgtcggtcatgggcagctgcgtgagcaagaaagccgcccgcgccggcgccaagggtgaggtggctgccccgctgccggtcgtggagaaggagaacgcccatgccctgccaccggtgctggaggtggaggtcgaggaggaggaggtcaaggaggtggtgctgtcggagacgccggtgccgcggccgcccaggctgctgccgccgctgccggagccggcgaagaggcggcaagagcaggcggaggccgttgatgatgaggcggcggcggtgtcggcgtcagagacatgcagcgccagcgacagcgctgcgtcggctgctgcgaagggagccaaggcggccggaggggagcgggaggtggagaagagggcgctgctggacgcgccggagaaagggaagcctacggcccggaggacgacgccggagccggaggagagccgcaagcccaagggagcgggcgcgggcgcgggcgccgttaacgggcacgtgcgggcgcggtctccgtcaccctcgtcggcgcacaggaggcagcagagcggcggccagggccagggccagggccaccagcaccatccggcgcggcgggaacatccggcggtggtgtcgggcatcgggtgccgcagcggccggttctcgccgtccgcggcgaggcgcgccgccgagagcgccgtccggcggacgcactcggccagggaggccgacatggcgcttccgtcgtcgaagcggtccctttccctcagtgccttcgccatcaacggcaacggccacggccacggggcaggcgtcgcgctctccgggcgggagcgggggcgggaccctggcgagcggtccggccggcggtcggtctccccggcgacgcgtaggcgcgcgcccgcctctcccagtcccagcgcggtccaccggcccgcgagccccgtgcgcaaggcggcggcgaaggagcacggcacccccgagcgaggcagcaggccggcgcgggtcatcagagacggcgggcccgacgctgagcgggcggcgttgctgggcggaggagtaggagcggagcagaggacgaagctggcggagggcgaggaaggcgcgctgggccaccagaacccctcggtggccatggagtgcttcatcttcctctag

SEQ ID NO: 48299 - DNA, 2510 bp, Zea Mays
agacaagcggctcaaatctcaccctcccaccacatccacaaaaaatcaccctccccacctcgatcctcttccgcgagacggcaaaccgatcggtggaacggaacctccctcagtctcaaggcgagcgagcaagcgcggctcacgtccacagggccagcgacagtaggctgtaggccccgcccgctccagatccataggcagccgcgcgcgatcgcggcgtggtggataaaagcgtgcgcgctgcgccgctgccacgaggtaagagaggcgggacgagcgtcagtgcagtgcgcgtgtggtcgggtagcgatccgaggagcgcgcagcgatggcagcggcggccgtggcgactgtggccaccccatcccccgcctccaggcggctgttcccctccgccggcccgtctcttctccggctcccaaggccgaccaagcggctccggcgcgccctgcggttcgccgctgcgggggatgaagcggacgtgctgcctggcccgggggccgagggggaggccgtggtgcccgggaggctggaggagcagccggacgagcagctgggcggaagccagctcgacatcggagggctcgccttccagggcgacgtgggcgggggcttcaccggcggcggagcgggctccggggcctccggcggtggcggcggcaacaagatgctggaccggggcatcaacacggccatcgtgctcggggccagcacctacgctctcaccaagctgctcaccgtcgaccaggactactggcatgggtggacgatcttcgagatcctgcgctatatgccggagcacaactggtccgcatacgaggaggccctcaaagccaacccggttctagccaagatgatgatcagcggtgtcgtctactcccttggtgactggattgcacagtgctacgaaggcaagccgatatttgatttcgaccgtgctaggatgttccggtctggccttgttgggttcacgcttcatgggtcactttcacattactactaccatatatgcgaggcactgttcccattcaaggattggtgggttgtccctgcaaaggttgcattcgatcagaccatctggtctgcgatctggaacagtatctactttgtggtcttgggtttccttcggttggaatcacctaccactatctacaacgagctcaagtccacattctggcccatgcttactgctggatggaagttgtggccttttgcgcacttagttacatatggtgtggttcctgttgagcaaagacttctatgggtcgactgtgtggagcttgtctgggtcacaatactgtcgacttattcaaacgaaaagtcagaggcaaggaattctgatagtacctccacaccagcggcttcaaaggacaactccacatagcaaccccaaagatcttggaaagttgcttcgcccttccctcacttcaggggttatgtaaattgtacagttagctgcagcaactatgcaggtgtaaccttttttttttgtagctatatattcatgaaacatgaactgtgcagcatgtgctatagaataccatgaagaaattagcgtgctccgttcgtcccccaaataagtataaaagtgaactgcacttgttttgggacgtaaggtactctgcaacttgaattatcctatggaaccagagttggtcggtgtactcctagcaaactagtttccataaatctgtcatattggaagagttgatacaatttcattactctgctaagagttctaccaagaaagcatgtacagatgtgtttaatgtagaggtttttaatgtgcttaagggggatatttattaaaaaaaatcgttggacctgtctctctgtgaagagacatattaacaatagacgtctatcttttactgtaggaatctgttatctattctatcgatatgatattgtacagttatatttatttttatatttattaataaattatatttataaactttctattacataataaagtctcttagttgtgtcttatgctcgaagaatcgctttagtatctctctactgtacatcctctaaataaaaggagcattcggggatcccacgcaagtgttactttcatttcccttatcccaccggagagggtgccgacgctgggccacggcgtgttgggagcggaggttttcctgaccttgcacatggggacgtcaaggaacgcgtcgtcgctgtccggcccgggtcgtggcgaaggatgaggcgaatggcgtgcaacaccgagcggtacacgtcatgggtgaccgacttcacgtggcaccctcccatgttgcacgtcagccatcgtgggggtgacagggcaaaggtggccagcagatggtggtgctggatctgggtgggtggaacatgagaagagagtaaagacacgctacgtcacatattgaggtagatttttggtgtagcatcttctctactaataataaacaaaaataatattgaagagagtaaagacacgctacgtctaatttgttttatctttttacattaaatttgac
